United States Patent Application Publication US 2023/0026259 A1 - sequence listing, part 60

SEQ ID NO: 156679 - DNA, 880 bp, Homo sapiens
  Payload ID: 10715
  Gene Symbol: MYNN
  Gene Name: myoneurin
  ENST ID: ENST00000602391
  CDS Start-End: 1-716
cacagccaaactgtgctctgaaagaacactctatgtctaatatagccagcgtcaagagtccttatgaggcggagaactccggggaagagctggatcagaggtattccaaggccaagccaatgtgtaacacatgtgggaaagtgttttcagaagccagcagtttgagaaggcacatgagaatacataaaggagtcaaaccttacgtctgccacttatgtggaaaggcatttacccaatgtaaccagctgaaaacgcatgtaagaactcatacaggtgagaagccatacaaatgtgaattgtgtgataaaggatttgctcagaaatgtcagctagtcttccatagtcgcatgcatcatggtgaagaaaaaccctataaatgtgatgtatgcaacttacagtttgcaacttctagcaatctcaagattcatgcaaggaagcatagtggagagaagccatatgtctgtgataggtgtggacagagatttgctcaagccagcacactgacctatcatgtccgtaggcatactggagaaaagccttatgtatgtgatacctgtgggaaggcatttgctgtctctagttctcttatcactcattctcgaaaacatacaggtgaaaaaccatacatatgtggtatttgtgggaaaagttttatttcctcaggagagctcaacaaacactttcggtcccatacagttgtttggagtatgaattaaatttgttaaagaattgtgttggttttccaagaaatatgccagataatcaatagtttttaaatgatttggattaaattgcacagatataccaagaaatgaaaaggaataggagaaagaccatttatctgcgaattatgtggaaattcttacacagatattaaaaa

SEQ ID NO: 156680 - DNA, 2630 bp, Homo sapiens
  Payload ID: 10715
  Gene Symbol: MYNN
  Gene Name: myoneurin
  Uniprot ID: Q9NPC7
  ENST ID: ENST00000602751
  CDS Start-End: 90-365
ctcccaagatggcggagacagagtgaagaaactgtgttccccccttgggttgctatcgatcaagggtaaaattccattctgatatcaaaatgcagtattcgcaccactgtgagcaccttttagagagactgaacaaacagcgggaagcaggttttctctgtgactgtaccatagtgattggggaattccagtttaaagctcataggaatgtgctggcctcctttagtgagtattttggtgcgatctacagaagcacttctgagaacaatgtctttcttgatcagagtcaggtgaaggctgatggatttcagaaactgttggagtttatatacacaggaactttaaatcttgacagagatatctagtattactggaaacattgaattgaatcaacagacttgtcttcttactctgcgagattataataatcgagagaaatcagaagtatctacagatttgattcaggcaaatcctaaacaaggcgcgttagcgaaaaagtcatctcaaacgaaaaagaagaagaaggctttcaactccccgaaaacagggcagaataaaacagtgcaatatcccagtgacatcttagagaatgcatctgttgaattattcctagatgcaaataaactgcccacacctgtagtagaacaagttgcacaaataaatgataattcagaactcgagttgacatcagttgtggaaaatacttttccagcacaagatattgtgcacactgttacagtgaaacggaaacgtggaaaatcacagccaaactgtgctctgaaagaacactctatgtctaatatagccagcgtcaagagtccttatgaggcggagaactccggggaagagctggatcagaggtattccaaggccaagccaatgtgtaacacatgtgggaaagtgttttcagaagccagcagtttgagaaggcacatgagaatacataaaggagtcaaaccttacgtctgccacttatgtggaaaggcatttacccaatgtaaccagctgaaaacgcatgtaagaactcatacaggtgagaagccatacaaatgtgaattgtgtgataaaggatttgctcagaaatgtcagctagtcttccatagtcgcatgcatcatggtgaagaaaaaccctataaatgtgatgtatgcaacttacagtttgcaacttctagcaatctcaagattcatgcaaggaagcatagtggagagaagccatatgtctgtgataggtgtggacagagatttgctcaagccagcacactgacctatcatgtccgtaggcatactggagaaaagccttatgtatgtgatacctgtgggaaggcatttgctgtctctagttctcttatcactcattctcgaaaacatacaggtgaaaaaccatacatatgtggtatttgtgggaaaagttttatttcctcaggagagctcaacaaacactttcggtcccatacaggagaaagaccatttatctgcgaattatgtggaaattcttacacagatattaaaaatttaaagaagcacaaaacaaaagtccattctggtgcagataaaactctagactccagtgcagaggatcatactttgagtgaacaggattccatacaaaaaagtcctttatcagaaactatggatgtgaagccttctgatatgactttaccattagctcttccacttgggactgaggaccatcacatgcttctgcctgtcacggatactcagtctcctacatcagatacattgttgaggtcaactgtgaatgggtattcagaaccacagttgatttttttacaacaattatactgactttgtaaggaatatggaattgctaagatatcattggtagcaaacatctctggtaaggtgcatatattcatattaaattcccattcatttgagttgtgaccattatttttcattcactgaagtaaaagcacctgatgctgcatcacaactgcaatgtttgtttttatttttggctttatgtctatactccacagagagctttttaagtaatgaattatgtagcactattttgggtggatgagttttattttcttttaaagctgccttaattccatttttattttgcattttagaattgcccttcatttactaaatcagccagttaatgtgattcagttgtgacctgtgggattttaaaattttcctgccctcataatttaagcaaaatccacgatagtatcagcccaagagtgtgttgctatttgtaagccccatggatcaatacataaactatgcataaaaataaaatttcatattttcgctcgtaaaaatttaggcgctgaataagaattgtgctatttctctattaatatattgttagaaataacttttctaatgaaacaaaaatgtttctcaaaatctagaaaagtgcatataaatttttgttcatttagaactgagtattctggagaaaaccaatggtcagcacttttggtttgagttatctgagattgtattttcaaaatgaattttaagtagatatttggtgtttttatcttgtcaaagacagtttcaaaatttgattcagtttatgttttattccgttctaaaatattggagatgaggaaaatgtacttgagttttgaaatattttggtaagcctc

SEQ ID NO: 156681 - DNA, 4596 bp, Homo sapiens
  Payload ID: 10716
  Gene Symbol: MYPN
  Gene Name: myopalladin
  Uniprot ID: Q86TC9
  ENST ID: ENST00000354393
  CDS Start-End: 215-3352
atataggaatggtgcttctcctgagacagaggttttgtttagttttttcatctgatactggatatgtcaagatgaatctatgaacttcaagcaaaacttattgaagctttggtatatgtgagtaatttgttttagagaactggagcctatagcgatataaaaaaatagcaaatgcaaacattttatatgaatctactagcatggaaattctcccatgcttaccgtccaagtgaagacttcctctgccatagaacttccagattccttggcattcctgtggatcatcccaatgtggtactgtgaaggcaaggagcttgaaaattccccagatattcacatcgtccaggcaggaaatctgcactcactgaccattgcggaagcctttgaagaggacacaggacgctattcctgctttgcttctaacatctatgggacagattcgacttctgctgagatttatatagaaggggtttcttcttctgactcagaaggcgaccctaacaaggaagagatgaatcgaatccagaagccaaatgaggtgtcatctcctcccactacctctgcagtcattcctccagcagtaccccaagcccagcatttggtggcccaacctcgtgtggcaaccatccagcagtgtcagagccccaccaattacttgcagggattggatggaaaacctatcattgcagctcctgtgtttacaaagatgctacaaaatttgtcagcttctgagggtcagctggttgtctttgaatgcagagtaaaaggagctccatctcctaaggttgagtggtatagagaagggactttaatagaagattctccagattttaggattttacagaaaaaacctcgatccatggcagagccagaggagatttgcaccttggtcattgctgaggtgtttgcagaagattctgggtgcttcacatgtactgcaagcaacaaatacggcacagtgtcaagcattgcacagctgcacgtgagaggaaatgaggacctcagcaacaacgggtctcttcactcagccaactctaccaccaacctggcagctattgagccacagccctccccaccccactcagagcctccatctgtggaacaaccccccaaacccaaactcgagggggttctggtgaaccacaatgagccccggtccagctccaggattgggcttcgtgtgcacttcaacctgcctgaagatgacaaaggaagtgaagcatcctccgaggctggtgtggtgaccaccagacagaccaggcccgattctttccaggagaggttcaacggacaggcaacaaaaaccccagagccttcttcccccgtgaaagagccccctccagttctggccaaacccaaacttgattccactcagttacaacagcttcataaccaagtcttactggaacaacaccaattgcaaaacccacctccttcatctcctaaggagtttcctttcagcatgactgttttgaactccaatgctcccccagcggtgacaacatccagtaagcaggtgaaggctccttcatcacagacgttcagcttggcccggccgaagtatttcttcccctccacgaacaccaccgcagcaactgtggccccttccagctctccggtgttcactttgagcagcactcctcaaactattcagaggacagtgagcaaagaaagcctcttagtgtctcacccctctgtgcaaaccaaatctccaggagggctttccatccaaaatgagccactcccaccaggcccaacagaaccaacaccaccaccattcacattttccatccccagcggaaaccagtttcagccccgctgtgtgtccccaattcctgtctctcctaccagccggattcagaacccagtggctttcctcagctctgttctgccttctctccctgccatcccacccacaaatgccatggggctgcctagaagtgcaccatccatgccatcccagggattagcgaagaaaaatacaaagtctcctcaaccagtgaatgatgataacattcgtgaaactaagaacgcagtgattcgagacttggggaaaaaaataactttcagtgatgtcagaccaaaccagcaggagtacaaaatttcaagctttgagcagaggctgatgaatgaaatagagtttcgcttggaacgtactcctgttgatgaatcagatgatgaaattcaacatgatgagatccccacgggcaagtgtattgctcccatctttgacaagagactcaagcacttccgggtcacagaaggctctccagttacattcacctgcaaaattgttgggatacctgttccaaaggtttactggttcaaagatgggaagcagatttctaagagaaatgagcactgcaaaatgaggcgagaaggagatgggacatgctctctgcacattgaatccactaccagtgatgacgatggcaactacaccatcatggcagccaacccccaggggagaatcagctgttctggccacttgatggtacaaagtttgcccattcgcagtcggctaacctctgctggtcagtctcacaggggaagatcccgagtgcaagaaagagacaaagagcccctacaggaacgctttttccgaccacatttcctgcaggctcctggggatatggtagctcatgaggggcgcctctgtcggctggactgtaaggtgagtggtttaccgcccccggagctgacatggctactcaatggccaacctgtgctaccagatgcctcccacaagatgctggtcagggagaccggagtccactctctgctcattgacccactcactcagcgcgacgcagggacctataagtgcatcgctaccaacaaaaccgggcagaattcttttagtctggagctctctgtagtagccaaagaggtgaagaaagcacctgtgatcctggagaaactacagaactgcggtgttcccgaaggccaccccgtgagactggagtgccgcgtgataggcatgcccccacctgtgttctactggaagaaagacaatgagaccatcccttgcaccagagagaggatcagtatgcaccaggacacaacagggtatgcctgccttctcattcagccagccaagaaatcagacgctggatggtacacgttgtcagccaagaatgaagccggcatcgtgtcgtgcactgccaggctggatatatacgctcagtggcaccatcagatcccaccgcccatgtctgtccggcccagtggcagtcgctacggatctctcaccagtaaaggacttgacatattttctgccttttcctccatggaaagcacgatggtgtattcatgctcttctcggagtgtagtggagagtgatgaactttaagaatgtctaggtacctgctgtgtaagagagcggactgtggagggggaatgagaacaagccagacttggtggtttccaagcaaccgaagttgagtaagttcccacactgctggacctgtggcaaagagtgctttgaataagtcagctagggattcttgcagtctcagctgagggagaaaggtagggctgtgccttctaaagattccaacagagatgtgagaagataatacagatgaaccaaagatgtcacacagttgccatccactgctttgggaaaaaactagcatgctcccctgctccctgttgtgttagggatgtttaggtcatactaggagcaattaggagccatatgcctgggctgagaagagctaggcagtagtgaccttaggatatgactaactcaccaaacaatgccaaggagaaaggcggacaggtcaccatcacctttcatcgattacatgtatagcagtagttttggtgaattcaccaaatcagcttccacttagcattaggaggtcatgccatacaactcacgtatgcgggcaaacacttttgatttgcatatcctgggtgtactgagccacataataaggtgtcaaaatgtgcttgagattccaaaaacttgctgaaacacttgatattgcacagtgcacttattttgtggccaaagcatggccttaccagcttgtctgcactattttcttttgggtggtgactgtttttttctgactttgcatatccctagacactagaactaaaggattggtaataaaccaatcagaaagaaatcctctgtggggtcactttaaaaactactagcttcaactaccacttacaaaatgtgcaagagtcatcatttgcccataaaatacacctcatgggctcctacccctttccccaaaagtctgaaagtgtaggaggaaggaagagatacaaacaaggagaggaaatgatgggagagtgttgtttttgtcacttgccccagcagagcaggggttttggaaggagaggtctttaatagctttgaaatgctttgagatcattggtcaaattgcattttctatgtagagaatattctgctaggtggaaaagttgggagaaaggggaatatgcatctttattctaatcaccaattcaaaccctgcctcttaaggaatttttagacttaagttcactgtgatatccctagtacctagaagagtacctagcacaaagtagacattcaataaatatttgctggttgaa

SEQ ID NO: 156682 - DNA, 6013 bp, Homo sapiens
  Payload ID: 10716
  Gene Symbol: MYPN
  Gene Name: myopalladin
  Uniprot ID: Q86TC9
  ENST ID: ENST00000358913
  CDS Start-End: 489-4451
aaaaataatgccatttttttgaatgatgaactatggtataatgcatttagtgttcattccaaacgtcaatcaataaataacatgggcctctagctataagggaaattctataggtaaaagaactgattgacccccacccccataggtgctgtcctgctatggaatccctttgctcagttttctcctgtccaatcaggtggaatgtttcacaggcacatggtttatacagctcaaaataacttgggacctgtgagctgacaaatgctctggctccggtggtgacaggttgtccagcttcttacagccatcttcactgaaactaaggttaactcctcactctctatggacggctactctctatttccaagggcgtgaagaatttccctcttctcctgtgctttcatctaaaagttctccctggataattatcattgcagtggagtgcctggattggacatcctcatctgggtcaactaaaaaaagaaagcatgcaagacgacagcatagaagcttctacttccatatctcagcttctaagagagagctatttagctgaaaccagacatcggggaaacaatgagaggagtcgagcggagccctcctccaacccttgccatttcggcagtccttctggggccgctgaaggaggcggaggccaagatgaccttccagatctttcagcctttctgagccaagaagaattagacgaaagtgtcaatttggcaagactggccatcaattacgaccctttggagaaggcagatgaaactcaagctagaaaacgactttctcctgatcagatgaaacactcacctaatttaagttttgagcctaacttctgccaggataaccctcgaagtcccaccagctctaaagaaagcccccaggaggcaaaaaggccacagtattgttctgaaacccagtccaaaaaagtatttttaaataaggctgccgacttcattgaagagctatcctcccttttcaaatcccacagctccaaaaggattagacctcgtgcctgcaaaaaccacaagagtaaactggaatctcaaaacaaagttatgcaggaaaacagctccagtttctcagatctgtcagaaagacgagaaagatcttctgttcccatccctatccctgcggataccagggataatgaagtgaatcacgccctggaacagcaggaagccaagaggcgtgaagcggagcaggctgccagtgaggcggctggtggagacactacaccagggtcttccccttcatctctgtactatgaagaacctctggggcaacctccccggttcactcaaaagttacggagcagagaagttccagaaggaactcgagtacagttggattgcatagtggtaggaattccaccacctcaagtaaggtggtactgtgaaggcaaggagcttgaaaattccccagatattcacatcgtccaggcaggaaatctgcactcactgaccattgcggaagcctttgaagaggacacaggacgctattcctgctttgcttctaacatctatgggacagattcgacttctgctgagatttatatagaaggggtttcttcttctgactcagaaggcgaccctaacaaggaagagatgaatcgaatccagaagccaaatgaggtgtcatctcctcccactacctctgcagtcattcctccagcagtaccccaagcccagcatttggtggcccaacctcgtgtggcaaccatccagcagtgtcagagccccaccaattacttgcagggattggatggaaaacctatcattgcagctcctgtgtttacaaagatgctacaaaatttgtcagcttctgagggtcagctggttgtctttgaatgcagagtaaaaggagctccatctcctaaggttgagtggtatagagaagggactttaatagaagattctccagattttaggattttacagaaaaaacctcgatccatggcagagccagaggagatttgcaccttggtcattgctgaggtgtttgcagaagattctgggtgcttcacatgtactgcaagcaacaaatacggcacagtgtcaagcattgcacagctgcacgtgagaggaaatgaggacctcagcaacaacgggtctcttcactcagccaactctaccaccaacctggcagctattgagccacagccctccccaccccactcagagcctccatctgtggaacaaccccccaaacccaaactcgagggggttctggtgaaccacaatgagccccggtccagctccaggattgggcttcgtgtgcacttcaacctgcctgaagatgacaaaggaagtgaagcatcctccgaggctggtgtggtgaccaccagacagaccaggcccgattctttccaggagaggttcaacggacaggcaacaaaaaccccagagccttcttcccccgtgaaagagccccctccagttctggccaaacccaaacttgattccactcagttacaacagcttcataaccaagtcttactggaacaacaccaattgcaaaacccacctccttcatctcctaaggagtttcctttcagcatgactgttttgaactccaatgctcccccagcggtgacaacatccagtaagcaggtgaaggctccttcatcacagacgttcagcttggcccggccgaagtatttcttcccctccacgaacaccaccgcagcaactgtggccccttccagctctccggtgttcactttgagcagcactcctcaaactattcagaggacagtgagcaaagaaagcctcttagtgtctcacccctctgtgcaaaccaaatctccaggagggctttccatccaaaatgagccactcccaccaggcccaacagaaccaacaccaccaccattcacattttccatccccagcggaaaccagtttcagccccgctgtgtgtccccaattcctgtctctcctaccagccggattcagaacccagtggctttcctcagctctgttctgccttctctccctgccatcccacccacaaatgccatggggctgcctagaagtgcaccatccatgccatcccagggattagcgaagaaaaatacaaagtctcctcaaccagtgaatgatgataacattcgtgaaactaagaacgcagtgattcgagacttggggaaaaaaataactttcagtgatgtcagaccaaaccagcaggagtacaaaatttcaagctttgagcagaggctgatgaatgaaatagagtttcgcttggaacgtactcctgttgatgaatcagatgatgaaattcaacatgatgagatccccacgggcaagtgtattgctcccatctttgacaagagactcaagcacttccgggtcacagaaggctctccagttacattcacctgcaaaattgttgggatacctgttccaaaggtttactggttcaaagatgggaagcagatttctaagagaaatgagcactgcaaaatgaggcgagaaggagatgggacatgctctctgcacattgaatccactaccagtgatgacgatggcaactacaccatcatggcagccaacccccaggggagaatcagctgttctggccacttgatggtacaaagtttgcccattcgcagtcggctaacctctgctggtcagtctcacaggggaagatcccgagtgcaagaaagagacaaagagcccctacaggaacgctttttccgaccacatttcctgcaggctcctggggatatggtagctcatgaggggcgcctctgtcggctggactgtaaggtgagtggtttaccgcccccggagctgacatggctactcaatggccaacctgtgctaccagatgcctcccacaagatgctggtcagggagaccggagtccactctctgctcattgacccactcactcagcgcgacgcagggacctataagtgcatcgctaccaacaaaaccgggcagaattcttttagtctggagctctctgtagtagccaaagaggtgaagaaagcacctgtgatcctggagaaactacagaactgcggtgttcccgaaggccaccccgtgagactggagtgccgcgtgataggcatgcccccacctgtgttctactggaagaaagacaatgagaccatcccttgcaccagagagaggatcagtatgcaccaggacacaacagggtatgcctgccttctcattcagccagccaagaaatcagacgctggatggtacacgttgtcagccaagaatgaagccggcatcgtgtcgtgcactgccaggctggatatatacgctcagtggcaccatcagatcccaccgcccatgtctgtccggcccagtggcagtcgctacggatctctcaccagtaaaggacttgacatattttctgccttttcctccatggaaagcacgatggtgtattcatgctcttctcggagtgtagtggagagtgatgaactttaagaatgtctaggtacctgctgtgtaagagagcggactgtggagggggaatgagaacaagccagacttggtggtttccaagcaaccgaagttgagtaagttcccacactgctggacctgtggcaaagagtgctttgaataagtcagctagggattcttgcagtctcagctgagggagaaaggtagggctgtgccttctaaagattccaacagagatgtgagaagataatacagatgaaccaaagatgtcacacagttgccatccactgctttgggaaaaaactagcatgctcccctgctccctgttgtgttagggatgtttaggtcatactaggagcaattaggagccatatgcctgggctgagaagagctaggcagtagtgaccttaggatatgactaactcaccaaacaatgccaaggagaaaggcggacaggtcaccatcacctttcatcgattacatgtatagcagtagttttggtgaattcaccaaatcagcttccacttagcattaggaggtcatgccatacaactcacgtatgcgggcaaacacttttgatttgcatatcctgggtgtactgagccacataataaggtgtcaaaatgtgcttgagattccaaaaacttgctgaaacacttgatattgcacagtgcacttattttgtggccaaagcatggccttaccagcttgtctgcactattttcttttgggtggtgactgtttttttctgactttgcatatccctagacactagaactaaaggattggtaataaaccaatcagaaagaaatcctctgtggggtcactttaaaaactactagcttcaactaccacttacaaaatgtgcaagagtcatcatttgcccataaaatacacctcatgggctcctacccctttccccaaaagtctgaaagtgtaggaggaaggaagagatacaaacaaggagaggaaatgatgggagagtgttgtttttgtcacttgccccagcagagcaggggttttggaaggagaggtctttaatagctttgaaatgctttgagatcattggtcaaattgcattttctatgtagagaatattctgctaggtggaaaagttgggagaaaggggaatatgcatctttattctaatcaccaattcaaaccctgcctcttaaggaatttttagacttaagttcactgtgatatccctagtacctagaagagtacctagcacaaagtagacattcaataaatatttgctggttgaatgaatcttctgttattatgtctattataagataacctaatcttatattctgcaggaatatgccacccacacaccagtccaaacactgccctgggaatgctcatcacagcacagtttgctctaggctgtgcagggaaatgaattgcaggtgtctgttttcaattccctgtgctggaatccctggtgctgtctgtgccaagcacactcagctggcattgtatttgtgtgaacagacagtaactgcttagaaaggcttgaaactgtcttcacttcaaggcaaggatttccagcataaaaataaattcattcactggagaaa

SEQ ID NO: 156683 - DNA, 2126 bp, Homo sapiens
  Payload ID: 10716
  Gene Symbol: MYPN
  Gene Name: myopalladin
  Uniprot ID: Q86TC9
  ENST ID: ENST00000373675
  CDS Start-End: 230-1753
aaatgctctggctccggtggtgacaggttgtccagcttcttacagccatcttcactgaaactaaggttaactcctcactctctatggacggctactctctatttccaagggcgtgaagaatttccctcttctcctgtgctttcatctaaaagttctccctggataattatcattgcagtggagtgcctggattggacatcctcatctgggtcaactaaaaaaagaaagcatgcaagacgacagcatagaagcttctacttccatatctcagcttctaagagagagctatttagctgaaaccagacatcggggaaacaatgagaggagtcgagcggagccctcctccaacccttgccatttcggcagtccttctggggccgctgaaggaggcggaggccaagatgaccttccagatctttcagcctttctgagccaagaagaattagacgaaagtgtcaatttggcaagactggccatcaattacgaccctttggagaaggcagatgaaactcaagctagaaaacgactttctcctgatcagatgaaacactcacctaatttaagttttgagcctaacttctgccaggataaccctcgaagtcccaccagctctaaagaaagcccccaggaggcaaaaaggccacagtattgttctgaaacccagtccaaaaaagtatttttaaataaggctgccgacttcattgaagagctatcctcccttttcaaatcccacagctccaaaaggattagacctcgtgcctgcaaaaaccacaagagtaaactggaatctcaaaacaaagttatgcaggaaaacagctccagtttctcagatctgtcagaaagacgagaaagatcttctgttcccatccctatccctgcggataccagggataatgaagtgaatcacgccctggaacagcaggaagccaagaggcgtgaagcggagcaggctgccagtgaggcggctggtggagacactacaccagggtcttccccttcatctctgtactatgaagaacctctggggcaacctccccggttcactcaaaagttacggagcagagaagttccagaaggaactcgagtacagttggattgcatagtggtaggaattccaccacctcaagtaaggtggtactgtgaaggcaaggagcttgaaaattccccagatattcacatcgtccaggcaggaaatctgcactcactgaccattgcggaagcctttgaagaggacacaggacgctattcctgctttgcttctaacatctatgggacagattcgacttctgctgagatttatatagaaggggtttcttcttctgactcagaaggcgaccctaacaaggaagagatgaatcgaatccagaagccaaatgaggtgtcatctcctcccactacctctgcagtcattcctccagcagtaccccaagcccagcatttggtggcccaacctcgtgtggcaaccatccagcagtgtcagagccccaccaattacttgcagggattggatggaaaacctatcattgcagctcctgtgtttacaaagatgctacaaaatttgtcagcttctgagggtcagctggttgtctttgaatgcagagtaaaaggagctccatctcctaaggttgagtggtatagagaagggactttaatagaagattctccagattttaggattttacagaaaaaacctcgatccatggcagagccaggtaaagatgatttcaactttaatttattagtatatgagtgattttatatatacaagaatacataatgaagttacactgagatgaataaaaagtgaaaaataaagttttaggaaaaaaagatccaaatgggccgggtgcagtggctcatgtctgtaattccagcactttgcgaggccgaggcgggcggattacttgagatcagaagttcaagaccagcctggcctacatgacaaaatgaaaccccatctctactaaaaatataaaaattagccaggcatagtggcgcacgtctgtaatcccagctacctgggaggctgaggcaggagaatcacttgagcctgggaggtggaggttgcagtgagccgagatcgtgacactacagtccagctgcgcgacagaacaagaatctgtctc

SEQ ID NO: 156684 - DNA, 5707 bp, Homo sapiens
  Payload ID: 10716
  Gene Symbol: MYPN
  Gene Name: myopalladin
  Uniprot ID: Q86TC9
  ENST ID: ENST00000540630
  CDS Start-End: 188-4150
gcagtgagatttggactttagatgatcctggttgattgatataggaatggtgcttctcctgagacagggcgtgaagaatttccctcttctcctgtgctttcatctaaaagttctccctggataattatcattgcagtggagtgcctggattggacatcctcatctgggtcaactaaaaaaagaaagcatgcaagacgacagcatagaagcttctacttccatatctcagcttctaagagagagctatttagctgaaaccagacatcggggaaacaatgagaggagtcgagcggagccctcctccaacccttgccatttcggcagtccttctggggccgctgaaggaggcggaggccaagatgaccttccagatctttcagcctttctgagccaagaagaattagacgaaagtgtcaatttggcaagactggccatcaattacgaccctttggagaaggcagatgaaactcaagctagaaaacgactttctcctgatcagatgaaacactcacctaatttaagttttgagcctaacttctgccaggataaccctcgaagtcccaccagctctaaagaaagcccccaggaggcaaaaaggccacagtattgttctgaaacccagtccaaaaaagtatttttaaataaggctgccgacttcattgaagagctatcctcccttttcaaatcccacagctccaaaaggattagacctcgtgcctgcaaaaaccacaagagtaaactggaatctcaaaacaaagttatgcaggaaaacagctccagtttctcagatctgtcagaaagacgagaaagatcttctgttcccatccctatccctgcggataccagggataatgaagtgaatcacgccctggaacagcaggaagccaagaggcgtgaagcggagcaggctgccagtgaggcggctggtggagacactacaccagggtcttccccttcatctctgtactatgaagaacctctggggcaacctccccggttcactcaaaagttacggagcagagaagttccagaaggaactcgagtacagttggattgcatagtggtaggaattccaccacctcaagtaaggtggtactgtgaaggcaaggagcttgaaaattccccagatattcacatcgtccaggcaggaaatctgcactcactgaccattgcggaagcctttgaagaggacacaggacgctattcctgctttgcttctaacatctatgggacagattcgacttctgctgagatttatatagaaggggtttcttcttctgactcagaaggcgaccctaacaaggaagagatgaatcgaatccagaagccaaatgaggtgtcatctcctcccactacctctgcagtcattcctccagcagtaccccaagcccagcatttggtggcccaacctcgtgtggcaaccatccagcagtgtcagagccccaccaattacttgcagggattggatggaaaacctatcattgcagctcctgtgtttacaaagatgctacaaaatttgtcagcttctgagggtcagctggttgtctttgaatgcagagtaaaaggagctccatctcctaaggttgagtggtatagagaagggactttaatagaagattctccagattttaggattttacagaaaaaacctcgatccatggcagagccagaggagatttgcaccttggtcattgctgaggtgtttgcagaagattctgggtgcttcacatgtactgcaagcaacaaatacggcacagtgtcaagcattgcacagctgcacgtgagaggaaatgaggacctcagcaacaacgggtctcttcactcagccaactctaccaccaacctggcagctattgagccacagccctccccaccccactcagagcctccatctgtggaacaaccccccaaacccaaactcgagggggttctggtgaaccacaatgagccccggtccagctccaggattgggcttcgtgtgcacttcaacctgcctgaagatgacaaaggaagtgaagcatcctccgaggctggtgtggtgaccaccagacagaccaggcccgattctttccaggagaggttcaacggacaggcaacaaaaaccccagagccttcttcccccgtgaaagagccccctccagttctggccaaacccaaacttgattccactcagttacaacagcttcataaccaagtcttactggaacaacaccaattgcaaaacccacctccttcatctcctaaggagtttcctttcagcatgactgttttgaactccaatgctcccccagcggtgacaacatccagtaagcaggtgaaggctccttcatcacagacgttcagcttggcccggccgaagtatttcttcccctccacgaacaccaccgcagcaactgtggccccttccagctctccggtgttcactttgagcagcactcctcaaactattcagaggacagtgagcaaagaaagcctcttagtgtctcacccctctgtgcaaaccaaatctccaggagggctttccatccaaaatgagccactcccaccaggcccaacagaaccaacaccaccaccattcacattttccatccccagcggaaaccagtttcagccccgctgtgtgtccccaattcctgtctctcctaccagccggattcagaacccagtggctttcctcagctctgttctgccttctctccctgccatcccacccacaaatgccatggggctgcctagaagtgcaccatccatgccatcccagggattagcgaagaaaaatacaaagtctcctcaaccagtgaatgatgataacattcgtgaaactaagaacgcagtgattcgagacttggggaaaaaaataactttcagtgatgtcagaccaaaccagcaggagtacaaaatttcaagctttgagcagaggctgatgaatgaaatagagtttcgcttggaacgtactcctgttgatgaatcagatgatgaaattcaacatgatgagatccccacgggcaagtgtattgctcccatctttgacaagagactcaagcacttccgggtcacagaaggctctccagttacattcacctgcaaaattgttgggatacctgttccaaaggtttactggttcaaagatgggaagcagatttctaagagaaatgagcactgcaaaatgaggcgagaaggagatgggacatgctctctgcacattgaatccactaccagtgatgacgatggcaactacaccatcatggcagccaacccccaggggagaatcagctgttctggccacttgatggtacaaagtttgcccattcgcagtcggctaacctctgctggtcagtctcacaggggaagatcccgagtgcaagaaagagacaaagagcccctacaggaacgctttttccgaccacatttcctgcaggctcctggggatatggtagctcatgaggggcgcctctgtcggctggactgtaaggtgagtggtttaccgcccccggagctgacatggctactcaatggccaacctgtgctaccagatgcctcccacaagatgctggtcagggagaccggagtccactctctgctcattgacccactcactcagcgcgacgcagggacctataagtgcatcgctaccaacaaaaccgggcagaattcttttagtctggagctctctgtagtagccaaagaggtgaagaaagcacctgtgatcctggagaaactacagaactgcggtgttcccgaaggccaccccgtgagactggagtgccgcgtgataggcatgcccccacctgtgttctactggaagaaagacaatgagaccatcccttgcaccagagagaggatcagtatgcaccaggacacaacagggtatgcctgccttctcattcagccagccaagaaatcagacgctggatggtacacgttgtcagccaagaatgaagccggcatcgtgtcgtgcactgccaggctggatatatacgctcagtggcaccatcagatcccaccgcccatgtctgtccggcccagtggcagtcgctacggatctctcaccagtaaaggacttgacatattttctgccttttcctccatggaaagcacgatggtgtattcatgctcttctcggagtgtagtggagagtgatgaactttaagaatgtctaggtacctgctgtgtaagagagcggactgtggagggggaatgagaacaagccagacttggtggtttccaagcaaccgaagttgagtaagttcccacactgctggacctgtggcaaagagtgctttgaataagtcagctagggattcttgcagtctcagctgagggagaaaggtagggctgtgccttctaaagattccaacagagatgtgagaagataatacagatgaaccaaagatgtcacacagttgccatccactgctttgggaaaaaactagcatgctcccctgctccctgttgtgttagggatgtttaggtcatactaggagcaattaggagccatatgcctgggctgagaagagctaggcagtagtgaccttaggatatgactaactcaccaaacaatgccaaggagaaaggcggacaggtcaccatcacctttcatcgattacatgtatagcagtagttttggtgaattcaccaaatcagcttccacttagcattaggaggtcatgccatacaactcacgtatgcgggcaaacacttttgatttgcatatcctgggtgtactgagccacataataaggtgtcaaaatgtgcttgagattccaaaaacttgctgaaacacttgatattgcacagtgcacttattttgtggccaaagcatggccttaccagcttgtctgcactattttcttttgggtggtgactgtttttttctgactttgcatatccctagacactagaactaaaggattggtaataaaccaatcagaaagaaatcctctgtggggtcactttaaaaactactagcttcaactaccacttacaaaatgtgcaagagtcatcatttgcccataaaatacacctcatgggctcctacccctttccccaaaagtctgaaagtgtaggaggaaggaagagatacaaacaaggagaggaaatgatgggagagtgttgtttttgtcacttgccccagcagagcaggggttttggaaggagaggtctttaatagctttgaaatgctttgagatcattggtcaaattgcattttctatgtagagaatattctgctaggtggaaaagttgggagaaaggggaatatgcatctttattctaatcaccaattcaaaccctgcctcttaaggaatttttagacttaagttcactgtgatatccctagtacctagaagagtacctagcacaaagtagacattcaataaatatttgctggttgaatgaatcttctgttattatgtctattataagataacctaatcttatattctgcaggaatatgccacccacacaccagtccaaacactgccctgggaatgctcatcacagcacagtttgctctaggctgtgcagggaaatgaattgcaggtgtctgttttcaattccctgtgctggaatccctggtgctgtctgtgccaagcacactcagctggcattgtatttgtgtgaacagacagtaactgcttagaaaggcttgaaactgtcttcacttcaaggcaaggatttccagcataaaaataaattcattcactgg

SEQ ID NO: 156685 - DNA, 6116 bp, Homo sapiens
  Payload ID: 10716
  Gene Symbol: MYPN
  Gene Name: myopalladin
  ENST ID: ENST00000613327
  CDS Start-End: 1479-4559
gtggaatgtttcacaggcacatggtttatacagctcaaaataacttgggacctgtgagctgacaaatgctctggctccggtggtgacaggttgtccagcttcttacagccatcttcactgaaactaaggttaactcctcactctctatggacggctactctctatttccaagggcgtgaagaatttccctcttctcctgtgctttcatctaaaagttctccctggataattatcattgcagtggagtgcctggattggacatcctcatctgggtcaactaaaaaaagaaagggtcttcttagagcctgaagaaggatagcaccgagttaacatgagttgaaaaacatgtccaaagcatgcaagacgacagcatagaagcttctacttccatatctcagcttctaagagagagctatttagctgaaaccagacatcggggaaacaatgagaggagtcgagcggagccctcctccaacccttgccatttcggcagtccttctggggccgctgaaggaggcggaggccaagatgaccttccagatctttcagcctttctgagccaagaagaattagacgaaagtgtcaatttggcaagactggccatcaattacgaccctttggagaaggcagatgaaactcaagctagaaaacgactttctcctgatcagatgaaacactcacctaatttaagttttgagcctaacttctgccaggataaccctcgaagtcccaccagctctaaagaaagcccccaggaggcaaaaaggccacagtattgttctgaaacccagtccaaaaaagtatttttaaataaggctgccgacttcattgaagagctatcctcccttttcaaatcccacagctccaaaaggattagacctcgtgcctgcaaaaaccacaagagtaaactggaatctcaaaacaaagttatgcaggaaaacagctccagtttctcagatctgtcagaaagacgagaaagatcttctgttcccatccctatccctgcggataccagggataatgaagtgaatcacgccctggaacagcaggaagccaagaggcgtgaagcggagcaggctgccagtgaggcggctggtggagacactacaccagggtcttccccttcatctctgtactatgaagaacctctggggcaacctccccggttcactcaaaagttacggagcagagaagttccagaaggaactcgagtacagttggattgcatagtggtaggaattccaccacctcaagtaagttgcactctgtatatgaagaagagttactctgatgcttggagagagctggaaatgcttgctagctagccaaatgagcagatctggcaagccatccttgtgcgtgaaaggcctgctgaggccatcctggccatctgagtaaggacaaaaacacttctgacagagagtttgggcatttgaatcattccacttatctccttctggctatccaattgctcatagatgtttccactctcattttggtggtactgtgaaggcaaggagcttgaaaattccccagatattcacatcgtccaggcaggaaatctgcactcactgaccattgcggaagcctttgaagaggacacaggacgctattcctgctttgcttctaacatctatgggacagattcgacttctgctgagatttatatagaaggggtttcttcttctgactcagaaggcgaccctaacaaggaagagatgaatcgaatccagaagccaaatgaggtgtcatctcctcccactacctctgcagtcattcctccagcagtaccccaagcccagcatttggtggcccaacctcgtgtggcaaccatccagcagtgtcagagccccaccaattacttgcagggattggatggaaaacctatcattgcagctcctgtgtttacaaagatgctacaaaatttgtcagcttctgagggtcagctggttgtctttgaatgcagagtaaaaggagctccatctcctaaggttgagtggtatagagaagggactttaatagaagattctccagattttaggattttacagaaaaaacctcgatccatggcagagccagaggagatttgcaccttggtcattgctgaggtgtttgcagaagattctgggtgcttcacatgtactgcaagcaacaaatacggcacagtgtcaagcattgcacagctgcacgtgagaggaaatgaggacctcagcaacaacgggtctcttcactcagccaactctaccaccaacctggcagctattgagccacagccctccccaccccactcagagcctccatctgtggaacaaccccccaaacccaaactcgagggggttctggtgaaccacaatgagccccggtccagctccaggattgggcttcgtgtgcacttcaacctgcctgaagatgacaaaggaagtgaagcatcctccgaggctggtgtggtgaccaccagacagaccaggcccgattctttccaggagaggttcaacggacaggcaacaaaaaccccagagccttcttcccccgtgaaagagccccctccagttctggccaaacccaaacttgattccactcagttacaacagcttcataaccaagtcttactggaacaacaccaattgcaaaacccacctccttcatctcctaaggagtttcctttcagcatgactgttttgaactccaatgctcccccagcggtgacaacatccagtaagcaggtgaaggctccttcatcacagacgttcagcttggcccggccgaagtatttcttcccctccacgaacaccaccgcagcaactgtggccccttccagctctccggtgttcactttgagcagcactcctcaaactattcagaggacagtgagcaaagaaagcctcttagtgtctcacccctctgtgcaaaccaaatctccaggagggctttccatccaaaatgagccactcccaccaggcccaacagaaccaacaccaccaccattcacattttccatccccagcggaaaccagtttcagccccgctgtgtgtccccaattcctgtctctcctaccagccggattcagaacccagtggctttcctcagctctgttctgccttctctccctgccatcccacccacaaatgccatggggctgcctagaagtgcaccatccatgccatcccagggattagcgaagaaaaatacaaagtctcctcaaccagtgaatgatgataacattcgtgaaactaagaacgcagtgattcgagacttggggaaaaaaataactttcagtgatgtcagaccaaaccagcaggagtacaaaatttcaagctttgagcagaggctgatgaatgaaatagagtttcgcttggaacgtactcctgttgatgaatcagatgatgaaattcaacatgatgagatccccacgggcaagtgtattgctcccatctttgacaagagactcaagcacttccgggtcacagaaggctctccagttacattcacctgcaaaattgttgggatacctgttccaaaggtttactggttcaaagatgggaagcagatttctaagagaaatgagcactgcaaaatgaggcgagaaggagatgggacatgctctctgcacattgaatccactaccagtgatgacgatggcaactacaccatcatggcagccaacccccaggggagaatcagctgttctggccacttgatggtacaaagtttgcccattcgcagtcggctaacctctgctggtcagtctcacaggggaagatcccgagtgcaagaaagagacaaagagcccctacaggaacgctttttccgaccacatttcctgcaggctcctggggatatggtagctcatgaggggcgcctctgtcggctggactgtaaggtgagtggtttaccgcccccggagctgacatggctactcaatggccaacctgtgctaccagatgcctcccacaagatgctggtcagggagaccggagtccactctctgctcattgacccactcactcagcgcgacgcagggacctataagtgcatcgctaccaacaaaaccgggcagaattcttttagtctggagctctctgtagtagccaaagaggtgaagaaagcacctgtgatcctggagaaactacagaactgcggtgttcccgaaggccaccccgtgagactggagtgccgcgtgataggcatgcccccacctgtgttctactggaagaaagacaatgagaccatcccttgcaccagagagaggatcagtatgcaccaggacacaacagggtatgcctgccttctcattcagccagccaagaaatcagacgctggatggtacacgttgtcagccaagaatgaagccggcatcgtgtcgtgcactgccaggctggatatatacgctcagtggcaccatcagatcccaccgcccatgtctgtccggcccagtggcagtcgctacggatctctcaccagtaaaggacttgacatattttctgccttttcctccatggaaagcacgatggtgtattcatgctcttctcggagtgtagtggagagtgatgaactttaagaatgtctaggtacctgctgtgtaagagagcggactgtggagggggaatgagaacaagccagacttggtggtttccaagcaaccgaagttgagtaagttcccacactgctggacctgtggcaaagagtgctttgaataagtcagctagggattcttgcagtctcagctgagggagaaaggtagggctgtgccttctaaagattccaacagagatgtgagaagataatacagatgaaccaaagatgtcacacagttgccatccactgctttgggaaaaaactagcatgctcccctgctccctgttgtgttagggatgtttaggtcatactaggagcaattaggagccatatgcctgggctgagaagagctaggcagtagtgaccttaggatatgactaactcaccaaacaatgccaaggagaaaggcggacaggtcaccatcacctttcatcgattacatgtatagcagtagttttggtgaattcaccaaatcagcttccacttagcattaggaggtcatgccatacaactcacgtatgcgggcaaacacttttgatttgcatatcctgggtgtactgagccacataataaggtgtcaaaatgtgcttgagattccaaaaacttgctgaaacacttgatattgcacagtgcacttattttgtggccaaagcatggccttaccagcttgtctgcactattttcttttgggtggtgactgtttttttctgactttgcatatccctagacactagaactaaaggattggtaataaaccaatcagaaagaaatcctctgtggggtcactttaaaaactactagcttcaactaccacttacaaaatgtgcaagagtcatcatttgcccataaaatacacctcatgggctcctacccctttccccaaaagtctgaaagtgtaggaggaaggaagagatacaaacaaggagaggaaatgatgggagagtgttgtttttgtcacttgccccagcagagcaggggttttggaaggagaggtctttaatagctttgaaatgctttgagatcattggtcaaattgcattttctatgtagagaatattctgctaggtggaaaagttgggagaaaggggaatatgcatctttattctaatcaccaattcaaaccctgcctcttaaggaatttttagacttaagttcactgtgatatccctagtacctagaagagtacctagcacaaagtagacattcaataaatatttgctggttgaatgaatcttctgttattatgtctattataagataacctaatcttatattctgcaggaatatgccacccacacaccagtccaaacactgccctgggaatgctcatcacagcacagtttgctctaggctgtgcagggaaatgaattgcaggtgtctgttttcaattccctgtgctggaatccctggtgctgtctgtgccaagcacactcagctggcattgtatttgtgtgaacagacagtaactgcttagaaaggcttgaaactgtcttcacttcaaggcaaggatttccagcataaaaataaattcattcactgg

SEQ ID NO: 156686 - DNA, 281 bp, Homo sapiens
  Payload ID: 10717
  Gene Symbol: MRLN
  Gene Name: myoregulin
  ENST ID: ENST00000599605
  CDS Start-End: 31-33
aatccatttaacccttagtggacacagaacatgtttcagagagcacggagttgggggctggagtgcagtggcaccatctcggcttaccgcaacctccgcctcctgggttcaaacaatactcctaccttggcctcctgagtagctgggattacaggaatcaaggttgctaagagaccacctgtgctgaatacactttgttctggcaagagcagaaaactgagaagccgtgttacctaccactacctgggattaattcagggagcgggataattctggatatg

SEQ ID NO: 156687 - DNA, 495 bp, Homo sapiens
  Payload ID: 10717
  Gene Symbol: MRLN
  Gene Name: myoregulin
  Uniprot ID: P0DMT0
  ENST ID: ENST00000430431
  CDS Start-End: 290-430
tcattcccttgactttggacttcgcttattgaacccctggacaacggaatctccctctgtcgcccaggctggagtgcagtggcaccatctcggcttaccgcaacctccgcctcctgggttcaaacaatactcctaccttggcctcctgagtagctgggattacaggaatcaaggttgctaagagaccacctgtgctgaatacactttgttctggcaagagcagaaaactgagaagccgtgttacctaccactacctgggattaattcagggagcgggataattctggatatgactggtaaaaactggatattaatttctactactactcccaaaagtctagaagatgaaattgtgggaagacttctaaaaattttgtttgttatctttgttgacttaatttctattatatatgttgtgataacttcttagaaagctgacttcctttccatgtacatttcaaactgaattacagtgaataaaaatttgtattttaa

SEQ ID NO: 156688 - DNA, 644 bp, Homo sapiens
  Payload ID: 10717
  Gene Symbol: MRLN
  Gene Name: myoregulin
  Uniprot ID: P0DMT0
  ENST ID: ENST00000628562
  CDS Start-End: 136-276
atttgacacaggaatcaaggttgctaagagaccacctgtgctgaatacactttgttctggcaagagcagaaaactgagaagccgtgttacctaccactacctgggattaattcagggagcgggataattctggatatgactggtaaaaactggatattaatttctactactactcccaaaagtctagaagatgaaattgtgggaagacttctaaaaattttgtttgttatctttgttgacttaatttctattatatatgttgtgataacttcttagaaagctgacttcctttccatgtacatttcaaactgaattacagtgaataaaaatttgtattttaacttgttgagtgactcacattttatgacattgccaatttattctagaagccaacaggacactgcaatacaaacaacattgtgtattgtttagttctttatggtttatgaaacattcacatatactgaagtgaatttttttccccaaaaacatctatcctactgagtcatgaaacttctagatttttagccaggtgtggtggctcacacctgtaatcccagcactttgagaggcccaggtaggcggatcccttgagtgcaggagttcgatacgggcctgagcaacctgaagaaatcccatctcta

SEQ ID NO: 156689 - DNA, 520 bp, Homo sapiens
  Payload ID: 10717
  Gene Symbol: MRLN
  Gene Name: myoregulin
  Uniprot ID: P0DMT0
  ENST ID: ENST00000594536
  CDS Start-End: 315-455
gcctcctgatccaccaagaccatatggtgtttttcataaaagagagagatcattcccttgactttggacttcgcttattgaacccctggacagctggagtgcagtggcaccatctcggcttaccgcaacctccgcctcctgggttcaaacaatactcctaccttggcctcctgagtagctgggattacaggaatcaaggttgctaagagaccacctgtgctgaatacactttgttctggcaagagcagaaaactgagaagccgtgttacctaccactacctgggattaattcagggagcgggataattctggatatgactggtaaaaactggatattaatttctactactactcccaaaagtctagaagatgaaattgtgggaagacttctaaaaattttgtttgttatctttgttgacttaatttctattatatatgttgtgataacttcttagaaagctgacttcctttccatgtacatttcaaactgaattacagtgaataaaaatttgtattttaa

SEQ ID NO: 156690 - DNA, 286 bp, Homo sapiens
  Payload ID: 10717
  Gene Symbol: MRLN
  Gene Name: myoregulin
  ENST ID: ENST00000602051
  CDS Start-End: 4-6
acaatgggtggccgggcagagacgctcctcacttcctagacaggatgacggccgggaagaggctggagtgcagtggcaccatctcggcttaccgcaacctccgcctcctgggttcaaacaatactcctaccttggcctcctgagtagctgggattacaggaatcaaggttgctaagagaccacctgtgctgaatacactttgttctggcaagagcagaaaactgagaagccgtgttacctaccactacctgggattaattcagggagcgggataattctggatatg

SEQ ID NO: 156691 - DNA, 422 bp, Homo sapiens
  Payload ID: 10717
  Gene Symbol: MRLN
  Gene Name: myoregulin
  Uniprot ID: P0DMT0
  ENST ID: ENST00000414264
  CDS Start-End: 217-357
gcctcctgatccaccaagaccatatggtgtttttcataaaagagagagatcattcccttgactttggacttcgcttattgaacccctggacagaatcaaggttgctaagagaccacctgtgctgaatacactttgttctggcaagagcagaaaactgagaagccgtgttacctaccactacctgggattaattcagggagcgggataattctggatatgactggtaaaaactggatattaatttctactactactcccaaaagtctagaagatgaaattgtgggaagacttctaaaaattttgtttgttatctttgttgacttaatttctattatatatgttgtgataacttcttagaaagctgacttcctttccatgtacatttcaaactgaattacagtgaataaaaatttgtattttaa

SEQ ID NO: 156692 - DNA, 4217 bp, Homo sapiens
  Payload ID: 10718
  Gene Symbol: MYBPC3
  Gene Name: myosin binding protein C, cardiac
  ENST ID: ENST00000256993
  CDS Start-End: 56-3880
agtccctctttgggtgacctgtgcctgcttcgtgcctggtgtgacgtctctcaggatgcctgagccggggaagaagccagtctcagcttttagcaagaagccacggtcagtggaagtggccgcaggcagccctgccgtgttcgaggccgagacagagcgggcaggagtgaaggtgcgctggcagcgcggaggcagtgacatcagcgccagcaacaagtacggcctggccacagagggcacacggcatacgctgacagtgcgggaagtgggccctgccgaccagggatcttacgcagtcattgctggctcctccaaggtcaagttcgacctcaaggtcatagaggcagagaaggcagagcccatgctggcccctgcccctgcccctgctgaggccactggagcccctggagaagccccggccccagccgctgagctgggagaaagtgccccaagtcccaaagggtcaagctcagcagctctcaatggtcctacccctggagcccccgatgaccccattggcctcttcgtgatgcggccacaggatggcgaggtgaccgtgggtggcagcatcaccttctcagcccgcgtggccggcgccagcctcctgaagccgcctgtggtcaagtggttcaagggcaaatgggtggacctgagcagcaaggtgggccagcacctgcagctgcacgacagctacgaccgcgccagcaaggtctatctgttcgagctgcacatcaccgatgcccagcctgccttcactggcagctaccgctgtgaggtgtccaccaaggacaaatttgactgctccaacttcaatctcactgtccacgaggccatgggcaccggagacctggacctcctatcagccttccgccgcacgagcctggctggaggtggtcggcggatcagtgatagccatgaggacactgggattctggacttcagctcactgctgaaaaagagcagcagtttccggaccccgagggactcgaagctggaggcaccagcagaggaggacgtgtgggagatcctacggcaggcacccccatctgagtacgagcgcatcgccttccagtacggcgtcactgacctgcgcggcatgctaaagaggctcaagggcatgaggcgcgatgagaagaagagcacagcctttcagaagaagctggagccggcctaccaggtgagcaaaggccacaagatccggctgaccgtggaactggctgaccatgacgctgaggtcaaatggctcaagaatggccaggagatccagatgagcggcagcaggtacatctttgagtccatcggtgccaagcgtaccctgaccatcagccagtgctcattggcggacgacgcagcctaccagtgcgtggtgggtggcgagaagtgtagcacggagctctttgtgaaagagccccctgtgctcatcacgcgccccttggaggaccagctggtgatggtggggcagcgggtggagtttgagtgtgaagtatcggaggagggggcgcaagtcaaatggctgaaggacggggtggagctgacccgggaggagaccttcaaataccggttcaagaaggacgggcagagacaccacctgatcatcaacgaggccatgctggaggacgcggggcactatgcactgtgcactagcgggggccaggcgctggctgagctcattgtgcaggaaaagaagctggaggtgtaccagagcatcgcagacctgatggtgggcgcaaaggaccaggcggtgttcaaatgtgaggtctcagatgagaatgttcggggtgtgtggctgaagaatgggaaggagctggtgcccgacagccgcataaaggtgtcccacatcgggcgggtccacaaactgaccattgacgacgtcacacctgccgacgaggctgactacagctttgtgcccgagggcttcgcctgcaacctgtcagccaagctccacttcatggaggtcaagattgacttcgtacccaggcaggaacctcccaagatccacctggactgcccaggccgcataccagacaccattgtggttgtagctggaaataagctacgtctggacgtccctatctctggggaccctgctcccactgtgatctggcagaaggctatcacgcaggggaataaggccccagccaggccagccccagatgccccagaggacacaggtgacagcgatgagtgggtgtttgacaagaagctgctgtgtgagaccgagggccgggtccgcgtggagaccaccaaggaccgcagcatcttcacggtcgagggggcagagaaggaagatgagggcgtctacacggtcacagtgaagaaccctgtgggcgaggaccaggtcaacctcacagtcaaggtcatcgacgtgccagacgcacctgcggcccccaagatcagcaacgtgggagaggactcctgcacagtacagtgggagccgcctgcctacgatggcgggcagcccatcctgggctacatcctggagcgcaagaagaagaagagctaccggtggatgcggctgaacttcgacctgattcaggagctgagtcatgaagcgcggcgcatgatcgagggcgtggtgtacgagatgcgcgtctacgcggtcaacgccatcggcatgtccaggcccagccctgcctcccagcccttcatgcctatcggtccccccagcgaacccacccacctggcagtagaggacgtctctgacaccacggtctccctcaagtggcggcccccagagcgcgtgggagcaggaggcctggatggctacagcgtggagtactgcccagagggctgctcagagtgggtggctgccctgcaggggctgacagagcacacatcgatactggtgaaggacctgcccacgggggcccggctgcttttccgagtgcgggcacacaatatggcagggcctggagcccctgttaccaccacggagccggtgacagtgcaggagatcctgcaacggccacggcttcagctgcccaggcacctgcgccagaccattcagaagaaggtcggggagcctgtgaaccttctcatccctttccagggcaagccccggcctcaggtgacctggaccaaagaggggcagcccctggcaggcgaggaggtgagcatccgcaacagccccacagacaccatcctgttcatccgggccgctcgccgcgtgcattcaggcacttaccaggtgacggtgcgcattgagaacatggaggacaaggccacgctggtgctgcaggttgttgacaagccaagtcctccccaggatctccgggtgactgacgcctggggtcttaatgtggctctggagtggaagccaccccaggatgtcggcaacacggagctctgggggtacacagtgcagaaagccgacaagaagaccatggagtggttcaccgtcttggagcattaccgccgcacccactgcgtggtgccagagctcatcattggcaatggctactacttccgcgtcttcagccagaatatggttggctttagtgacagagcggccaccaccaaggagcccgtctttatccccagaccaggcatcacctatgagccacccaactataaggccctggacttctccgaggccccaagcttcacccagcccctggtgaaccgctcggtcatcgcgggctacactgctatgctctgctgtgctgtccggggtagccccaagcccaagatttcctggttcaagaatggcctggacctgggagaagacgcccgcttccgcatgttcagcaagcagggagtgttgactctggagattagaaagccctgcccctttgacgggggcatctatgtctgcagggccaccaacttacagggcgaggcacggtgtgagtgccgcctggaggtgcgagtgcctcagtgaccaggctggctcctggggatggccaggtacaaccggatgccagccccgtgccaggagcctggagggaagttggggaaacccctccctactgttggatgtatgtgtgacaagtgtgtctcctgtgctgcgatgggggatcagcagggcagttgtcgggcagtcctgagtgggtgttgcacagactggtccacagggctcctgaaggaagcccctggatctttggggtaaaaggagggtggcctcaagaaacaatgtctggggacaggcctttctggcctgctatgtcttcccaatgtttattgggcaataaaagataagtgcagtcacagagaactca

SEQ ID NO: 156693 - DNA, 4217 bp, Homo sapiens
  Payload ID: 10718
  Gene Symbol: MYBPC3
  Gene Name: myosin binding protein C, cardiac
  ENST ID: ENST00000399249
  CDS Start-End: 56-3880
agtccctctttgggtgacctgtgcctgcttcgtgcctggtgtgacgtctctcaggatgcctgagccggggaagaagccagtctcagcttttagcaagaagccacggtcagtggaagtggccgcaggcagccctgccgtgttcgaggccgagacagagcgggcaggagtgaaggtgcgctggcagcgcggaggcagtgacatcagcgccagcaacaagtacggcctggccacagagggcacacggcatacgctgacagtgcgggaagtgggccctgccgaccagggatcttacgcagtcattgctggctcctccaaggtcaagttcgacctcaaggtcatagaggcagagaaggcagagcccatgctggcccctgcccctgcccctgctgaggccactggagcccctggagaagccccggccccagccgctgagctgggagaaagtgccccaagtcccaaagggtcaagctcagcagctctcaatggtcctacccctggagcccccgatgaccccattggcctcttcgtgatgcggccacaggatggcgaggtgaccgtgggtggcagcatcaccttctcagcccgcgtggccggcgccagcctcctgaagccgcctgtggtcaagtggttcaagggcaaatgggtggacctgagcagcaaggtgggccagcacctgcagctgcacgacagctacgaccgcgccagcaaggtctatctgttcgagctgcacatcaccgatgcccagcctgccttcactggcagctaccgctgtgaggtgtccaccaaggacaaatttgactgctccaacttcaatctcactgtccacgaggccatgggcaccggagacctggacctcctatcagccttccgccgcacgagcctggctggaggtggtcggcggatcagtgatagccatgaggacactgggattctggacttcagctcactgctgaaaaagagcagcagtttccggaccccgagggactcgaagctggaggcaccagcagaggaggacgtgtgggagatcctacggcaggcacccccatctgagtacgagcgcatcgccttccagtacggcgtcactgacctgcgcggcatgctaaagaggctcaagggcatgaggcgcgatgagaagaagagcacagcctttcagaagaagctggagccggcctaccaggtgagcaaaggccacaagatccggctgaccgtggaactggctgaccatgacgctgaggtcaaatggctcaagaatggccaggagatccagatgagcggcagcaagtacatctttgagtccatcggtgccaagcgtaccctgaccatcagccagtgctcattggcggacgacgcagcctaccagtgcgtggtgggtggcgagaagtgtagcacggagctctttgtgaaagagccccctgtgctcatcacgcgccccttggaggaccagctggtgatggtggggcagcgggtggagtttgagtgtgaagtatcggaggagggggcgcaagtcaaatggctgaaggacggggtggagctgacccgggaggagaccttcaaataccggttcaagaaggacgggcagagacaccacctgatcatcaacgaggccatgctggaggacgcggggcactatgcactgtgcactagcgggggccaggcgctggctgagctcattgtgcaggaaaagaagctggaggtgtaccagagcatcgcagacctgatggtgggcgcaaaggaccaggcggtgttcaaatgtgaggtctcagatgagaatgttcggggtgtgtggctgaagaatgggaaggagctggtgcccgacagccgcataaaggtgtcccacatcgggcgggtccacaaactgaccattgacgacgtcacacctgccgacgaggctgactacagctttgtgcccgagggcttcgcctgcaacctgtcagccaagctccacttcatggaggtcaagattgacttcgtacccaggcaggaacctcccaagatccacctggactgcccaggccgcataccagacaccattgtggttgtagctggaaataagctacgtctggacgtccctatctctggggaccctgctcccactgtgatctggcagaaggctatcacgcaggggaataaggccccagccaggccagccccagatgccccagaggacacaggtgacagcgatgagtgggtgtttgacaagaagctgctgtgtgagaccgagggccgggtccgcgtggagaccaccaaggaccgcagcatcttcacggtcgagggggcagagaaggaagatgagggcgtctacacggtcacagtgaagaaccctgtgggcgaggaccaggtcaacctcacagtcaaggtcatcgacgtgccagacgcacctgcggcccccaagatcagcaacgtgggagaggactcctgcacagtacagtgggagccgcctgcctacgatggcgggcagcccatcctgggctacatcctggagcgcaagaagaagaagagctaccggtggatgcggctgaacttcgacctgattcaggagctgagtcatgaagcgcggcgcatgatcgagggcgtggtgtacgagatgcgcgtctacgcggtcaacgccatcggcatgtccaggcccagccctgcctcccagcccttcatgcctatcggtccccccagcgaacccacccacctggcagtagaggacgtctctgacaccacggtctccctcaagtggcggcccccagagcgcgtgggagcaggaggcctggatggctacagcgtggagtactgcccagagggctgctcagagtgggtggctgccctgcaggggctgacagagcacacatcgatactggtgaaggacctgcccacgggggcccggctgcttttccgagtgcgggcacacaatatggcagggcctggagcccctgttaccaccacggagccggtgacagtgcaggagatcctgcaacggccacggcttcagctgcccaggcacctgcgccagaccattcagaagaaggtcggggagcctgtgaaccttctcatccctttccagggcaagccccggcctcaggtgacctggaccaaagaggggcagcccctggcaggcgaggaggtgagcatccgcaacagccccacagacaccatcctgttcatccgggccgctcgccgcgtgcattcaggcacttaccaggtgacggtgcgcattgagaacatggaggacaaggccacgctggtgctgcaggttgttgacaagccaagtcctccccaggatctccgggtgactgacgcctggggtcttaatgtggctctggagtggaagccaccccaggatgtcggcaacacggagctctgggggtacacagtgcagaaagccgacaagaagaccatggagtggttcaccgtcttggagcattaccgccgcacccactgcgtggtgccagagctcatcattggcaatggctactacttccgcgtcttcagccagaatatggttggctttagtgacagagcggccaccaccaaggagcccgtctttatccccagaccaggcatcacctatgagccacccaactataaggccctggacttctccgaggccccaagcttcacccagcccctggtgaaccgctcggtcatcgcgggctacactgctatgctctgctgtgctgtccggggtagccccaagcccaagatttcctggttcaagaatggcctggacctgggagaagacgcccgcttccgcatgttcagcaagcagggagtgttgactctggagattagaaagccctgcccctttgacgggggcatctatgtctgcagggccaccaacttacagggcgaggcacggtgtgagtgccgcctggaggtgcgagtgcctcagtgaccaggctggctcctggggatggccaggtacaaccggatgccagccccgtgccaggagcctggagggaagttggggaaacccctccctactgttggatgtatgtgtgacaagtgtgtctcctgtgctgcgatgggggatcagcagggcagttgtcgggcagtcctgagtgggtgttgcacagactggtccacagggctcctgaaggaagcccctggatctttggggtaaaaggagggtggcctcaagaaacaatgtctggggacaggcctttctggcctgctatgtcttcccaatgtttattgggcaataaaagataagtgcagtcacagagaactca

SEQ ID NO: 156694 - DNA, 4226 bp, Homo sapiens
  Payload ID: 10718
  Gene Symbol: MYBPC3
  Gene Name: myosin binding protein C, cardiac
  Uniprot ID: Q14896
  ENST ID: ENST00000545968
  CDS Start-End: 56-3880
agtccctctttgggtgacctgtgcctgcttcgtgcctggtgtgacgtctctcaggatgcctgagccggggaagaagccagtctcagcttttagcaagaagccacggtcagtggaagtggccgcaggcagccctgccgtgttcgaggccgagacagagcgggcaggagtgaaggtgcgctggcagcgcggaggcagtgacatcagcgccagcaacaagtacggcctggccacagagggcacacggcatacgctgacagtgcgggaagtgggccctgccgaccagggatcttacgcagtcattgctggctcctccaaggtcaagttcgacctcaaggtcatagaggcagagaaggcagagcccatgctggcccctgcccctgcccctgctgaggccactggagcccctggagaagccccggccccagccgctgagctgggagaaagtgccccaagtcccaaagggtcaagctcagcagctctcaatggtcctacccctggagcccccgatgaccccattggcctcttcgtgatgcggccacaggatggcgaggtgaccgtgggtggcagcatcaccttctcagcccgcgtggccggcgccagcctcctgaagccgcctgtggtcaagtggttcaagggcaaatgggtggacctgagcagcaaggtgggccagcacctgcagctgcacgacagctacgaccgcgccagcaaggtctatctgttcgagctgcacatcaccgatgcccagcctgccttcactggcagctaccgctgtgaggtgtccaccaaggacaaatttgactgctccaacttcaatctcactgtccacgaggccatgggcaccggagacctggacctcctatcagccttccgccgcacgagcctggctggaggtggtcggcggatcagtgatagccatgaggacactgggattctggacttcagctcactgctgaaaaagagagacagtttccggaccccgagggactcgaagctggaggcaccagcagaggaggacgtgtgggagatcctacggcaggcacccccatctgagtacgagcgcatcgccttccagtacggcgtcactgacctgcgcggcatgctaaagaggctcaagggcatgaggcgcgatgagaagaagagcacagcctttcagaagaagctggagccggcctaccaggtgagcaaaggccacaagatccggctgaccgtggaactggctgaccatgacgctgaggtcaaatggctcaagaatggccaggagatccagatgagcggcagcaagtacatctttgagtccatcggtgccaagcgtaccctgaccatcagccagtgctcattggcggacgacgcagcctaccagtgcgtggtgggtggcgagaagtgtagcacggagctctttgtgaaagagccccctgtgctcatcacgcgccccttggaggaccagctggtgatggtggggcagcgggtggagtttgagtgtgaagtatcggaggagggggcgcaagtcaaatggctgaaggacggggtggagctgacccgggaggagaccttcaaataccggttcaagaaggacgggcagagacaccacctgatcatcaacgaggccatgctggaggacgcggggcactatgcactgtgcactagcgggggccaggcgctggctgagctcattgtgcaggaaaagaagctggaggtgtaccagagcatcgcagacctgatggtgggcgcaaaggaccaggcggtgttcaaatgtgaggtctcagatgagaatgttcggggtgtgtggctgaagaatgggaaggagctggtgcccgacagccgcataaaggtgtcccacatcgggcgggtccacaaactgaccattgacgacgtcacacctgccgacgaggctgactacagctttgtgcccgagggcttcgcctgcaacctgtcagccaagctccacttcatggaggtcaagattgacttcgtacccaggcaggaacctcccaagatccacctggactgcccaggccgcataccagacaccattgtggttgtagctggaaataagctacgtctggacgtccctatctctggggaccctgctcccactgtgatctggcagaaggctatcacgcaggggaataaggccccagccaggccagccccagatgccccagaggacacaggtgacagcgatgagtgggtgtttgacaagaagctgctgtgtgagaccgagggccgggtccgcgtggagaccaccaaggaccgcagcatcttcacggtcgagggggcagagaaggaagatgagggcgtctacacggtcacagtgaagaaccctgtgggcgaggaccaggtcaacctcacagtcaaggtcatcgacgtgccagacgcacctgcggcccccaagatcagcaacgtgggagaggactcctgcacagtacagtgggagccgcctgcctacgatggcgggcagcccatcctgggctacatcctggagcgcaagaagaagaagagctaccggtggatgcggctgaacttcgacctgattcaggagctgagtcatgaagcgcggcgcatgatcgagggcgtggtgtacgagatgcgcgtctacgcggtcaacgccatcggcatgtccaggcccagccctgcctcccagcccttcatgcctatcggtccccccagcgaacccacccacctggcagtagaggacgtctctgacaccacggtctccctcaagtggcggcccccagagcgcgtgggagcaggaggcctggatggctacagcgtggagtactgcccagagggctgctcagagtgggtggctgccctgcaggggctgacagagcacacatcgatactggtgaaggacctgcccacgggggcccggctgcttttccgagtgcgggcacacaatatggcagggcctggagcccctgttaccaccacggagccggtgacagtgcaggagatcctgcaacggccacggcttcagctgcccaggcacctgcgccagaccattcagaagaaggtcggggagcctgtgaaccttctcatccctttccagggcaagccccggcctcaggtgacctggaccaaagaggggcagcccctggcaggcgaggaggtgagcatccgcaacagccccacagacaccatcctgttcatccgggccgctcgccgcgtgcattcaggcacttaccaggtgacggtgcgcattgagaacatggaggacaaggccacgctggtgctgcaggttgttgacaagccaagtcctccccaggatctccgggtgactgacgcctggggtcttaatgtggctctggagtggaagccaccccaggatgtcggcaacacggagctctgggggtacacagtgcagaaagccgacaagaagaccatggagtggttcaccgtcttggagcattaccgccgcacccactgcgtggtgccagagctcatcattggcaatggctactacttccgcgtcttcagccagaatatggttggctttagtgacagagcggccaccaccaaggagcccgtctttatccccagaccaggcatcacctatgagccacccaactataaggccctggacttctccgaggccccaagcttcacccagcccctggtgaaccgctcggtcatcgcgggctacactgctatgctctgctgtgctgtccggggtagccccaagcccaagatttcctggttcaagaatggcctggacctgggagaagacgcccgcttccgcatgttcagcaagcagggagtgttgactctggagattagaaagccctgcccctttgacgggggcatctatgtctgcagggccaccaacttacagggcgaggcacggtgtgagtgccgcctggaggtgcgagtgcctcagtgaccaggctggctcctggggatggccaggtacaaccggatgccagccccgtgccaggagcctggagggaagttggggaaacccctccctactgttggatgtatgtgtgacaagtgtgtctcctgtgctgcgatgggggatcagcagggcagttgtcgggcagtcctgagtgggtgttgcacagactggtccacagggctcctgaaggaagcccctggatctttggggtaaaaggagggtggcctcaagaaacaatgtctggggacaggcctttctggcctgctatgtcttcccaatgtttattgggcaataaaagataagtgcagtcacagagaactcactcttctca

SEQ ID NO: 156695 - DNA, 2772 bp, Homo sapiens
  Payload ID: 10718
  Gene Symbol: MYBPC3
  Gene Name: myosin binding protein C, cardiac
  ENST ID: ENST00000544791
  CDS Start-End: 56-2482
agtccctctttgggtgacctgtgcctgcttcgtgcctggtgtgacgtctctcaggatgcctgagccggggaagaagccagtctcagcttttagcaagaagccacggtcagtggaagtggccgcaggcagccctgccgtgttcgaggccgagacagagcgggcaggagtgaaggtgcgctggcagcgcggaggcagtgacatcagcgccagcaacaagtacggcctggccacagagggcacacggcatacgctgacagtgcgggaagtgggccctgccgaccagggatcttacgcagtcattgctggctcctccaaggtcaagttcgacctcaaggtcatagaggcagagaaggcagagcccatgctggcccctgcccctgcccctgctgaggccactggagcccctggagaagccccggccccagccgctgagctgggagaaagtgccccaagtcccaaagggtcaagctcagcagctctcaatggtcctacccctggagcccccgatgaccccattggcctcttcgtgatgcggccacaggatggcgaggtgaccgtgggtggcagcatcaccttctcagcccgcgtggccggcgccagcctcctgaagccgcctgtggtcaagtggttcaagggcaaatgggtggacctgagcagcaaggtgggccagcacctgcagctgcacgacagctacgaccgcgccagcaaggtctatctgttcgagctgcacatcaccgatgcccagcctgccttcactggcagctaccgctgtgaggtgtccaccaaggacaaatttgactgctccaacttcaatctcactgtccacgaggccatgggcaccggagacctggacctcctatcagccttccgccgcacgagcctggctggaggtggtcggcggatcagtgatagccatgaggacactgggattctggacttcagctcactgctgaaaaagagagacagtttccggaccccgagggactcgaagctggaggcaccagcagaggaggacgtgtgggagatcctacggcaggcacccccatctgagtacgagcgcatcgccttccagtacggcgtcactgacctgcgcggcatgctaaagaggctcaagggcatgaggcgcgatgagaagaagagcacagcctttcagaagaagctggagccggcctaccaggtgagcaaaggccacaagatccggctgaccgtggaactggctgaccatgacgctgaggtcaaatggctcaagaatggccaggagatccagatgagcggcagcaagtacatctttgagtccatcggtgccaagcgtaccctgaccatcagccagtgctcattggcggacgacgcagcctaccagtgcgtggtgggtggcgagaagtgtagcacggagctctttgtgaaagagccccctgtgctcatcacgcgccccttggaggaccagctggtgatggtggggcagcgggtggagtttgagtgtgaagtatcggaggagggggcgcaagtcaaatggctgaaggacggggtggagctgacccgggaggagaccttcaaataccggttcaagaaggacgggcagagacaccacctgatcatcaacgaggccatgctggaggacgcggggcactatgcactgtgcactagcgggggccaggcgctggctgagctcattgtgcaggaaaagaagctggaggtgtaccagagcatcgcagacctgatggtgggcgcaaaggaccaggcggtgttcaaatgtgaggtctcagatgagaatgttcggggtgtgtggctgaagaatgggaaggagctggtgcccgacagccgcataaaggtgtcccacatcgggcgggtccacaaactgaccattgacgacgtcacacctgccgacgaggctgactacagctttgtgcccgagggcttcgcctgcaacctgtcagccaagctccacttcatggaggtcaagattgacttcgtacccaggcaggaacctcccaagatccacctggactgcccaggccgcataccagacaccattgtggttgtagctggaaataagctacgtctggacgtccctatctctggggaccctgctcccactgtgatctggcagaaggctatcacgcaggggaataaggccccagccaggccagccccagatgccccagaggacacaggtgacagcgatgagtgggtgtttgacaagaagctgctgtgtgagaccgagggccgggtccgcgtggagaccaccaaggaccgcagcatcttcacggtcgagggggcagagaaggaagatgagggcgtctacacggtcacagtgaagaaccctgtgggcgaggaccaggtcaacctcacagtcaaggtcatcgacgtgccagacgcacctgcggcccccaagatcagcaacgtgggagaggactcctgcacagtacagtgggagccgcctgcctacgatggcgggcagcccatcctgggagctgagtcatgaagcgcggcgcatgatcgagggcgtggtgtacgagatgcgcgtctacgcggtcaacgccatcggcatgtccaggcccagccctgcctcccagcccttcatgcctatcggtccccccagcgaacccacccacctggcagtagaggacgtctctgacaccacggtctccctcaagtggcggcccccagagcgcgtgggagcaggaggcctggatggctacagcgtggagtactgcccagagggctgccaggcgcgatggcttacgcctgtaatcccagcactttgggaggcca

SEQ ID NO: 156696 - DNA, 3593 bp, Homo sapiens
  Payload ID: 10719
  Gene Symbol: MYBPC2
  Gene Name: myosin binding protein C, fast type
  Uniprot ID: Q14324
  ENST ID: ENST00000357701
  CDS Start-End: 52-3477
ggcctagcgggacgcggctgcggtcagaggagcaggaggaggtcccccgacatgcctgaggcaaaaccagcggccaaaaaggcccccaaaggcaaagatgcccccaaaggagcccccaaggaggctccccctaaggaggctcctgcagaggcccccaaagaagccccacccgaggaccagtccccgactgcagaggagcccaccggcgttttcctgaagaagccggactccgtctcagtggagactgggaaggacgcagtggtcgtggccaaggtgaacgggaaggagctcccagacaaaccgaccatcaagtggttcaaggggaagtggctggagctgggcagcaagagtggcgcccgcttctccttcaaggagtcccacaactccgccagcaatgtgtacaccgtggagctgcacattgggaaggtggtactgggggaccgtgggtattaccgcctcgaggtcaaagccaaggacacctgtgacagctgtggcttcaacatcgatgtggaggcaccccgtcaggatgcctctgggcagagtctagaaagcttcaagcgtacgagtgaaaagaagtcggatactgcaggtgagctggatttcagtggcctgttgaagaagagggaggtggtggaggaggagaagaagaagaaaaagaaagatgacgatgacctaggcatccccccggagatttgggagctcctgaaaggggcaaagaagagcgagtacgagaaaatcgccttccagtatggcatcaccgacctccggggcatgctgaagcggctgaaaaaggctaaggtcgaggtcaagaagagtgcagcattcacaaagaagctggatccagcctaccaagtggacagaggcaacaagatcaagttgatggtagagatcagcgacccagacctgaccctcaagtggttcaagaacggccaggagatcaaaccaagcagcaagtacgtgtttgagaacgttggtaagaagcgaattcttaccatcaacaagtgcacgctggcggatgacgctgcctatgaagtagctgtcaaggatgagaagtgtttcaccgagctcttcgtcaaagaacctccagtcctaattgtcacacctcttgaggaccagcaggtgtttgtgggtgaccgggtggaaatggcagtggaggtgtcagaagagggtgcccaggtgatgtggatgaaagatggtgtggaactgactcgggaggattccttcaaggcccggtaccgcttcaagaaggacgggaagcgccacatcctcatcttctcagacgtggtccaggaggacaggggtcgctatcaggtcataaccaatggcggccagtgtgaggccgagctgattgtggaagagaaacagctggaggtcctgcaggacatcgcggatctgacggtgaaggcctcagaacaagctgtgttcaagtgcgaggtgtctgatgagaaagtgacgggcaagtggtataagaatggggtcgaggtgcggcccagcaagaggatcaccatttcccatgtaggcaggttccacaagctggtgatcgatgacgtccgccccgaggatgagggagactacacgtttgtgcctgacggctacgccctgtcgctctcggccaagctcaacttcctggaaatcaaggtggagtacgttcccaagcaagagccaccaaagatccacttggattgctcggggaagacctcagagaatgcgattgtggttgtggctggaaacaagctgaggcttgacgtgtccatcacaggggagccccctcccgtcgctacctggctgaagggagatgaggtattcacgaccaccgagggcaggacccgcatcgagaagcgggtggactgcagcagctttgtgattgagagtgcgcagcgggaagacgagggccgctacaccatcaaggtcaccaaccccgtcggcgaggacgtggcttccatcttcctgcaagttgtagatgtcccagaccccccggaggctgtgcgcatcacctcggttggagaggattgggccatccttgtctgggagccaccaatgtacgatggggggaagccagtcaccgggtacctcgtagagcggaagaagaagggctctcagcgctggatgaagctgaactttgaggtcttcacagagaccacctatgagtccaccaagatgatcgagggcatcctctatgagatgcgtgtcttcgccgtcaatgctataggggtctcccagcccagcatgaacaccaagccttttatgcctattgcacccacgagtgaacccctgcacctgatagtggaggatgtgacagacaccaccaccacactcaagtggaggcctccgaacaggatcggggcaggtggcatcgatgggtacctggtggagtactgcctggaaggctccgaggaatgggtccctgccaacaccgagcccgtggagcgctgtggcttcaccgtcaagaatctcccgaccggagccagaatcctcttccgagtagttggggtcaacatcgcggggcgcagcgagccggccaccctggcccagccggtcaccatcagggagattgcggagccacccaagatccggcttccccgccatctccgccagacctacatccgcaaagtgggcgagcagctcaaccttgtcgtccccttccagggaaagccccggccccaggtggtgtggaccaagggcggggccccgctggacacctcccgcgtgcacgtgcggaccagcgacttcgacaccgtgttcttcgtgcgccaggcggcccgctccgactccggggagtacgagctgagcgtgcagatcgagaacatgaaggacaccgccaccatccgcatccgcgttgtggaaaaggctgggccccccataaacgtgatggtgaaggaggtgtggggcacgaacgcgctggtggagtggcaggcccccaaagatgatgggaacagtgagatcatggggtatttcgtccagaaagcagacaaaaaaaccatggagtggttcaacgtctatgaacgtaacaggcacactagctgtactgtgtccgaccttatcgtgggcaatgaatactatttccgagtttacaccgagaacatctgtgggctcagtgactcacctggtgtctccaagaacacggcccgcatcctcaagacaggaatcaccttcaaaccgttcgagtataaggagcatgacttccggatggctcccaagttcctgacacctctcatagaccgcgtggtcgtggctgggtactcggcagccctcaactgtgctgtcagaggccacccgaagccgaaggtggtctggatgaagaacaagatggaaatccgtgaagatcccaagttcctgataaccaattaccaaggagtcctgacgctgaacatccgtcgcccctcgcccttcgacgctgggacttacacctgccgggccgtcaacgagctgggcgaggcgctggctgagtgcaagctggaggtccgagtgccgcagtgagacctgtcccctacctgccaagacaattggtggtggagtcctgaccccaatccccaacctcccaggactgtgttctttctggagttttcgctgagaacaaaacagtgttgtctgga

SEQ ID NO: 156697 - DNA, 3871 bp, Homo sapiens
  Payload ID: 10720
  Gene Symbol: MYBPC1
  Gene Name: myosin binding protein C, slow type
  Uniprot ID: Q00872
  ENST ID: ENST00000361685
  CDS Start-End: 101-3547
gtcacaccgacctgcaccatctctcgcctgcctgtggggtttctgtcaactagtcgtggagggaaggagactctttaaagaataacatcttattgtggccatgccagaacccactaagaaagaggaaaatgaagtgccagccccagccccacccccggaagaaccaagtaaagagaaggaggccggaactacaccagcaaaagatgaagaggaagtctccccgcctagcgccttgcctccaggtttgggtagtcgggccctggagagaaaagattcagactggacccttgtcgaaactcctcctggggaggaacaagccaagcagaatgccaactcccagctgtccatcttgttcattgaaaaacctcaaggaggaacagtgaaagttggtgaagatatcaccttcatagccaaagtcaaggctgaagatcttctgagaaaacccactatcaaatggttcaaaggaaaatggatggacctggccagcaaagccgggaagcaccttcagctgaaggaaacctttgagaggcacagtcgggtgtacacatttgagatgcagatcatcaaggccaaagataactttgcaggaaattacagatgcgaggtcacctataaggataagtttgacagctgttcatttgatcttgaagtgcacgaatctactgggactactccaaacattgacatcagatctgctttcaagagaagtggagaaggtcaagaggatgcaggagaacttgactttagtggtctcctgaaacgtagggaggtgaagcagcaggaggaagaaccccaggtggacgtatgggagttgctgaagaacgcgaaacccagtgagtacgagaagatcgccttccagtatggaatcaccgacctgcgcggcatgctcaagcgactcaagcgcatgcgcagagaggagaagaagagcgcagcttttgcaaaaattcttgatcctgcatatcaggttgacaaaggaggcagagtgaggtttgttgtggagctggcagatccaaagttggaggtgaaatggtataaaaatggtcaagaaattcgacccagtaccaaatacatctttgaacacaaaggatgccagagaatcctgtttatcaataactgtcagatgacagatgattcagagtattatgtgacagccggtgatgagaaatgttccactgagctcttcgtaagagagcctccaattatggtgaccaaacagctggaagatacaactgcttattgtggggagagagtggaattagaatgtgaggtgtctgaagatgatgccaatgtaaaatggtttaagaatggtgaagagattatccctggtccaaaatcaagataccgaattagagttgagggtaaaaaacacatcttgatcatagagggagcaacaaaggctgatgctgcagaatattcagtaatgacaacaggaggacaatcatctgctaaacttagtgttgacttgaaacctctgaagattttgacacctctgactgatcagactgtaaatcttggaaaagaaatctgcctgaagtgtgaaatctctgaaaacataccaggaaaatggactaaaaatggcctacctgttcaggagagtgaccgtctaaaggtggttcacaagggaaggatccacaagttagtgatagccaatgccctcactgaagatgaaggtgattatgtatttgcacctgatgcctacaatgttactctgcctgccaaagttcatgttattgatcctcctaagatcatcctggatggtcttgatgctgacaacacagtgacagtgattgcaggaaacaagcttcgtcttgagatccccatcagcggagaaccacctcctaaagccatgtggagccggggagataaggctattatggaaggcagtggccggataagaacagaatcttaccctgatagcagcactctggtcattgatatagctgaaagagatgactctggtgtttaccacatcaatctgaaaaacgaagctggagaggcacatgcaagcatcaaggttaaagttgtggacttccctgatcctccagtggcaccgactgtgacagaggtgggagatgactggtgtatcatgaactgggagcctcctgcctacgacggaggctctccaatcctaggatattttattgagaggaagaagaaacaaagctccaggtggatgaggctgaattttgatctctgcaaagaaacaacttttgagcccaagaagatgattgaaggtgtggcctatgaggtccgcatctttgcagtcaatgccattggcatctccaagcccagtatgccctccaggccttttgttcctttggctgtaacaagccctcctactcttctgactgtggactctgtcactgacacgactgtcacgatgaggtggcgccccccagaccacattggtgcagcaggtttagatggctatgtgctagagtattgctttgaaggaactgaggactggatagttgcaaacaaagatctgattgacaagacgaagttcaccatcacaggtctgccaacagatgcaaagatctttgtgcgtgtgaaggctgttaatgcagctggtgccagcgagcccaagtactattctcagcccattctcgtgaaggaaatcatagaacctccaaagattcgcattccaagacacctgaagcaaacctatatccgcagagttggagaagctgtcaatctggttatacctttccagggaaaaccaagaccagaattaacttggaagaaggatggtgcagaaattgataagaatcaaataaacattcgcaactctgagactgatacaatcatatttattagaaaagcagagaggagccactctgggaaatatgatctgcaagtcaaagtggacaaattcgtggagaccgcatcaattgacatccagatcattgaccgtccaggtccaccccaaattgtgaagattgaggatgtctggggagaaaatgtcgctctcacatggactccaccaaaggatgatggaaatgctgctatcacaggctataccattcagaaggctgacaagaagagcatggaatggtttactgtcattgagcattatcatcgaaccagtgccaccattactgaattggtcatagggaatgaatattacttccgggtcttttctgaaaacatgtgtggcctcagtgaggatgccaccatgactaaagagagtgcagtgatcgccagggatggtaaaatctacaaaaatccagtgtatgaagactttgatttctcagaggcacccatgtttactcagcctttggttaacacctatgccatagctggttacaatgccaccctaaactgcagtgtgagaggaaatcctaagcctaaaataacctggatgaaaaacaaagttgctattgtggatgatccaagatacaggatgttcagcaaccagggagtctgtaccctggaaattcgcaagcccagcccctatgatggaggcacttactgctgcaaagcagtcaatgaccttgggacagtggagattgaatgcaaactggaggtgaaagtcattgcacaataaggatttttgaatgtataatatcatctaaggtgggctctccttctgcagactcctcttgcaaggcgtacctccaaacataattgattcgtatctgcgagacttacactcaagcaatcctgaggaatactgagggagggcctggctactgtctctctgcactctgctgctttgaaatctggttgaaatgagaaaaagcattttctgttttcccaccaggcccccaagtgtggtctttttctttcctcctaatgttgaagagaaaaaaaaaaaaaaaagtttgcccagattgcttaattaaaaattgcaaacaaaatctcatttgaa

SEQ ID NO: 156698 - DNA, 3899 bp, Homo sapiens
  Payload ID: 10720
  Gene Symbol: MYBPC1
  Gene Name: myosin binding protein C, slow type
  Uniprot ID: Q00872
  ENST ID: ENST00000361466
  CDS Start-End: 76-3591
gcctgcctgtggggtttctgtcaactagtcgtggagggaaggagactctttaaagaataacatcttattgtggccatgccagaacccactaagaaagaggaaaatgaagtgccagccccagccccacccccggaagaaccaagtaaagagaaggaggccggaactacaccagcaaaagatgaagaggaagtctccccgcctagcgccttgcctccaggtttgggtagtcgggccctggagagaaaagattcagactggacccttgtcgaaactcctcctggggaggaacaagccaagcagaatgccaactcccagctgtccatcttgttcattgaaaaacctcaaggaggaacagtgaaagttggtgaagatatcaccttcatagccaaagtcaaggctgaagatcttctgagaaaacccactatcaaatggttcaaaggaaaatggatggacctggccagcaaagccgggaagcaccttcagctgaaggaaacctttgagaggcacagtcgggtgtacacatttgagatgcagatcatcaaggccaaagataactttgcaggaaattacagatgcgaggtcacctataaggataagtttgacagctgttcatttgatcttgaagtgcacgaatctactgggactactccaaacattgacatcagatctgctttcaagagaagtggagaaggtcaagaggatgcaggagaacttgactttagtggtctcctgaaacgtagggaggtgaagcagcaggaggaagaaccccaggtggacgtatgggagttgctgaagaacgcgaaacccagtgagtacgagaagatcgccttccagtatggaatcaccgacctgcgcggcatgctcaagcgactcaagcgcatgcgcagagaggagaagaagagcgcagcttttgcaaaaattcttgatcctgcatatcaggttgacaaaggaggcagagtgaggtttgttgtggagctggcagatccaaagttggaggtgaaatggtataaaaatggtcaagaaattcgacccagtaccaaatacatctttgaacacaaaggatgccagagaatcctgtttatcaataactgtcagatgacagatgattcagagtattatgtgacagccggtgatgagaaatgttccactgagctcttcgtaagagagcctccaattatggtgaccaaacagctggaagatacaactgcttattgtggggagagagtggaattagaatgtgaggtgtctgaagatgatgccaatgtaaaatggtttaagaatggtgaagagattatccctggtccaaaatcaagataccgaattagagttgagggtaaaaaacacatcttgatcatagagggagcaacaaaggctgatgctgcagaatattcagtaatgacaacaggaggacaatcatctgctaaacttagtgttgacttgaaacctctgaagattttgacacctctgactgatcagactgtaaatcttggaaaagaaatctgcctgaagtgtgaaatctctgaaaacataccaggaaaatggactaaaaatggcctacctgttcaggagagtgaccgtctaaaggtggttcacaagggaaggatccacaagttagtgatagccaatgccctcactgaagatgaaggtgattatgtatttgcacctgatgcctacaatgttactctgcctgccaaagttcatgttattgatcctcctaagatcatcctggatggtcttgatgctgacaacacagtgacagtgattgcaggaaacaagcttcgtcttgagatccccatcagcggagaaccacctcctaaagccatgtggagccggggagataaggctattatggaaggcagtggccggataagaacagaatcttaccctgatagcagcactctggtcattgatatagctgaaagagatgactctggtgtttaccacatcaatctgaaaaacgaagctggagaggcacatgcaagcatcaaggttaaagttgtggacttccctgatcctccagtggcaccgactgtgacagaggtgggagatgactggtgtatcatgaactgggagcctcctgcctacgacggaggctctccaatcctaggatattttattgagaggaagaagaaacaaagctccaggtggatgaggctgaattttgatctctgcaaagaaacaacttttgagcccaagaagatgattgaaggtgtggcctatgaggtccgcatctttgcagtcaatgccattggcatctccaagcccagtatgccctccaggccttttgttcctttggctgtaacaagccctcctactcttctgactgtggactctgtcactgacacgactgtcacgatgaggtggcgccccccagaccacattggtgcagcaggtttagatggctatgtgctagagtattgctttgaaggaactgaggactggatagttgcaaacaaagatctgattgacaagacgaagttcaccatcacaggtctgccaacagatgcaaagatctttgtgcgtgtgaaggctgttaatgcagctggtgccagcgagcccaagtactattctcagcccattctcgtgaaggaaatcatagaacctccaaagattcgcattccaagacacctgaagcaaacctatatccgcagagttggagaagctgtcaatctggttatacctttccagggaaaaccaagaccagaattaacttggaagaaggatggtgcagaaattgataagaatcaaataaacattcgcaactctgagactgatacaatcatatttattagaaaagcagagaggagccactctgggaaatatgatctgcaagtcaaagtggacaaattcgtggagaccgcatcaattgacatccagatcattgaccgtccaggtccaccccaaattgtgaagattgaggatgtctggggagaaaatgtcgctctcacatggactccaccaaaggatgatggaaatgctgctatcacaggctataccattcagaaggctgacaagaagagcatggaatggtttactgtcattgagcattatcatcgaaccagtgccaccattactgaattggtcatagggaatgaatattacttccgggtcttttctgaaaacatgtgtggcctcagtgaggatgccaccatgactaaagagagtgcagtgatcgccagggatggtaaaatctacaaaaatccagtgtatgaagactttgatttctcagaggcacccatgtttactcagcctttggttaacacctatgccatagctggttacaatgccaccctaaactgcagtgtgagaggaaatcctaagcctaaaataacctggatgaaaaacaaagttgctattgtggatgatccaagatacaggatgttcagcaaccagggagtctgtaccctggaaattcgcaagcccagcccctatgatggaggcacttactgctgcaaagcagtcaatgaccttgggacagtggagattgaatgcaaactggaggtgaaagtgatatatcaaggagtaaatacccctggacaaccagtcttcctggaggggcagcaacagtcattgcacaataaggatttttgaatgtataatatcatctaaggtgggctctccttctgcagactcctcttgcaaggcgtacctccaaacataattgattcgtatctgcgagacttacactcaagcaatcctgaggaatactgagggagggcctggctactgtctctctgcactctgctgctttgaaatctggttgaaatgagaaaaagcattttctgttttcccaccaggcccccaagtgtggtctttttctttcctcctaatgttgaagagaaaaaaaaaaaaaaaagtttgcccagattgcttaattaaaaattgcaaacaaaatctca

SEQ ID NO: 156699 - DNA, 3644 bp, Homo sapiens
  Payload ID: 10720
  Gene Symbol: MYBPC1
  Gene Name: myosin binding protein C, slow type
  Uniprot ID: Q00872
  ENST ID: ENST00000392934
  CDS Start-End: 101-3520
gtcacaccgacctgcaccatctctcgcctgcctgtggggtttctgtcaactagtcgtggagggaaggagactctttaaagaataacatcttattgtggccatgccagaacccactaagaaagaggatgaagaggaagtctccccgcctagcgccttgcctccagactggacccttgtcgaaactcctcctggggaggaacaagccaagcagaatgccaactcccagctgtccatcttgttcattgaaaaacctcaaggaggaacagtgaaagttggtgaagatatcaccttcatagccaaagtcaaggctgaagatcttctgagaaaacccactatcaaatggttcaaaggaaaatggatggacctggccagcaaagccgggaagcaccttcagctgaaggaaacctttgagaggcacagtcgggtgtacacatttgagatgcagatcatcaaggccaaagataactttgcaggaaattacagatgcgaggtcacctataaggataagtttgacagctgttcatttgatcttgaagtgcacgaatctactgggactactccaaacattgacatcagatctgctttcaagagaagtggagaaggtcaagaggatgcaggagaacttgactttagtggtctcctgaaacgtagggaggtgaagcagcaggaggaagaaccccaggtggacgtatgggagttgctgaagaacgcgaaacccagtgagtacgagaagatcgccttccagtatggaatcaccgacctgcgcggcatgctcaagcgactcaagcgcatgcgcagagaggagaagaagagcgcagcttttgcaaaaattcttgatcctgcatatcaggttgacaaaggaggcagagtgaggtttgttgtggagctggcagatccaaagttggaggtgaaatggtataaaaatggtcaagaaattcgacccagtaccaaatacatctttgaacacaaaggatgccagagaatcctgtttatcaataactgtcagatgacagatgattcagagtattatgtgacagccggtgatgagaaatgttccactgagctcttcgtaagagagcctccaattatggtgaccaaacagctggaagatacaactgcttattgtggggagagagtggaattagaatgtgaggtgtctgaagatgatgccaatgtaaaatggtttaagaatggtgaagagattatccctggtccaaaatcaagataccgaattagagttgagggtaaaaaacacatcttgatcatagagggagcaacaaaggctgatgctgcagaatattcagtaatgacaacaggaggacaatcatctgctaaacttagtgttgacttgaaacctctgaagattttgacacctctgactgatcagactgtaaatcttggaaaagaaatctgcctgaagtgtgaaatctctgaaaacataccaggaaaatggactaaaaatggcctacctgttcaggagagtgaccgtctaaaggtggttcacaagggaaggatccacaagttagtgatagccaatgccctcactgaagatgaaggtgattatgtatttgcacctgatgcctacaatgttactctgcctgccaaagttcatgttattgatcctcctaagatcatcctggatggtcttgatgctgacaacacagtgacagtgattgcaggaaacaagcttcgtcttgagatccccatcagcggagaaccacctcctaaagccatgtggagccggggagataaggctattatggaaggcagtggccggataagaacagaatcttaccctgatagcagcactctggtcattgatatagctgaaagagatgactctggtgtttaccacatcaatctgaaaaacgaagctggagaggcacatgcaagcatcaaggttaaagttgtggacttccctgatcctccagtggcaccgactgtgacagaggtgggagatgactggtgtatcatgaactgggagcctcctgcctacgacggaggctctccaatcctaggatattttattgagaggaagaagaaacaaagctccaggtggatgaggctgaattttgatctctgcaaagaaacaacttttgagcccaagaagatgattgaaggtgtggcctatgaggtccgcatctttgcagtcaatgccattggcatctccaagcccagtatgccctccaggccttttgttcctttggctgtaacaagccctcctactcttctgactgtggactctgtcactgacacgactgtcacgatgaggtggcgccccccagaccacattggtgcagcaggtttagatggctatgtgctagagtattgctttgaaggaactgaggactggatagttgcaaacaaagatctgattgacaagacgaagttcaccatcacaggtctgccaacagatgcaaagatctttgtgcgtgtgaaggctgttaatgcagctggtgccagcgagcccaagtactattctcagcccattctcgtgaaggaaatcatagaacctccaaagattcgcattccaagacacctgaagcaaacctatatccgcagagttggagaagctgtcaatctggttatacctttccagggaaaaccaagaccagaattaacttggaagaaggatggtgcagaaattgataagaatcaaataaacattcgcaactctgagactgatacaatcatatttattagaaaagcagagaggagccactctgggaaatatgatctgcaagtcaaagtggacaaattcgtggagaccgcatcaattgacatccagatcattgaccgtccaggtccaccccaaattgtgaagattgaggatgtctggggagaaaatgtcgctctcacatggactccaccaaaggatgatggaaatgctgctatcacaggctataccattcagaaggctgacaagaagagcatggaatggtttactgtcattgagcattatcatcgaaccagtgccaccattactgaattggtcatagggaatgaatattacttccgggtcttttctgaaaacatgtgtggcctcagtgaggatgccaccatgactaaagagagtgcagtgatcgccagggatggtaaaatctacaaaaatccagtgtatgaagactttgatttctcagaggcacccatgtttactcagcctttggttaacacctatgccatagctggttacaatgccaccctaaactgcagtgtgagaggaaatcctaagcctaaaataacctggatgaaaaacaaagttgctattgtggatgatccaagatacaggatgttcagcaaccagggagtctgtaccctggaaattcgcaagcccagcccctatgatggaggcacttactgctgcaaagcagtcaatgaccttgggacagtggagattgaatgcaaactggaggtgaaaggtgggctctccttctgcagactcctcttgcaaggcgtacctccaaacataattgattcgtatctgcgagacttacactcaagcaatcctgaggaatactgagggagggcctggctactgtctctctgcactctgctgctttgaaatctggttgaaatgagaaaaagcattttctgttttcccaccaggcccccaagtgtggtctttttctttcctcctaatgttg

SEQ ID NO: 156700 - DNA, 3818 bp, Homo sapiens
  Payload ID: 10720
  Gene Symbol: MYBPC1
  Gene Name: myosin binding protein C, slow type
  ENST ID: ENST00000441232
  CDS Start-End: 78-2426
tcgcctgcctgtggggtttctgtcaactagtcgtggagggaaggagactctttaaagaataacatcttattgtggccatgccagaacccactaagaaagaggaaaatgaagtgccagccccagccccacccccggaagaaccaagtaaagagaaggaggccggaactacaccagcaaaagatgaagaggaagtctccccgcctagcgccttgcctccaggtttgggtagtcgggccctggagagaaaagattcagactggacccttgtcgaaactcctcctggggaggaacaagccaagcagaatgccaactcccagctgtccatcttgttcattgaaaaacctcaaggaggaacagtgaaagttggtgaagatatcaccttcatagccaaagtcaaggctgaagatcttctgagaaaacccactatcaaatggttcaaaggaaaatggatggacctggccagcaaagccgggaagcaccttcagctgaaggaaacctttgagaggcacagtcgggtgtacacatttgagatgcagatcatcaaggccaaagataactttgcaggaaattacagatgcgaggtcacctataaggataagtttgacagctgttcatttgatcttgaagtgcacgaatctactgggactactccaaacattgacatcagatctgctttcaagagaagtggagaaggtcaagaggatgcaggagaacttgactttagtggtctcctgaaacgtagggaggtgaagcagcaggaggaagaaccccaggtggacgtatgggagttgctgaagaacgcgaaacccagtgagtacgagaagatcgccttccagtatggaatcaccgacctgcgcggcatgctcaagcgactcaagcgcatgcgcagagaggagaagaagagcgcagcttttgcaaaaattcttgatcctgcatatcaggttgacaaaggaggcagagtgaggtttgttgtggagctggcagatccaaagttggaggtgaaatggtataaaaatggtcaagaaattcgacccagtaccaaatacatctttgaacacaaaggatgccagagaatcctgtttatcaataactgtcagatgacagatgattcagagtattatgtgacagccggtgatgagaaatgttccactgagctcttcgtaagagagcctccaattatggtgaccaaacagctggaagatacaactgcttattgtggggagagagtggaattagaatgtgaggtgtctgaagatgatgccaatgtaaaatggtttaagaatggtgaagagattatccctggtccaaaatcaagataccgaattagagttgagggtaaaaaacacatcttgatcatagagggagcaacaaaggctgatgctgcagaatattcagtaatgacaacaggaggacaatcatctgctaaacttagtgttgacttgaaacctctgaagattttgacacctctgactgatcagactgtaaatcttggaaaagaaatctgcctgaagtgtgaaatctctgaaaacataccaggaaaatggactaaaaatggcctacctgttcaggagagtgaccgtctaaaggtggttcacaagggaaggatccacaagttagtgatagccaatgccctcactgaagatgaaggtgattatgtatttgcacctgatgcctacaatgttactctgcctgccaaagttcatgttattgatcctcctaagatcatcctggatggtcttgatgctgacaacacagtgacagtgattgcaggaaacaagcttcgtcttgagatccccatcagcggagaaccacctcctaaagccatgtggagccggggagataaggctattatggaaggcagtggccggataagaacagaatcttaccctgatagcagcactctggtcattgatatagctgaaagagatgactctggtgtttaccacatcaatctgaaaaacgaagctggagaggcacatgcaagcatcaaggttaaagttgtggacttccctgatcctccagtggcaccgactgtgacagaggtgggagatgactggtgtatcatgaactgggagcctcctgcctacgacggaggctctccaatcctaggatattttattgagaggaagaagaaacaaagctccaggtggatgaggctgaattttgatctctgcaaagaaacaacttttgagcccaagaagatgattgaaggtgtggcctatgaggtccgcatctttgcagtcaatgccattggcatctccaagcccagtatgccctccaggccttttgttcctttggctgtaacaagccctcctactcttctgactgtggactctgtcactgacacgactgtcacgatgaggtggcgccccagaccacattggtgcagcaggtttagatggctatgtgctagagtattgctttgaaggaactgaggactggatagttgcaaacaaagatctgattgacaagacgaagttcaccatcacaggtctgccaacagatgcaaagatctttgtgcgtgtgaaggctgttaatgcagctggtgccagcgagcccaagtactattctcagcccattctcgtgaaggaaatcatagaacctccaaagattcgcattccaagacacctgaagcaaacctatatccgcagagttggagaagctgtcaatctggttatacctttccagggaaaaccaagaccagaattaacttggaagaaggatggtgcagaaattgataagaatcaaataaacattcgcaactctgagactgatacaatcatatttattagaaaagcagagaggagccactctgggaaatatgatctgcaagtcaaagtggacaaattcgtggagaccgcatcaattgacatccagatcattgaccgtccaggtccaccccaaattgtgaagattgaggatgtctggggagaaaatgtcgctctcacatggactccaccaaaggatgatggaaatgctgctatcacaggctataccattcagaaggctgacaagaagagcatggaatggtttactgtcattgagcattatcatcgaaccagtgccaccattactgaattggtcatagggaatgaatattacttccgggtcttttctgaaaacatgtgtggcctcagtgaggatgccaccatgactaaagagagtgcagtgatcgccagggatggtaaaatctacaaaaatccagtgtatgaagactttgatttctcagaggcacccatgtttactcagcctttggttaacacctatgccatagctggttacaatgccaccctaaactgcagtgtgagaggaaatcctaagcctaaaataacctggatgaaaaacaaagttgctattgtggatgatccaagatacaggatgttcagcaaccagggagtctgtaccctggaaattcgcaagcccagcccctatgatggaggcacttactgctgcaaagcagtcaatgaccttgggacagtggagattgaatgcaaactggaggtgaaagtcattgcacaataaggatttttgaatgtataatatcatctaaggtgggctctccttctgcagactcctcttgcaaggcgtacctccaaacataattgattcgtatctgcgagacttacactcaagcaatcctgaggaatactgagggagggcctggctactgtctctctgcactctgctgctttgaaatctggttgaaatgagaaaaagcattttctgttttcccaccaggcccccaagtgtggtctttttctttcctcctaatgttgaagagaaaaaaaaaaaaaaaagtttgcccagattgcttaatt

SEQ ID NO: 156701 - DNA, 3861 bp, Homo sapiens
  Payload ID: 10720
  Gene Symbol: MYBPC1
  Gene Name: myosin binding protein C, slow type
  Uniprot ID: Q00872
  ENST ID: ENST00000452455
  CDS Start-End: 103-3624
ttgtcacaccgacctgcaccatctctcgcctgcctgtggggtttctgtcaactagtcgtggagggaaggagactctttaaagaataacatcttattgtggccatgccagaacccactaagaaagaggaaaatgaagtgccagccccagccccacccccggaagaaccaagtaaagagaaggaggccggaactacaccagcaaaagactggacccttgtcgaaactcctcctggggaggaacaagccaagcagaatgccaactcccagctgtccatcttgttcattgaaaaacctcaaggaggaacagtgaaagttggtgaagatatcaccttcatagccaaagtcaaggctgaagatcttctgagaaaacccactatcaaatggttcaaaggaaaatggatggacctggccagcaaagccgggaagcaccttcagctgaaggaaacctttgagaggcacagtcgggtgtacacatttgagatgcagatcatcaaggccaaagataactttgcaggaaattacagatgcgaggtcacctataaggataagtttgacagctgttcatttgatcttgaagtgcacgaatctactgggactactccaaacattgacatcagatctgctttcaagagaagtggagaaggtcaagaggatgcaggagaacttgactttagtggtctcctgaaacgtagggaggtgaagcagcaggaggaagaaccccaggtggacgtatgggagttgctgaagaacgcgaaacccagtgagtacgagaagatcgccttccagtatggaatcaccgacctgcgcggcatgctcaagcgactcaagcgcatgcgcagagaggagaagaagagcgcagcttttgcaaaaattcttgatcctgcatatcaggttgacaaaggaggcagagtgaggtttgttgtggagctggcagatccaaagttggaggtgaaatggtataaaaatggtcaagaaattcgacccagtaccaaatacatctttgaacacaaaggatgccagagaatcctgtttatcaataactgtcagatgacagatgattcagagtattatgtgacagccggtgatgagaaatgttccactgagctcttcgtaagagagcctccaattatggtgaccaaacagctggaagatacaactgcttattgtggggagagagtggaattagaatgtgaggtgtctgaagatgatgccaatgtaaaatggtttaagaatggtgaagagattatccctggtccaaaatcaagataccgaattagagttgagggtaaaaaacacatcttgatcatagagggagcaacaaaggctgatgctgcagaatattcagtaatgacaacaggaggacaatcatctgctaaacttagtgttgacttgaaacctctgaagattttgacacctctgactgatcagactgtaaatcttggaaaagaaatctgcctgaagtgtgaaatctctgaaaacataccaggaaaatggactaaaaatggcctacctgttcaggagagtgaccgtctaaaggtggttcacaagggaaggatccacaagttagtgatagccaatgccctcactgaagatgaaggtgattatgtatttgcacctgatgcctacaatgttactctgcctgccaaagttcatgttattgatcctcctaagatcatcctggatggtcttgatgctgacaacacagtgacagtgattgcaggaaacaagcttcgtcttgagatccccatcagcggagaaccacctcctaaagccatgtggagccggggagataaggctattatggaaggcagtggccggataagaacagaatcttaccctgatagcagcactctggtcattgatatagctgaaagagatgactctggtgtttaccacatcaatctgaaaaacgaagctggagaggcacatgcaagcatcaaggttaaagttgtggacttccctgatcctccagtggcaccgactgtgacagaggtgggagatgactggtgtatcatgaactgggagcctcctgcctacgacggaggctctccaatcctaggatattttattgagaggaagaagaaacaaagctccaggtggatgaggctgaattttgatctctgcaaagaaacaacttttgagcccaagaagatgattgaaggtgtggcctatgaggtccgcatctttgcagtcaatgccattggcatctccaagcccagtatgccctccaggccttttgttcctttggctgtaacaagccctcctactcttctgactgtggactctgtcactgacacgactgtcacgatgaggtggcgccccccagaccacattggtgcagcaggtttagatggctatgtgctagagtattgctttgaaggaagtacatcagcaaaacagtctgatgaaaatggggaggctgcctatgatctgccagctgaggactggatagttgcaaacaaagatctgattgacaagacgaagttcaccatcacaggtctgccaacagatgcaaagatctttgtgcgtgtgaaggctgttaatgcagctggtgccagcgagcccaagtactattctcagcccattctcgtgaaggaaatcatagaacctccaaagattcgcattccaagacacctgaagcaaacctatatccgcagagttggagaagctgtcaatctggttatacctttccagggaaaaccaagaccagaattaacttggaagaaggatggtgcagaaattgataagaatcaaataaacattcgcaactctgagactgatacaatcatatttattagaaaagcagagaggagccactctgggaaatatgatctgcaagtcaaagtggacaaattcgtggagaccgcatcaattgacatccagatcattgaccgtccaggtccaccccaaattgtgaagattgaggatgtctggggagaaaatgtcgctctcacatggactccaccaaaggatgatggaaatgctgctatcacaggctataccattcagaaggctgacaagaagagcatggaatggtttactgtcattgagcattatcatcgaaccagtgccaccattactgaattggtcatagggaatgaatattacttccgggtcttttctgaaaacatgtgtggcctcagtgaggatgccaccatgactaaagagagtgcagtgatcgccagggatggtaaaatctacaaaaatccagtgtatgaagactttgatttctcagaggcacccatgtttactcagcctttggttaacacctatgccatagctggttacaatgccaccctaaactgcagtgtgagaggaaatcctaagcctaaaataacctggatgaaaaacaaagttgctattgtggatgatccaagatacaggatgttcagcaaccagggagtctgtaccctggaaattcgcaagcccagcccctatgatggaggcacttactgctgcaaagcagtcaatgaccttgggacagtggagattgaatgcaaactggaggtgaaagtgatatatcaaggagtaaatacccctggacaaccagtcttcctggaggggcagcaacaggtgggctctccttctgcagactcctcttgcaaggcgtacctccaaacataattgattcgtatctgcgagacttacactcaagcaatcctgaggaatactgagggagggcctggctactgtctctctgcactctgctgctttgaaatctggttgaaatgagaaaaagcattttctgttttcccaccaggcccccaagtgtggtctttttctttcctcctaatgttgaagagaaaaaaaaaaaaaaaagtttgcccagattgcttaattaaaaattgcaaacaaaatctc

SEQ ID NO: 156702 - DNA, 3569 bp, Homo sapiens
  Payload ID: 10720
  Gene Symbol: MYBPC1
  Gene Name: myosin binding protein C, slow type
  Uniprot ID: Q00872
  ENST ID: ENST00000545503
  CDS Start-End: 76-3516
gcctgcctgtggggtttctgtcaactagtcgtggagggaaggagactctttaaagaataacatcttattgtggccatgccagaacccactaagaaagaggaaaatgaagtgccagccccagccccacccccggaagaaccaagtaaagagaaggaggccggaactacaccagcaaaagactggacccttgtcgaaactcctcctggggaggaacaagccaagcagaatgccaactcccagctgtccatcttgttcattgaaaaacctcaaggaggaacagtgaaagttggtgaagatatcaccttcatagccaaagtcaaggctgaagatcttctgagaaaacccactatcaaatggttcaaaggaaaatggatggacctggccagcaaagccgggaagcaccttcagctgaaggaaacctttgagaggcacagtcgggtgtacacatttgagatgcagatcatcaaggccaaagataactttgcaggaaattacagatgcgaggtcacctataaggataagtttgacagctgttcatttgatcttgaagtgcacgaatctactgggactactccaaacattgacatcagatctgctttcaagagaagtggagaaggtcaagaggatgcaggagaacttgactttagtggtctcctgaaacgtagggaggtgaagcagcaggaggaagaaccccaggtggacgtatgggagttgctgaagaacgcgaaacccagtgagtacgagaagatcgccttccagtatggaatcaccgacctgcgcggcatgctcaagcgactcaagcgcatgcgcagagaggagaagaagagcgcagcttttgcaaaaattcttgatcctgcatatcaggttgacaaaggaggcagagtgaggtttgttgtggagctggcagatccaaagttggaggtgaaatggtataaaaatggtcaagaaattcgacccagtaccaaatacatctttgaacacaaaggatgccagagaatcctgtttatcaataactgtcagatgacagatgattcagagtattatgtgacagccggtgatgagaaatgttccactgagctcttcgtaagagagcctccaattatggtgaccaaacagctggaagatacaactgcttattgtggggagagagtggaattagaatgtgaggtgtctgaagatgatgccaatgtaaaatggtttaagaatggtgaagagattatccctggtccaaaatcaagataccgaattagagttgagggtaaaaaacacatcttgatcatagagggagcaacaaaggctgatgctgcagaatattcagtaatgacaacaggaggacaatcatctgctaaacttagtgttgacttgaaacctctgaagattttgacacctctgactgatcagactgtaaatcttggaaaagaaatctgcctgaagtgtgaaatctctgaaaacataccaggaaaatggactaaaaatggcctacctgttcaggagagtgaccgtctaaaggtggttcacaagggaaggatccacaagttagtgatagccaatgccctcactgaagatgaaggtgattatgtatttgcacctgatgcctacaatgttactctgcctgccaaagttcatgttattgatcctcctaagatcatcctggatggtcttgatgctgacaacacagtgacagtgattgcaggaaacaagcttcgtcttgagatccccatcagcggagaaccacctcctaaagccatgtggagccggggagataaggctattatggaaggcagtggccggataagaacagaatcttaccctgatagcagcactctggtcattgatatagctgaaagagatgactctggtgtttaccacatcaatctgaaaaacgaagctggagaggcacatgcaagcatcaaggttaaagttgtggacttccctgatcctccagtggcaccgactgtgacagaggtgggagatgactggtgtatcatgaactgggagcctcctgcctacgacggaggctctccaatcctaggatattttattgagaggaagaagaaacaaagctccaggtggatgaggctgaattttgatctctgcaaagaaacaacttttgagcccaagaagatgattgaaggtgtggcctatgaggtccgcatctttgcagtcaatgccattggcatctccaagcccagtatgccctccaggccttttgttcctttggctgtaacaagccctcctactcttctgactgtggactctgtcactgacacgactgtcacgatgaggtggcgccccccagaccacattggtgcagcaggtttagatggctatgtgctagagtattgctttgaaggaactgaggactggatagttgcaaacaaagatctgattgacaagacgaagttcaccatcacaggtctgccaacagatgcaaagatctttgtgcgtgtgaaggctgttaatgcagctggtgccagcgagcccaagtactattctcagcccattctcgtgaaggaaatcatagaacctccaaagattcgcattccaagacacctgaagcaaacctatatccgcagagttggagaagctgtcaatctggttatacctttccagggaaaaccaagaccagaattaacttggaagaaggatggtgcagaaattgataagaatcaaataaacattcgcaactctgagactgatacaatcatatttattagaaaagcagagaggagccactctgggaaatatgatctgcaagtcaaagtggacaaattcgtggagaccgcatcaattgacatccagatcattgaccgtccaggtccaccccaaattgtgaagattgaggatgtctggggagaaaatgtcgctctcacatggactccaccaaaggatgatggaaatgctgctatcacaggctataccattcagaaggctgacaagaagagcatggaatggtttactgtcattgagcattatcatcgaaccagtgccaccattactgaattggtcatagggaatgaatattacttccgggtcttttctgaaaacatgtgtggcctcagtgaggatgccaccatgactaaagagagtgcagtgatcgccagggatggtaaaatctacaaaaatccagtgtatgaagactttgatttctcagaggcacccatgtttactcagcctttggttaacacctatgccatagctggttacaatgccaccctaaactgcagtgtgagaggaaatcctaagcctaaaataacctggatgaaaaacaaagttgctattgtggatgatccaagatacaggatgttcagcaaccagggagtctgtaccctggaaattcgcaagcccagcccctatgatggaggcacttactgctgcaaagcagtcaatgaccttgggacagtggagattgaatgcaaactggaggtgaaagtgatatatcaaggagtaaatacccctggacaaccagtcttcctggaggggcagcaacagtcattgcacaataaggatttttgaatgtataatatcatctaaggtgggctctccttctgcagactcctcttgcaagg

SEQ ID NO: 156703 - DNA, 3533 bp, Homo sapiens
  Payload ID: 10720
  Gene Symbol: MYBPC1
  Gene Name: myosin binding protein C, slow type
  Uniprot ID: Q00872
  ENST ID: ENST00000541119
  CDS Start-End: 76-3480
gcctgcctgtggggtttctgtcaactagtcgtggagggaaggagactctttaaagaataacatcttattgtggccatgccagaacccactaagaaagaggaaccaagtaaagagaaggaggccggaactacaccagcaaaagactggacccttgtcgaaactcctcctggggaggaacaagccaagcagaatgccaactcccagctgtccatcttgttcattgaaaaacctcaaggaggaacagtgaaagttggtgaagatatcaccttcatagccaaagtcaaggctgaagatcttctgagaaaacccactatcaaatggttcaaaggaaaatggatggacctggccagcaaagccgggaagcaccttcagctgaaggaaacctttgagaggcacagtcgggtgtacacatttgagatgcagatcatcaaggccaaagataactttgcaggaaattacagatgcgaggtcacctataaggataagtttgacagctgttcatttgatcttgaagtgcacgaatctactgggactactccaaacattgacatcagatctgctttcaagagaagtggagaaggtcaagaggatgcaggagaacttgactttagtggtctcctgaaacgtagggaggtgaagcagcaggaggaagaaccccaggtggacgtatgggagttgctgaagaacgcgaaacccagtgagtacgagaagatcgccttccagtatggaatcaccgacctgcgcggcatgctcaagcgactcaagcgcatgcgcagagaggagaagaagagcgcagcttttgcaaaaattcttgatcctgcatatcaggttgacaaaggaggcagagtgaggtttgttgtggagctggcagatccaaagttggaggtgaaatggtataaaaatggtcaagaaattcgacccagtaccaaatacatctttgaacacaaaggatgccagagaatcctgtttatcaataactgtcagatgacagatgattcagagtattatgtgacagccggtgatgagaaatgttccactgagctcttcgtaagagagcctccaattatggtgaccaaacagctggaagatacaactgcttattgtggggagagagtggaattagaatgtgaggtgtctgaagatgatgccaatgtaaaatggtttaagaatggtgaagagattatccctggtccaaaatcaagataccgaattagagttgagggtaaaaaacacatcttgatcatagagggagcaacaaaggctgatgctgcagaatattcagtaatgacaacaggaggacaatcatctgctaaacttagtgttgacttgaaacctctgaagattttgacacctctgactgatcagactgtaaatcttggaaaagaaatctgcctgaagtgtgaaatctctgaaaacataccaggaaaatggactaaaaatggcctacctgttcaggagagtgaccgtctaaaggtggttcacaagggaaggatccacaagttagtgatagccaatgccctcactgaagatgaaggtgattatgtatttgcacctgatgcctacaatgttactctgcctgccaaagttcatgttattgatcctcctaagatcatcctggatggtcttgatgctgacaacacagtgacagtgattgcaggaaacaagcttcgtcttgagatccccatcagcggagaaccacctcctaaagccatgtggagccggggagataaggctattatggaaggcagtggccggataagaacagaatcttaccctgatagcagcactctggtcattgatatagctgaaagagatgactctggtgtttaccacatcaatctgaaaaacgaagctggagaggcacatgcaagcatcaaggttaaagttgtggacttccctgatcctccagtggcaccgactgtgacagaggtgggagatgactggtgtatcatgaactgggagcctcctgcctacgacggaggctctccaatcctaggatattttattgagaggaagaagaaacaaagctccaggtggatgaggctgaattttgatctctgcaaagaaacaacttttgagcccaagaagatgattgaaggtgtggcctatgaggtccgcatctttgcagtcaatgccattggcatctccaagcccagtatgccctccaggccttttgttcctttggctgtaacaagccctcctactcttctgactgtggactctgtcactgacacgactgtcacgatgaggtggcgccccccagaccacattggtgcagcaggtttagatggctatgtgctagagtattgctttgaaggaactgaggactggatagttgcaaacaaagatctgattgacaagacgaagttcaccatcacaggtctgccaacagatgcaaagatctttgtgcgtgtgaaggctgttaatgcagctggtgccagcgagcccaagtactattctcagcccattctcgtgaaggaaatcatagaacctccaaagattcgcattccaagacacctgaagcaaacctatatccgcagagttggagaagctgtcaatctggttatacctttccagggaaaaccaagaccagaattaacttggaagaaggatggtgcagaaattgataagaatcaaataaacattcgcaactctgagactgatacaatcatatttattagaaaagcagagaggagccactctgggaaatatgatctgcaagtcaaagtggacaaattcgtggagaccgcatcaattgacatccagatcattgaccgtccaggtccaccccaaattgtgaagattgaggatgtctggggagaaaatgtcgctctcacatggactccaccaaaggatgatggaaatgctgctatcacaggctataccattcagaaggctgacaagaagagcatggaatggtttactgtcattgagcattatcatcgaaccagtgccaccattactgaattggtcatagggaatgaatattacttccgggtcttttctgaaaacatgtgtggcctcagtgaggatgccaccatgactaaagagagtgcagtgatcgccagggatggtaaaatctacaaaaatccagtgtatgaagactttgatttctcagaggcacccatgtttactcagcctttggttaacacctatgccatagctggttacaatgccaccctaaactgcagtgtgagaggaaatcctaagcctaaaataacctggatgaaaaacaaagttgctattgtggatgatccaagatacaggatgttcagcaaccagggagtctgtaccctggaaattcgcaagcccagcccctatgatggaggcacttactgctgcaaagcagtcaatgaccttgggacagtggagattgaatgcaaactggaggtgaaagtgatatatcaaggagtaaatacccctggacaaccagtcttcctggaggggcagcaacagtcattgcacaataaggatttttgaatgtataatatcatctaaggtgggctctccttctgcagactcctcttgcaagg

SEQ ID NO: 156704 - DNA, 3512 bp, Homo sapiens
  Payload ID: 10720
  Gene Symbol: MYBPC1
  Gene Name: myosin binding protein C, slow type
  Uniprot ID: Q00872
  ENST ID: ENST00000536007
  CDS Start-End: 76-3459
gcctgcctgtggggtttctgtcaactagtcgtggagggaaggagactctttaaagaataacatcttattgtggccatgccagaacccactaagaaagaggaaaatgaagtgccagccccagccccacccccggaagaaccaagtaaagagaaggaggccggaactacaccagcaaaagactggacccttgtcgaaactcctcctggggaggaacaagccaagcagaatgccaactcccagctgtccatcttgttcattgaaaaacctcaaggaggaacagtgaaagttggtgaagatatcaccttcatagccaaagtcaaggctgaagatcttctgagaaaacccactatcaaatggttcaaaggaaaatggatggacctggccagcaaagccgggaagcaccttcagctgaaggaaacctttgagaggcacagtcgggtgtacacatttgagatgcagatcatcaaggccaaagataactttgcaggaaattacagatgcgaggtcacctataaggataagtttgacagctgttcatttgatcttgaagtgcacgaatctactgggactactccaaacattgacatcagatctgctttcaagagaagggaggtgaagcagcaggaggaagaaccccaggtggacgtatgggagttgctgaagaacgcgaaacccagtgagtacgagaagatcgccttccagtatggaatcaccgacctgcgcggcatgctcaagcgactcaagcgcatgcgcagagaggagaagaagagcgcagcttttgcaaaaattcttgatcctgcatatcaggttgacaaaggaggcagagtgaggtttgttgtggagctggcagatccaaagttggaggtgaaatggtataaaaatggtcaagaaattcgacccagtaccaaatacatctttgaacacaaaggatgccagagaatcctgtttatcaataactgtcagatgacagatgattcagagtattatgtgacagccggtgatgagaaatgttccactgagctcttcgtaagagagcctccaattatggtgaccaaacagctggaagatacaactgcttattgtggggagagagtggaattagaatgtgaggtgtctgaagatgatgccaatgtaaaatggtttaagaatggtgaagagattatccctggtccaaaatcaagataccgaattagagttgagggtaaaaaacacatcttgatcatagagggagcaacaaaggctgatgctgcagaatattcagtaatgacaacaggaggacaatcatctgctaaacttagtgttgacttgaaacctctgaagattttgacacctctgactgatcagactgtaaatcttggaaaagaaatctgcctgaagtgtgaaatctctgaaaacataccaggaaaatggactaaaaatggcctacctgttcaggagagtgaccgtctaaaggtggttcacaagggaaggatccacaagttagtgatagccaatgccctcactgaagatgaaggtgattatgtatttgcacctgatgcctacaatgttactctgcctgccaaagttcatgttattgatcctcctaagatcatcctggatggtcttgatgctgacaacacagtgacagtgattgcaggaaacaagcttcgtcttgagatccccatcagcggagaaccacctcctaaagccatgtggagccggggagataaggctattatggaaggcagtggccggataagaacagaatcttaccctgatagcagcactctggtcattgatatagctgaaagagatgactctggtgtttaccacatcaatctgaaaaacgaagctggagaggcacatgcaagcatcaaggttaaagttgtggacttccctgatcctccagtggcaccgactgtgacagaggtgggagatgactggtgtatcatgaactgggagcctcctgcctacgacggaggctctccaatcctaggatattttattgagaggaagaagaaacaaagctccaggtggatgaggctgaattttgatctctgcaaagaaacaacttttgagcccaagaagatgattgaaggtgtggcctatgaggtccgcatctttgcagtcaatgccattggcatctccaagcccagtatgccctccaggccttttgttcctttggctgtaacaagccctcctactcttctgactgtggactctgtcactgacacgactgtcacgatgaggtggcgccccccagaccacattggtgcagcaggtttagatggctatgtgctagagtattgctttgaaggaactgaggactggatagttgcaaacaaagatctgattgacaagacgaagttcaccatcacaggtctgccaacagatgcaaagatctttgtgcgtgtgaaggctgttaatgcagctggtgccagcgagcccaagtactattctcagcccattctcgtgaaggaaatcatagaacctccaaagattcgcattccaagacacctgaagcaaacctatatccgcagagttggagaagctgtcaatctggttatacctttccagggaaaaccaagaccagaattaacttggaagaaggatggtgcagaaattgataagaatcaaataaacattcgcaactctgagactgatacaatcatatttattagaaaagcagagaggagccactctgggaaatatgatctgcaagtcaaagtggacaaattcgtggagaccgcatcaattgacatccagatcattgaccgtccaggtccaccccaaattgtgaagattgaggatgtctggggagaaaatgtcgctctcacatggactccaccaaaggatgatggaaatgctgctatcacaggctataccattcagaaggctgacaagaagagcatggaatggtttactgtcattgagcattatcatcgaaccagtgccaccattactgaattggtcatagggaatgaatattacttccgggtcttttctgaaaacatgtgtggcctcagtgaggatgccaccatgactaaagagagtgcagtgatcgccagggatggtaaaatctacaaaaatccagtgtatgaagactttgatttctcagaggcacccatgtttactcagcctttggttaacacctatgccatagctggttacaatgccaccctaaactgcagtgtgagaggaaatcctaagcctaaaataacctggatgaaaaacaaagttgctattgtggatgatccaagatacaggatgttcagcaaccagggagtctgtaccctggaaattcgcaagcccagcccctatgatggaggcacttactgctgcaaagcagtcaatgaccttgggacagtggagattgaatgcaaactggaggtgaaagtgatatatcaaggagtaaatacccctggacaaccagtcttcctggaggggcagcaacagtcattgcacaataaggatttttgaatgtataatatcatctaaggtgggctctccttctgcagactcctcttgcaagg

SEQ ID NO: 156705 - DNA, 3934 bp, Homo sapiens
  Payload ID: 10720
  Gene Symbol: MYBPC1
  Gene Name: myosin binding protein C, slow type
  ENST ID: ENST00000551300
  CDS Start-End: 543-3617
cctgcctgtggggtttctgtcaactagtcgtggagggaaggagactctttaaagaataacatcttattgtggccatgccagaacccactaagaaagaggcaatttcaaagtatccccgaatcaaacatgaatgttgaagtcaactacccagactgaagttgcttttaaaaaatgcttggacacaaaaacaaataaaaaatgaagtgccagccccagccccacccccggaagaaccaagtaaagagaaggaggccggaactacaccagcaaaagatgaagaggaagtctccccgcctagcgccttgcctccaggtttgggtagtcgggccctggagagaaaagattcagactggacccttgtcgaaactcctcctggggaggaacaagccaagcagaatgccaactcccagctgtccatcttgttcattgaaaaacctcaaggaggaacagtgaaagttggtgaagatatcaccttcatagccaaagtcaaggctgaagatcttctgagaaaacccactatcaaatggttcaaaggaaaatggatggacctggccagcaaagccgggaagcaccttcagctgaaggaaacctttgagaggcacagtcgggtgtacacatttgagatgcagatcatcaaggccaaagataactttgcaggaaattacagatgcgaggtcacctataaggataagtttgacagctgttcatttgatcttgaagtgcacgaatctactgggactactccaaacattgacatcagatctgctttcaagagaagtggagaaggtcaagaggatgcaggagaacttgactttagtggtctcctgaaacgtagggaggtgaagcagcaggaggaagaaccccaggtggacgtatgggagttgctgaagaacgcgaaacccagtgagtacgagaagatcgccttccagtatggaatcaccgacctgcgcggcatgctcaagcgactcaagcgcatgcgcagagaggagaagaagagcgcagcttttgcaaaaattcttgatcctgcatatcaggttgacaaaggaggcagagtgaggtttgttgtggagctggcagatccaaagttggaggtgaaatggtataaaaatggtcaagaaattcgacccagtaccaaatacatctttgaacacaaaggatgccagagaatcctgtttatcaataactgtcagatgacagatgattcagagtattatgtgacagccggtgatgagaaatgttccactgagctcttcgtaagagagcctccaattatggtgaccaaacagctggaagatacaactgcttattgtggggagagagtggaattagaatgtgaggtgtctgaagatgatgccaatgtaaaatggtttaagaatggtgaagagattatccctggtccaaaatcaagataccgaattagagttgagggtaaaaaacacatcttgatcatagagggagcaacaaaggctgatgctgcagaatattcagtaatgacaacaggaggacaatcatctgctaaacttagtgttgacttgaaacctctgaagattttgacacctctgactgatcagactgtaaatcttggaaaagaaatctgcctgaagtgtgaaatctctgaaaacataccaggaaaatggactaaaaatggcctacctgttcaggagagtgaccgtctaaaggtggttcacaagggaaggatccacaagttagtgatagccaatgccctcactgaagatgaaggtgattatgtatttgcacctgatgcctacaatgttactctgcctgccaaagttcatgttattgatcctcctaagatcatcctggatggtcttgatgctgacaacacagtgacagtgattgcaggaaacaagcttcgtcttgagatccccatcagcggagaaccacctcctaaagccatgtggagccggggagataaggctattatggaaggcagtggccggataagaacagaatcttaccctgatagcagcactctggtcattgatatagctgaaagagatgactctggtgtttaccacatcaatctgaaaaacgaagctggagaggcacatgcaagcatcaaggttaaagttgtggacttccctgatcctccagtggcaccgactgtgacagaggtgggagatgactggtgtatcatgaactgggagcctcctgcctacgacggaggctctccaatcctaggatattttattgagaggaagaagaaacaaagctccaggtggatgaggctgaattttgatctctgcaaagaaacaacttttgagcccaagaagatgattgaaggtgtggcctatgaggtccgcatctttgcagtcaatgccattggcatctccaagcccagtatgccctccaggccttttgttcctttggctgtaacaagccctcctactcttctgactgtggactctgtcactgacacgactgtcacgatgaggtggcgccccccagaccacattggtgcagcaggtttagatggctatgtgctagagtattgctttgaaggaactgaggactggatagttgcaaacaaagatctgattgacaagacgaagttcaccatcacaggtctgccaacagatgcaaagatctttgtgcgtgtgaaggctgttaatgcagctggtgccagcgagcccaagtactattctcagcccattctcgtgaaggaaatcatagaacctccaaagattcgcattccaagacacctgaagcaaacctatatccgcagagttggagaagctgtcaatctggttatacctttccagggaaaaccaagaccagaattaacttggaagaaggatggtgcagaaattgataagaatcaaataaacattcgcaactctgagactgatacaatcatatttattagaaaagcagagaggagccactctgggaaatatgatctgcaagtcaaagtggacaaattcgtggagaccgcatcaattgacatccagatcattgaccgtccaggtccaccccaaattgtgaagattgaggatgtctggggagaaaatgtcgctctcacatggactccaccaaaggatgatggaaatgctgctatcacaggctataccattcagaaggctgacaagaagagcatggaatggtttactgtcattgagcattatcatcgaaccagtgccaccattactgaattggtcatagggaatgaatattacttccgggtcttttctgaaaacatgtgtggcctcagtgaggatgccaccatgactaaagagagtgcagtgatcgccagggatggtaaaatctacaaaaatccagtgtatgaagactttgatttctcagaggcacccatgtttactcagcctttggttaacacctatgccatagctggttacaatgccaccctaaactgcagtgtgagaggaaatcctaagcctaaaataacctggatgaaaaacaaagttgctattgtggatgatccaagatacaggatgttcagcaaccagggagtctgtaccctggaaattcgcaagcccagcccctatgatggaggcacttactgctgcaaagcagtcaatgaccttgggacagtggagattgaatgcaaactggaggtgaaagtcattgcacaataaggatttttgaatgtataatatcatctaaggtgggctctccttctgcagactcctcttgcaaggcgtacctccaaacataattgattcgtatctgcgagacttacactcaagcaatcctgaggaatactgagggagggcctggctactgtctctctgcactctgctgctttgaaatctggttgaaatgagaaaaagcattttctgttttcccaccaggcccccaagtgtggtctttttctttcctcctaatgttgaagagaaaaaaaaaaaaaaaagtttgcccagattgcttaattaaaaattgcaaacaaaatctc

SEQ ID NO: 156706 - DNA, 3749 bp, Homo sapiens
  Payload ID: 10720
  Gene Symbol: MYBPC1
  Gene Name: myosin binding protein C, slow type
  ENST ID: ENST00000547509
  CDS Start-End: 101-3499
gtcacaccgacctgcaccatctctcgcctgcctgtggggtttctgtcaactagtcgtggagggaaggagactctttaaagaataacatcttattgtggccatgccagaacccactaagaaagaggaaaatgaagtgccagccccagccccacccccggaagactggacccttgtcgaaactcctcctggggaggaacaagccaagcagaatgccaactcccagctgtccatcttgttcattgaaaaacctcaaggaggaacagtgaaagttggtgaagatatcaccttcatagccaaagtcaaggctgaagatcttctgagaaaacccactatcaaatggttcaaaggaaaatggatggacctggccagcaaagccgggaagcaccttcagctgaaggaaacctttgagaggcacagtcgggtgtacacatttgagatgcagatcatcaaggccaaagataactttgcaggaaattacagatgcgaggtcacctataaggataagtttgacagctgttcatttgatcttgaagtgcacgaatctactgggactactccaaacattgacatcagatctgctttcaagagaagtggagaaggtcaagaggatgcaggagaacttgactttagtggtctcctgaaacgtagggaggtgaagcagcaggaggaagaaccccaggtggacgtatgggagttgctgaagaacgcgaaacccagtgagtacgagaagatcgccttccagtatggaatcaccgacctgcgcggcatgctcaagcgactcaagcgcatgcgcagagaggagaagaagagcgcagcttttgcaaaaattcttgatcctgcatatcaggttgacaaaggaggcagagtgaggtttgttgtggagctggcagatccaaagttggaggtgaaatggtataaaaatggtcaagaaattcgacccagtaccaaatacatctttgaacacaaaggatgccagagaatcctgtttatcaataactgtcagatgacagatgattcagagtattatgtgacagccggtgatgagaaatgttccactgagctcttcgtaagagagcctccaattatggtgaccaaacagctggaagatacaactgcttattgtggggagagagtggaattagaatgtgaggtgtctgaagatgatgccaatgtaaaatggtttaagaatggtgaagagattatccctggtccaaaatcaagataccgaattagagttgagggtaaaaaacacatcttgatcatagagggagcaacaaaggctgatgctgcagaatattcagtaatgacaacaggaggacaatcatctgctaaacttagtgttgacttgaaacctctgaagattttgacacctctgactgatcagactgtaaatcttggaaaagaaatctgcctgaagtgtgaaatctctgaaaacataccaggaaaatggactaaaaatggcctacctgttcaggagagtgaccgtctaaaggtggttcacaagggaaggatccacaagttagtgatagccaatgccctcactgaagatgaaggtgattatgtatttgcacctgatgcctacaatgttactctgcctgccaaagttcatgttattgatcctcctaagatcatcctggatggtcttgatgctgacaacacagtgacagtgattgcaggaaacaagcttcgtcttgagatccccatcagcggagaaccacctcctaaagccatgtggagccggggagataaggctattatggaaggcagtggccggataagaacagaatcttaccctgatagcagcactctggtcattgatatagctgaaagagatgactctggtgtttaccacatcaatctgaaaaacgaagctggagaggcacatgcaagcatcaaggttaaagttgtggacttccctgatcctccagtggcaccgactgtgacagaggtgggagatgactggtgtatcatgaactgggagcctcctgcctacgacggaggctctccaatcctaggatattttattgagaggaagaagaaacaaagctccaggtggatgaggctgaattttgatctctgcaaagaaacaacttttgagcccaagaagatgattgaaggtgtggcctatgaggtccgcatctttgcagtcaatgccattggcatctccaagcccagtatgccctccaggccttttgttcctttggctgtaacaagccctcctactcttctgactgtggactctgtcactgacacgactgtcacgatgaggtggcgccccccagaccacattggtgcagcaggtttagatggctatgtgctagagtattgctttgaaggaactgaggactggatagttgcaaacaaagatctgattgacaagacgaagttcaccatcacaggtctgccaacagatgcaaagatctttgtgcgtgtgaaggctgttaatgcagctggtgccagcgagcccaagtactattctcagcccattctcgtgaaggaaatcatagaacctccaaagattcgcattccaagacacctgaagcaaacctatatccgcagagttggagaagctgtcaatctggttatacctttccagggaaaaccaagaccagaattaacttggaagaaggatggtgcagaaattgataagaatcaaataaacattcgcaactctgagactgatacaatcatatttattagaaaagcagagaggagccactctgggaaatatgatctgcaagtcaaagtggacaaattcgtggagaccgcatcaattgacatccagatcattgaccgtccaggtccaccccaaattgtgaagattgaggatgtctggggagaaaatgtcgctctcacatggactccaccaaaggatgatggaaatgctgctatcacaggctataccattcagaaggctgacaagaagagcatggaatggtttactgtcattgagcattatcatcgaaccagtgccaccattactgaattggtcatagggaatgaatattacttccgggtcttttctgaaaacatgtgtggcctcagtgaggatgccaccatgactaaagagagtgcagtgatcgccagggatggtaaaatctacaaaaatccagtgtatgaagactttgatttctcagaggcacccatgtttactcagcctttggttaacacctatgccatagctggttacaatgccaccctaaactgcagtgtgagaggaaatcctaagcctaaaataacctggatgaaaaacaaagttgctattgtggatgatccaagatacaggatgttcagcaaccagggagtctgtaccctggaaattcgcaagcccagcccctatgatggaggcacttactgctgcaaagcagtcaatgaccttgggacagtggagattgaatgcaaactggaggtgaaagtgatatatcaaggagtaaatacccctggacaaccagtcttcctggaggggcagcaacagtcattgcacaataaggatttttgaatgtataatatcatctaaggtgggctctccttctgcagactcctcttgcaaggcgtacctccaaacataattgattcgtatctgcgagacttacactcaagcaatcctgaggaatactgagggagggcctggctactgtctctctgcactctgctgctttgaaatctggttgaaatgagaaaaagcattttctgttttcccaccaggcccccaagtgtggtctttttctttcctcctaatgttgaagaga

SEQ ID NO: 156707 - DNA, 661 bp, Homo sapiens
  Payload ID: 10720
  Gene Symbol: MYBPC1
  Gene Name: myosin binding protein C, slow type
  ENST ID: ENST00000550514
  CDS Start-End: 348-661
ctcttccaaataagctttccttgtggcttacgctgttcttcacttggatttgaacccgatcagcggctttcctttcaccaaaggatcttatttttgtaatttgtcggactttgcaagaattgtgatattctcagccagccctttcttcataagactggacccttgtcgaaactcctcctggggaggaacaagccaagcagaatgccaactcccagctgtccatcttgttcattgaaaaacctcaaggaggaacagtgaaagttggtgaagatatcaccttcatagccaaagtcaaggctgaagatcttctgagaaaacccactatcaaatggttcaaaggaaaatggatggacctggccagcaaagccgggaagcaccttcagctgaaggaaacctttgagaggcacagtcgggtgtacacatttgagatgcagatcatcaaggccaaagataactttgcaggaaattacagatgcgaggtcacctataaggataagtttgacagctgttcatttgatcttgaagtgcacgaatctactgggactactccaaacattgacatcagatctgctttcaagagaagtggagaaggtcaagaggatgcaggagaacttgactttagtggtctcctgaaacgtagggaggtgaagcagcaggagga

SEQ ID NO: 156708 - DNA, 4031 bp, Homo sapiens
  Payload ID: 10720
  Gene Symbol: MYBPC1
  Gene Name: myosin binding protein C, slow type
  ENST ID: ENST00000549145
  CDS Start-End: 101-3565
gtcacaccgacctgcaccatctctcgcctgcctgtggggtttctgtcaactagtcgtggagggaaggagactctttaaagaataacatcttattgtggccatgccagaacccactaagaaagaggaaaatgaagtgccagccccagccccacccccggaagaaccaagtaaagagaaggaggccggaactacaccagcaaaagatgaagaggaagtctccccgcctagcgccttgcctccagactggacccttgtcgaaactcctcctggggaggaacaagccaagcagaatgccaactcccagctgtccatcttgttcattgaaaaacctcaaggaggaacagtgaaagttggtgaagatatcaccttcatagccaaagtcaaggctgaagatcttctgagaaaacccactatcaaatggttcaaaggaaaatggatggacctggccagcaaagccgggaagcaccttcagctgaaggaaacctttgagaggcacagtcgggtgtacacatttgagatgcagatcatcaaggccaaagataactttgcaggaaattacagatgcgaggtcacctataaggataagtttgacagctgttcatttgatcttgaagtgcacgaatctactgggactactccaaacattgacatcagatctgctttcaagagaagtggagaaggtcaagaggatgcaggagaacttgactttagtggtctcctgaaacgtagggaggtgaagcagcaggaggaagaaccccaggtggacgtatgggagttgctgaagaacgcgaaacccagtgagtacgagaagatcgccttccagtatggaatcaccgacctgcgcggcatgctcaagcgactcaagcgcatgcgcagagaggagaagaagagcgcagcttttgcaaaaattcttgatcctgcatatcaggttgacaaaggaggcagagtgaggtttgttgtggagctggcagatccaaagttggaggtgaaatggtataaaaatggtcaagaaattcgacccagtaccaaatacatctttgaacacaaaggatgccagagaatcctgtttatcaataactgtcagatgacagatgattcagagtattatgtgacagccggtgatgagaaatgttccactgagctcttcgtaagagagcctccaattatggtgaccaaacagctggaagatacaactgcttattgtggggagagagtggaattagaatgtgaggtgtctgaagatgatgccaatgtaaaatggtttaagaatggtgaagagattatccctggtccaaaatcaagataccgaattagagttgagggtaaaaaacacatcttgatcatagagggagcaacaaaggctgatgctgcagaatattcagtaatgacaacaggaggacaatcatctgctaaacttagtgttgacttgaaacctctgaagattttgacacctctgactgatcagactgtaaatcttggaaaagaaatctgcctgaagtgtgaaatctctgaaaacataccaggaaaatggactaaaaatggcctacctgttcaggagagtgaccgtctaaaggtggttcacaagggaaggatccacaagttagtgatagccaatgccctcactgaagatgaaggtgattatgtatttgcacctgatgcctacaatgttactctgcctgccaaagttcatgttattgatcctcctaagatcatcctggatggtcttgatgctgacaacacagtgacagtgattgcaggaaacaagcttcgtcttgagatccccatcagcggagaaccacctcctaaagccatgtggagccggggagataaggctattatggaaggcagtggccggataagaacagaatcttaccctgatagcagcactctggtcattgatatagctgaaagagatgactctggtgtttaccacatcaatctgaaaaacgaagctggagaggcacatgcaagcatcaaggttaaagttgtggacttccctgatcctccagtggcaccgactgtgacagaggtgggagatgactggtgtatcatgaactgggagcctcctgcctacgacggaggctctccaatcctaggatattttattgagaggaagaagaaacaaagctccaggtggatgaggctgaattttgatctctgcaaagaaacaacttttgagcccaagaagatgattgaaggtgtggcctatgaggtccgcatctttgcagtcaatgccattggcatctccaagcccagtatgccctccaggccttttgttcctttggctgtaacaagccctcctactcttctgactgtggactctgtcactgacacgactgtcacgatgaggtggcgccccccagaccacattggtgcagcaggtttagatggctatgtgctagagtattgctttgaaggaagtacatcagcaaaacagtctgatgaaaatggggaggctgcctatgatctgccagctgaggactggatagttgcaaacaaagatctgattgacaagacgaagttcaccatcacaggtctgccaacagatgcaaagatctttgtgcgtgtgaaggctgttaatgcagctggtgccagcgagcccaagtactattctcagcccattctcgtgaaggaaatcatagaacctccaaagattcgcattccaagacacctgaagcaaacctatatccgcagagttggagaagctgtcaatctggttatacctttccagggaaaaccaagaccagaattaacttggaagaaggatggtgcagaaattgataagaatcaaataaacattcgcaactctgagactgatacaatcatatttattagaaaagcagagaggagccactctgggaaatatgatctgcaagtcaaagtggacaaattcgtggagaccgcatcaattgacatccagatcattgaccgtccaggtccaccccaaattgtgaagattgaggatgtctggggagaaaatgtcgctctcacatggactccaccaaaggatgatggaaatgctgctatcacaggctataccattcagaaggctgacaagaagagcatggaatggtttactgtcattgagcattatcatcgaaccagtgccaccattactgaattggtcatagggaatgaatattacttccgggtcttttctgaaaacatgtgtggcctcagtgaggatgccaccatgactaaagagagtgcagtgatcgccagggatggtaaaatctacaaaaatccagtgtatgaagactttgatttctcagaggcacccatgtttactcagcctttggttaacacctatgccatagctggttacaatgccaccctaaactgcagtgtgagaggaaatcctaagcctaaaataacctggatgaaaaacaaagttgctattgtggatgatccaagatacaggatgttcagcaaccagggagtctgtaccctggaaattcgcaagcccagcccctatgatggaggcacttactgctgcaaagcagtcaatgaccttgggacagtggagattgaatgcaaactggaggtgaaagtcattgcacaataaggatttttgaatgtataatatcatctaaggtgggctctccttctgcagactcctcttgcaaggcgtacctccaaacataattgattcgtatctgcgagacttacactcaagcaatcctgaggaatactgagggagggcctggctactgtctctctgcactctgctgctttgaaatctggttgaaatgagaaaaagcattttctgttttcccaccaggcccccaagtgtggtctttttctttcctcctaatgttgaagagaaaaaaaaaaaaaaaagtttgcccagattgcttaattaaaaattgcaaacaaaatctcatttgaagtcagcactttggtcattattatctctgctcactgtattatactttacaaaaatgcaagtcatagaataagcaaaagcagttatttttgtttacatagtaggctataaatgctttttttttcctctcagagtaaaaaacata

SEQ ID NO: 156709 - DNA, 3777 bp, Homo sapiens
  Payload ID: 10720
  Gene Symbol: MYBPC1
  Gene Name: myosin binding protein C, slow type
  Uniprot ID: Q00872
  ENST ID: ENST00000553190
  CDS Start-End: 88-3459
gcaccatctctcgcctgcctgtggggtttctgtcaactagtcgtggagggaaggagactctttaaagaataacatcttattgtggccatgccagaacccactaagaaagaggaaaatgaagtgccagccccagccccacccccggaagaaccaagtaaagagaaggaggccggaactacaccagcaaaagactggacccttgtcgaaactcctcctggggaggaacaagccaagcagaatgccaactcccagctgtccatcttgttcattgaaaaacctcaaggaggaacagtgaaagttggtgaagatatcaccttcatagccaaagtcaaggctgaagatcttctgagaaaacccactatcaaatggttcaaaggaaaatggatggacctggccagcaaagccgggaagcaccttcagctgaaggaaacctttgagaggcacagtcgggtgtacacatttgagatgcagatcatcaaggccaaagataactttgcaggaaattacagatgcgaggtcacctataaggataagtttgacagctgttcatttgatcttgaagtgcacgaatctactgggactactccaaacattgacatcagatctgctttcaagagaagtggagaaggtcaagaggatgcaggagaacttgactttagtggtctcctgaaacgtagggaggtgaagcagcaggaggaagaaccccaggtggacgtatgggagttgctgaagaacgcgaaacccagtgagtacgagaagatcgccttccagtatggaatcaccgacctgcgcggcatgctcaagcgactcaagcgcatgcgcagagaggagaagaagagcgcagcttttgcaaaaattcttgatcctgcatatcaggttgacaaaggaggcagagtgaggtttgttgtggagctggcagatccaaagttggaggtgaaatggtataaaaatggtcaagaaattcgacccagtaccaaatacatctttgaacacaaaggatgccagagaatcctgtttatcaataactgtcagatgacagatgattcagagtattatgtgacagccggtgatgagaaatgttccactgagctcttcgtaagagagcctccaattatggtgaccaaacagctggaagatacaactgcttattgtggggagagagtggaattagaatgtgaggtgtctgaagatgatgccaatgtaaaatggtttaagaatggtgaagagattatccctggtccaaaatcaagataccgaattagagttgagggtaaaaaacacatcttgatcatagagggagcaacaaaggctgatgctgcagaatattcagtaatgacaacaggaggacaatcatctgctaaacttagtgttgacttgaaacctctgaagattttgacacctctgactgatcagactgtaaatcttggaaaagaaatctgcctgaagtgtgaaatctctgaaaacataccaggaaaatggactaaaaatggcctacctgttcaggagagtgaccgtctaaaggtggttcacaagggaaggatccacaagttagtgatagccaatgccctcactgaagatgaaggtgattatgtatttgcacctgatgcctacaatgttactctgcctgccaaagttcatgttattgatcctcctaagatcatcctggatggtcttgatgctgacaacacagtgacagtgattgcaggaaacaagcttcgtcttgagatccccatcagcggagaaccacctcctaaagccatgtggagccggggagataaggctattatggaaggcagtggccggataagaacagaatcttaccctgatagcagcactctggtcattgatatagctgaaagagatgactctggtgtttaccacatcaatctgaaaaacgaagctggagaggcacatgcaagcatcaaggttaaagttgtggacttccctgatcctccagtggcaccgactgtgacagaggtgggagatgactggtgtatcatgaactgggagcctcctgcctacgacggaggctctccaatcctaggatattttattgagaggaagaagaaacaaagctccaggtggatgaggctgaattttgatctctgcaaagaaacaacttttgagcccaagaagatgattgaaggtgtggcctatgaggtccgcatctttgcagtcaatgccattggcatctccaagcccagtatgccctccaggccttttgttcctttggctgtaacaagccctcctactcttctgactgtggactctgtcactgacacgactgtcacgatgaggtggcgccccccagaccacattggtgcagcaggtttagatggctatgtgctagagtattgctttgaaggaactgaggactggatagttgcaaacaaagatctgattgacaagacgaagttcaccatcacaggtctgccaacagatgcaaagatctttgtgcgtgtgaaggctgttaatgcagctggtgccagcgagcccaagtactattctcagcccattctcgtgaaggaaatcatagaacctccaaagattcgcattccaagacacctgaagcaaacctatatccgcagagttggagaagctgtcaatctggttatacctttccagggaaaaccaagaccagaattaacttggaagaaggatggtgcagaaattgataagaatcaaataaacattcgcaactctgagactgatacaatcatatttattagaaaagcagagaggagccactctgggaaatatgatctgcaagtcaaagtggacaaattcgtggagaccgcatcaattgacatccagatcattgaccgtccaggtccaccccaaattgtgaagattgaggatgtctggggagaaaatgtcgctctcacatggactccaccaaaggatgatggaaatgctgctatcacaggctataccattcagaaggctgacaagaagagcatggaatggtttactgtcattgagcattatcatcgaaccagtgccaccattactgaattggtcatagggaatgaatattacttccgggtcttttctgaaaacatgtgtggcctcagtgaggatgccaccatgactaaagagagtgcagtgatcgccagggatggtaaaatctacaaaaatccagtgtatgaagactttgatttctcagaggcacccatgtttactcagcctttggttaacacctatgccatagctggttacaatgccaccctaaactgcagtgtgagaggaaatcctaagcctaaaataacctggatgaaaaacaaagttgctattgtggatgatccaagatacaggatgttcagcaaccagggagtctgtaccctggaaattcgcaagcccagcccctatgatggaggcacttactgctgcaaagcagtcaatgaccttgggacagtggagattgaatgcaaactggaggtgaaagtcattgcacaataaggatttttgaatgtataatatcatctaaggtgggctctccttctgcagactcctcttgcaaggcgtacctccaaacataattgattcgtatctgcgagacttacactcaagcaatcctgaggaatactgagggagggcctggctactgtctctctgcactctgctgctttgaaatctggttgaaatgagaaaaagcattttctgttttcccaccaggcccccaagtgtggtctttttctttcctcctaatgttgaagagaaaaaaaaaaaaaaaagtttgcccagattgcttaattaaaaattgcaaacaaaatctca

SEQ ID NO: 156710 - DNA, 3834 bp, Homo sapiens
  Payload ID: 10720
  Gene Symbol: MYBPC1
  Gene Name: myosin binding protein C, slow type
  Uniprot ID: Q00872
  ENST ID: ENST00000547405
  CDS Start-End: 223-3585
agatgtgagaaaggtccccatagctgtcaagttcctgcatccttgtgctgaagaaagggaggtgccatcatgattgatgttcagaggcagtataaaagcactgggtttctccccaactgcttgtcacaccgacctgcaccatctctcgcctgcctgtggggtttctgtcaactagtcgtggagggaaggagactctttaaagaataacatcttattgtggccatgccagaacccactaagaaagaggactggacccttgtcgaaactcctcctggggaggaacaagccaagcagaatgccaactcccagctgtccatcttgttcattgaaaaacctcaaggaggaacagtgaaagttggtgaagatatcaccttcatagccaaagtcaaggctgaagatcttctgagaaaacccactatcaaatggttcaaaggaaaatggatggacctggccagcaaagccgggaagcaccttcagctgaaggaaacctttgagaggcacagtcgggtgtacacatttgagatgcagatcatcaaggccaaagataactttgcaggaaattacagatgcgaggtcacctataaggataagtttgacagctgttcatttgatcttgaagtgcacgaatctactgggactactccaaacattgacatcagatctgctttcaagagaagtggagaaggtcaagaggatgcaggagaacttgactttagtggtctcctgaaacgtagggaggtgaagcagcaggaggaagaaccccaggtggacgtatgggagttgctgaagaacgcgaaacccagtgagtacgagaagatcgccttccagtatggaatcaccgacctgcgcggcatgctcaagcgactcaagcgcatgcgcagagaggagaagaagagcgcagcttttgcaaaaattcttgatcctgcatatcaggttgacaaaggaggcagagtgaggtttgttgtggagctggcagatccaaagttggaggtgaaatggtataaaaatggtcaagaaattcgacccagtaccaaatacatctttgaacacaaaggatgccagagaatcctgtttatcaataactgtcagatgacagatgattcagagtattatgtgacagccggtgatgagaaatgttccactgagctcttcgtaagagagcctccaattatggtgaccaaacagctggaagatacaactgcttattgtggggagagagtggaattagaatgtgaggtgtctgaagatgatgccaatgtaaaatggtttaagaatggtgaagagattatccctggtccaaaatcaagataccgaattagagttgagggtaaaaaacacatcttgatcatagagggagcaacaaaggctgatgctgcagaatattcagtaatgacaacaggaggacaatcatctgctaaacttagtgttgacttgaaacctctgaagattttgacacctctgactgatcagactgtaaatcttggaaaagaaatctgcctgaagtgtgaaatctctgaaaacataccaggaaaatggactaaaaatggcctacctgttcaggagagtgaccgtctaaaggtggttcacaagggaaggatccacaagttagtgatagccaatgccctcactgaagatgaaggtgattatgtatttgcacctgatgcctacaatgttactctgcctgccaaagttcatgttattgatcctcctaagatcatcctggatggtcttgatgctgacaacacagtgacagtgattgcaggaaacaagcttcgtcttgagatccccatcagcggagaaccacctcctaaagccatgtggagccggggagataaggctattatggaaggcagtggccggataagaacagaatcttaccctgatagcagcactctggtcattgatatagctgaaagagatgactctggtgtttaccacatcaatctgaaaaacgaagctggagaggcacatgcaagcatcaaggttaaagttgtggacttccctgatcctccagtggcaccgactgtgacagaggtgggagatgactggtgtatcatgaactgggagcctcctgcctacgacggaggctctccaatcctaggatattttattgagaggaagaagaaacaaagctccaggtggatgaggctgaattttgatctctgcaaagaaacaacttttgagcccaagaagatgattgaaggtgtggcctatgaggtccgcatctttgcagtcaatgccattggcatctccaagcccagtatgccctccaggccttttgttcctttggctgtaacaagccctcctactcttctgactgtggactctgtcactgacacgactgtcacgatgaggtggcgccccccagaccacattggtgcagcaggtttagatggctatgtgctagagtattgctttgaaggaactgaggactggatagttgcaaacaaagatctgattgacaagacgaagttcaccatcacaggtctgccaacagatgcaaagatctttgtgcgtgtgaaggctgttaatgcagctggtgccagcgagcccaagtactattctcagcccattctcgtgaaggaaatcatagaacctccaaagattcgcattccaagacacctgaagcaaacctatatccgcagagttggagaagctgtcaatctggttatacctttccagggaaaaccaagaccagaattaacttggaagaaggatggtgcagaaattgataagaatcaaataaacattcgcaactctgagactgatacaatcatatttattagaaaagcagagaggagccactctgggaaatatgatctgcaagtcaaagtggacaaattcgtggagaccgcatcaattgacatccagatcattgaccgtccaggtccaccccaaattgtgaagattgaggatgtctggggagaaaatgtcgctctcacatggactccaccaaaggatgatggaaatgctgctatcacaggctataccattcagaaggctgacaagaagagcatggaatggtttactgtcattgagcattatcatcgaaccagtgccaccattactgaattggtcatagggaatgaatattacttccgggtcttttctgaaaacatgtgtggcctcagtgaggatgccaccatgactaaagagagtgcagtgatcgccagggatggtaaaatctacaaaaatccagtgtatgaagactttgatttctcagaggcacccatgtttactcagcctttggttaacacctatgccatagctggttacaatgccaccctaaactgcagtgtgagaggaaatcctaagcctaaaataacctggatgaaaaacaaagttgctattgtggatgatccaagatacaggatgttcagcaaccagggagtctgtaccctggaaattcgcaagcccagcccctatgatggaggcacttactgctgcaaagcagtcaatgaccttgggacagtggagattgaatgcaaactggaggtgaaagtgatatatcaaggagtaaatacccctggacaaccagtcttcctggaggggcagcaacagtcattgcacaataaggatttttgaatgtataatatcatctaaggtgggctctccttctgcagactcctcttgcaaggcgtacctccaaacataattgattcgtatctgcgagacttacactcaagcaatcctgaggaatactgagggagggcctggctactgtctctctgcactctgctgctttgaaatctggttgaaatgagaaaaagcattttctgttttcccaccaggcccccaagtgtggtctttttctttcctcctaatgttgaagag

SEQ ID NO: 156711 - DNA, 3426 bp, Homo sapiens
  Payload ID: 10720
  Gene Symbol: MYBPC1
  Gene Name: myosin binding protein C, slow type
  Uniprot ID: Q00872
  ENST ID: ENST00000550270
  CDS Start-End: 1-3426
atgccagaacccactaagaaagaggaaaatgaagtgccagccccagccccacccccggaagaaccaagtaaagagaaggaggccggaactacaccagcaaaagactggacccttgtcgaaactcctcctggggaggaacaagccaagcagaatgccaactcccagctgtccatcttgttcattgaaaaacctcaaggaggaacagtgaaagttggtgaagatatcaccttcatagccaaagtcaaggctgaagatcttctgagaaaacccactatcaaatggttcaaaggaaaatggatggacctggccagcaaagccgggaagcaccttcagctgaaggaaacctttgagaggcacagtcgggtgtacacatttgagatgcagatcatcaaggccaaagataactttgcaggaaattacagatgcgaggtcacctataaggataagtttgacagctgttcatttgatcttgaagtgcacgaatctactgggactactccaaacattgacatcagatctgctttcaagagaagtggagaaggtcaagaggatgcaggagaacttgactttagtggtctcctgaaacgtagggaggtgaagcagcaggaggaagaaccccaggtggacgtatgggagttgctgaagaacgcgaaacccagtgagtacgagaagatcgccttccagtatggaatcaccgacctgcgcggcatgctcaagcgactcaagcgcatgcgcagagaggagaagaagagcgcagcttttgcaaaaattcttgatcctgcatatcaggttgacaaaggaggcagagtgaggtttgttgtggagctggcagatccaaagttggaggtgaaatggtataaaaatggtcaagaaattcgacccagtaccaaatacatctttgaacacaaaggatgccagagaatcctgtttatcaataactgtcagatgacagatgattcagagtattatgtgacagccggtgatgagaaatgttccactgagctcttcgtaagagagcctccaattatggtgaccaaacagctggaagatacaactgcttattgtggggagagagtggaattagaatgtgaggtgtctgaagatgatgccaatgtaaaatggtttaagaatggtgaagagattatccctggtccaaaatcaagataccgaattagagttgagggtaaaaaacacatcttgatcatagagggagcaacaaaggctgatgctgcagaatattcagtaatgacaacaggaggacaatcatctgctaaacttagtgttgacttgaaacctctgaagattttgacacctctgactgatcagactgtaaatcttggaaaagaaatctgcctgaagtgtgaaatctctgaaaacataccaggaaaatggactaaaaatggcctacctgttcaggagagtgaccgtctaaaggtggttcacaagggaaggatccacaagttagtgatagccaatgccctcactgaagatgaaggtgattatgtatttgcacctgatgcctacaatgttactctgcctgccaaagttcatgttattgatcctcctaagatcatcctggatggtcttgatgctgacaacacagtgacagtgattgcaggaaacaagcttcgtcttgagatccccatcagcggagaaccacctcctaaagccatgtggagccggggagataaggctattatggaaggcagtggccggataagaacagaatcttaccctgatagcagcactctggtcattgatatagctgaaagagatgactctggtgtttaccacatcaatctgaaaaacgaagctggagaggcacatgcaagcatcaaggttaaagttgtggacttccctgatcctccagtggcaccgactgtgacagaggtgggagatgactggtgtatcatgaactgggagcctcctgcctacgacggaggctctccaatcctaggatattttattgagaggaagaagaaacaaagctccaggtggatgaggctgaattttgatctctgcaaagaaacaacttttgagcccaagaagatgattgaaggtgtggcctatgaggtccgcatctttgcagtcaatgccattggcatctccaagcccagtatgccctccaggccttttgttcctttggctgtaacaagccctcctactcttctgactgtggactctgtcactgacacgactgtcacgatgaggtggcgccccccagaccacattggtgcagcaggtttagatggctatgtgctagagtattgctttgaaggaagtacatcagcaaaacagtctgatgaaaatggggaggctgcctatgatctgccagctgaggactggatagttgcaaacaaagatctgattgacaagacgaagttcaccatcacaggtctgccaacagatgcaaagatctttgtgcgtgtgaaggctgttaatgcagctggtgccagcgagcccaagtactattctcagcccattctcgtgaaggaaatcatagaacctccaaagattcgcattccaagacacctgaagcaaacctatatccgcagagttggagaagctgtcaatctggttatacctttccagggaaaaccaagaccagaattaacttggaagaaggatggtgcagaaattgataagaatcaaataaacattcgcaactctgagactgatacaatcatatttattagaaaagcagagaggagccactctgggaaatatgatctgcaagtcaaagtggacaaattcgtggagaccgcatcaattgacatccagatcattgaccgtccaggtccaccccaaattgtgaagattgaggatgtctggggagaaaatgtcgctctcacatggactccaccaaaggatgatggaaatgctgctatcacaggctataccattcagaaggctgacaagaagagcatggaatggtttactgtcattgagcattatcatcgaaccagtgccaccattactgaattggtcatagggaatgaatattacttccgggtcttttctgaaaacatgtgtggcctcagtgaggatgccaccatgactaaagagagtgcagtgatcgccagggatggtaaaatctacaaaaatccagtgtatgaagactttgatttctcagaggcacccatgtttactcagcctttggttaacacctatgccatagctggttacaatgccaccctaaactgcagtgtgagaggaaatcctaagcctaaaataacctggatgaaaaacaaagttgctattgtggatgatccaagatacaggatgttcagcaaccagggagtctgtaccctggaaattcgcaagcccagcccctatgatggaggcacttactgctgcaaagcagtcaatgaccttgggacagtggagattgaatgcaaactggaggtgaaagtcattgcacaataa

SEQ ID NO: 156712 - DNA, 1805 bp, Homo sapiens
  Payload ID: 10721
  Gene Symbol: MYBPH
  Gene Name: myosin binding protein H
  Uniprot ID: Q13203
  ENST ID: ENST00000255416
  CDS Start-End: 59-1492
aggccccccaacggctgacccctgcacactccaccctggccccccagccagtccagcaatgatggaaaaaaacacctccgagggccctgcctgcagtccagaggagaccgcatctgaatctgccaaggtgcccacagcagagcctcccggagaagtggcagtatcagagtccaccagagaagagcaggtgcccaagccgcaggcccctgccccacaggcccctacagcctccacagccactaagcctgcacccccaagtgaagatgtccccagtgccccactgctgctgaccctggatgatgtgagcagcagctctgtgactgtgagctgggagcccccagagaggctggggaggctgggcctccagggctatgtgctggagctctgcagagagggagcctcggagtgggtgcctgtgagtgcccggcccatgatggtgacccagcagactgtgcggaacctggctctgggagacaagttcctcctgcgcgtgtctgcagtgagttctgcaggggctggcccgccggccatgctggaccagcccatccacatccgagagaacattgaggcccccaagatccgtgtcccccgccacctccgtcagacctacatccgccaggtgggagagacggtcaacctgcaaatccccttccaggggaagcctaagcctcaggccacatggacccacaacggccatgccctggacagccagcgggtgagcatgcgcaccggggaccaggactccatcctcttcattcgctcggcccagcgctccgactctggccgctacgagctcactgtgcgcgtggaagacctggaggccaaggcagtcattgacatcctggtgattgagaaacctggaccccccagcagcatcaggctcctggacgtctggggctgcaatgctgctcttcagtggacgccaccccaggacacaggcaacacagagctcctgggctacatggtgcagaaggcagacaaaaagacagggcaatggttcacagtgctggagcgctaccacccaaccacctgcaccatctctgacctcatcatcggcaactcgtactccttccgggtcttctcagaaaacctgtgtggactcagcacctcggccaccgtcaccaaggagctcgcccacatccagaaggcagatattgctgccaaacctaaagggtttattgagcgagacttctcagaagccccctcattcacccagcccctggctgaccacacctccacccctggctacagcacccagttgttctgcagtgtccgagcttcacccaagcccaagatcatctggatgaaaaacaagatggagatccagggcaaccccaaataccgcgccctctctgagcaaggcgtctgcaccctagagatccggaaacccagcccctttgattctggggtctacacctgcaaggccataaatgtgctgggggaggcatctgtggactgccggctggaggtcaaagcctcagccgcacactgaagtcacgggaggaggctgtgatgaggagccaggtgctgcaggcctgaggggccaggtccaccaggcctacagtcaaactccagagatgcccaagacccccgcttccatagcgacggctgatggaaccgcccctggtacctgctggcctcccttccccagaggctggtgtccagaactcaggaatgggcctggtaggccccaggccagactaactgggctcaaggggtgctggaaggcgcagagattggagtgccctgcggagttgcactctgggtgggaagcactcaaataaagatgcgtggtgttaacagtg

SEQ ID NO: 156713 - DNA, 1772 bp, Homo sapiens
  Payload ID: 10721
  Gene Symbol: MYBPH
  Gene Name: myosin binding protein H
  ENST ID: ENST00000621380
  CDS Start-End: 29-1459
ccaccctggccccccagccagtccagcaatgatggaaaaaaacacctccgagggccctgcctgcagtccagaggagaccgcatctgaatctgccaaggtgcccacagcagagcctcccggagaagtggcagtatcagagtccaccagagaagagcaggtgcccaagccgcaggcccctgccccacaggcccctacagcctccacagccactaagcctgcacccccaagtgaagatgtccccagtgccccactgctgctgaccctggatgatgtgagcagcagctctgtgactgtgagctgggagcccccagagaggctggggaggctgggcctccagggctatgtgctggagctctgcagagagggagcctcggagtgggtgcctgtgagtgcccggcccatgatggtgacccagcagactgtgcggaacctggctctgggagacaagttcctcctgcgcgtgtctgcagtgagttctgcaggggctggcccgccggccatgctggaccagcccatccacatccgagagaacattgaggcccccaagatccgtgtcccccgccacctccgtcagacctacatccgccaggtgggagagacggtcaacctgcaaatccccttccaggggaagcctaagcctcaggccacatggacccacaacggccatgccctggacagccagcgggtgagcatgcgcaccggggaccaggactccatcctcttcattcgctcggcccagcgctccgactctggccgctacgagctcactgtgcgcgtggaagacctggaggccaaggcagtcattgacatcctggtgattgagaaacctggaccccccagcagcatcaggctcctggacgtctggggctgcaatgctgctcttcagtggacgccaccccaggacacaggcaacacagagctcctgggctacatggtgcagaaggcagacaaaaagacagggcaatggttcacagtgctggagcgctaccacccaaccacctgcaccatctctgacctcatcatcggcaactcgtactccttccgggtcttctcagaaaacctgtgtggactcagcacctcggccaccgtcaccaaggagctcgcccacatccagaaggcagatattgctgccaaacctaaagggtttattgagcgagacttctcagaagccccctcattcacccagcccctggctgaccacacctccacccctggctacagcacccagttgttctgcagtgtcgagcttcaccaagccaagatcatctggatgaaaaacaagatggagatccagggcaaccccaaataccgcgccctctctgagcaaggcgtctgcaccctagagatccggaaacccagcccctttgattctggggtctacacctgcaaggccataaatgtgctgggggaggcatctgtggactgccggctggaggtcaaagcctcagccgcacactgaagtcacgggaggaggctgtgatgaggagccaggtgctgcaggcctgaggggccaggtccaccaggcctacagtcaaactccagagatgcccaagacccccgcttccatagcgacggctgatggaaccgcccctggtacctgctggcctcccttccccagaggctggtgtccagaactcaggaatgggcctggtaggccccaggccagactaactgggctcaaggggtgctggaaggcgcagagattggagtgccctgcggagttgcactctgggtgggaagcactcaaataaagatgcgtggtgttaacagtg

SEQ ID NO: 156714 - DNA, 1372 bp, Homo sapiens
  Payload ID: 10722
  Gene Symbol: MYBPHL
  Gene Name: myosin binding protein H-like
  Uniprot ID: A2RUH7
  ENST ID: ENST00000357155
  CDS Start-End: 51-1115
accagcagtgaaaatctagagctggagctcagcctctgggaaggcccagcatggaggcagccacagctccggaggtggccgcaggatccaagctgaaggtgaaagaagccagcccagcggatgctgaaccaccccaggcttcacctggacagggggctggcagccccactccccagctcctgccccctatagaagagcaccccaagatctggctacctcgggccctgaggcagacctacatccggaaggttggggacacagtgaacctactaatcccattccagggcaagcccaaacctcaagccatctggacacatgatggctgtgccttggacaccaggcgtgtgagtgtgcggaatggggagcaagactccatcctcttcatccgagaagcccaacgtgctgactcaggtcgctaccaactccgcgtgcagctgggtgggctggaggccaccgccaccattgacatcctggtgattgagaggccaggccctcctcagagtattaagctggtggacgtttggggcttcagcgctacactggaatggacaccgccccaagatacggggaatacagcacttctgggatacacggtgcagaaggctgacacaaaatccgggctgtggttcacggtgctggagcactatcaccgcaccagctgcatcgtctctgacctcatcatcggcaactcctatgccttccgtgtctttgctgaaaaccagtgcggactcagtgaaacagcccccatcactacggacctcgcccacatccagaaagcagctactgtttacaagaccaaggggtttgcccaacgagacttctctgaagccccaaagtttacccagcctctggccgactgcactacagtcaccggctataatacccagctcttctgctgtgtccgcgcctctccccggcccaagatcatctggctgaagaacaagatggatatccaaggcaaccctaagtacagagccctgactcacctgggaatctgctccctagagatccgcaagccgggtccctttgatggaggcatctatacctgcaaggcggtgaaccccctaggggaggcatctgtggactgtcgggtggatgtgaaagttcctaattgaggacacctaagaaggcatggtactctgacaaagccagtgcccagcaatgaagtgaattcatggcacaggagccagggaccgtgacaacggtgccctcagcagcctggtgtcctctggccatttgctgtcatggctacaaagtgctccctcttttcagtgcctccaggaagcccgccagtggtgagactgtgtcctcaaggagcttcggcaccatgtctggtttggattcatctaaataaatatgtggttccccagtg

SEQ ID NO: 156715 - DNA, 3621 bp, Homo sapiens
  Payload ID: 10723
  Gene Symbol: MYO1A
  Gene Name: myosin IA
  Uniprot ID: Q9UBC5
  ENST ID: ENST00000300119
  CDS Start-End: 252-3383
gactggcacagggagcctgggctggaagaggcagcaaaagggaaaatcagaagagtggacactggcaagaggagggcagcctttttcccagcttccttgcaccatggacagctcccattaagccacctctccatcctggggccaggactcttatgccccattcctgtcaaattgagatttcatccaccattctccaaggacagtgaagttataccctagttccagtgttgggatcagtggcccctctggacatgcctctcctggaaggttctgtgggggtggaggatcttgtcctcctggaacccttggtggaggagtcactgctcaagaatcttcagcttcgctatgaaaacaaggagatttatacctacattgggaatgtggtgatctcagtgaatccctatcaacagcttcccatctatgggccagagttcattgccaaatatcaagactatactttctatgagctgaagccccatatctacgcattggcaaatgtggcgtaccagtcactgagggacagggaccgagaccagtgtatcctcatcacaggcgagagtggatcagggaagactgaggccagcaagctggtgatgtcttatgtggctgccgtctgtgggaaaggagagcaggtgaactctgtgaaggagcagctgctacagtctaacccagtgctggaggcttttggcaatgccaagaccattcgcaacaacaattcctcccgatttggaaaatacatggatattgaatttgacttcaagggatcccccctcggtggtgtcatcacaaactatctgcttgagaaatcccgattagtgaagcagctcaaaggagaaaggaacttccacatcttctatcagctgctggctggagcagatgaacagctgctgaaggccctgaagcttgagcgggatacaactggctatgcctatctgaatcatgaagtatccagagtggatggcatggacgacgcctccagcttcagggctgtacagagtgcaatggcagtgattgggttctcggaggaggagattcgacaagtgctagaggtgacatccatggtgctaaagctggggaacgtgttggtggctgatgagttccaggccagtgggataccagcaagtggcatccgtgatgggagaggtgttcgggagattggggagatggtgggcttgaattcagaagaagtagagagagctttgtgctcgaggaccatggaaacagccaaggaaaaggtggtcactgcactgaatgttatgcaggctcagtatgctcgggacgccctggctaagaacatctacagccgcctctttgactggatagtgaatcgaatcaatgagagcatcaaggtgggcatcggggaaaagaagaaggtaatgggagtccttgatatctacggttttgagatattagaggataatagctttgagcaatttgtgatcaactactgcaatgagaagctgcagcaggtgttcatagagatgaccctgaaagaagagcaagaggaatataagagagaaggcataccgtggacaaaggtggactactttgataatggcatcatttgtaagctcattgagcataatcagcgaggtatcctggccatgttggatgaggagtgcctgcggcctggggtggtcagtgactccactttcctagcaaagctgaaccagctcttctccaagcatggccactacgagagcaaagtcacccagaatgcccagcgtcagtatgaccacaccatgggcctcagctgcttccgcatctgccactatgcgggcaaggtgacatacaacgtgaccagctttattgacaagaataatgacctactcttccgagacctgttgcaggccatgtggaaggcccagcaccccctccttcggtccttgtttcctgagggcaatcctaagcaggcatctctcaaacgccccccgactgctggggcccagttcaagagttctgtggccatcctcatgaagaatctgtattccaagagccccaactacatcaggtgcataaagcccaatgagcatcagcagcgaggtcagttctcttcagacctggtggcaacccaggctcggtacctgggactgctggagaacgtacgggtgcgacgggcaggctatgcccaccgccagggttatgggcccttcctggaaaggtaccgattgctgagccggagcacctggcctcactggaatgggggagaccgggaaggtgttgagaaggtcctgggggagctgagcatgtcctcgggggagctggcctttggcaagacaaagatcttcattagaagccccaagactcttttctacctcgaagaacagaggcgcctgagactccagcagctggccacactcatacagaagatttaccgaggctggcgctgccgcacccactaccaactgatgcgaaagagtcagatcctcatctcctcttggtttcggggaaacatgcaaaagaaatgctatgggaagataaaggcatccgtgttattgatccaggcttttgtgagagggtggaaggcccgaaagaattatcgcaaatatttccggtcagaggctgccctcaccttggcagatttcatctacaagagcatggtacagaaattcctactggggctgaagaacaatttgccatccacaaacgtcttagacaagacatggccagccgccccctacaagtgcctcagcacagcaaatcaggagctgcagcagctcttctaccagtggaagtgcaagaggttccgggatcagctgtccccgaagcaggtagagatcctgagggaaaagctctgtgccagtgaactgttcaagggcaagaaggcttcatatccccagagtgtccccattccattctgtggtgactacattgggctgcaagggaaccccaagctgcagaagctgaaaggcggggaggaggggcctgttctgatggcagaggccgtgaagaaggtcaatcgtggcaatggcaagacttcttctcggattctcctcctgaccaagggccatgtgattctcacagacaccaagaagtcccaggccaaaattgtcattgggctagacaatgtggctggggtgtcagtcaccagcctcaaggatgggctctttagcttgcatctgagtgagatgtcatcggtgggctccaagggggacttcctgctggtcagcgagcatgtgattgaactgctgaccaaaatgtaccgggctgtgctggatgccacgcagaggcagcttacagtcaccgtgactgagaagttctcagtgaggttcaaggagaacagtgtggctgtcaaggtcgtccagggccctgcaggtggtgacaacagcaagctacgctacaaaaaaaaggggagtcattgcttggaggtgactgtgcagtgaggagggggcaccatgcagagatggcagttgcttcctcctgaaccagcactaatccccctctgccctcctgtgtgggaggatctctaacccctctgatcgtggcgcatggcttggggattaaactacccttgaagaggacccttgtcccaaacccttcttgttctctcctccaaaagtagcttcctccaacccgcagcctctctgcacactaataaaacatgtggcttggaaaggttca

SEQ ID NO: 156716 - DNA, 3658 bp, Homo sapiens
  Payload ID: 10723
  Gene Symbol: MYO1A
  Gene Name: myosin IA
  Uniprot ID: Q9UBC5
  ENST ID: ENST00000442789
  CDS Start-End: 289-3420
aatgcaagggggagttcaatgaaactgggacatctatacacatgtgagggagcctgggctggaagaggcagcaaaagggaaaatcagaagagtggacactggcaagaggagggcagcctttttcccagcttccttgcaccatggacagctcccattaagccacctctccatcctggggccaggactcttatgccccattcctgtcaaattgagatttcatccaccattctccaaggacagtgaagttataccctagttccagtgttgggatcagtggcccctctggacatgcctctcctggaaggttctgtgggggtggaggatcttgtcctcctggaacccttggtggaggagtcactgctcaagaatcttcagcttcgctatgaaaacaaggagatttatacctacattgggaatgtggtgatctcagtgaatccctatcaacagcttcccatctatgggccagagttcattgccaaatatcaagactatactttctatgagctgaagccccatatctacgcattggcaaatgtggcgtaccagtcactgagggacagggaccgagaccagtgtatcctcatcacaggcgagagtggatcagggaagactgaggccagcaagctggtgatgtcttatgtggctgccgtctgtgggaaaggagagcaggtgaactctgtgaaggagcagctgctacagtctaacccagtgctggaggcttttggcaatgccaagaccattcgcaacaacaattcctcccgatttggaaaatacatggatattgaatttgacttcaagggatcccccctcggtggtgtcatcacaaactatctgcttgagaaatcccgattagtgaagcagctcaaaggagaaaggaacttccacatcttctatcagctgctggctggagcagatgaacagctgctgaaggccctgaagcttgagcgggatacaactggctatgcctatctgaatcatgaagtatccagagtggatggcatggacgacgcctccagcttcagggctgtacagagtgcaatggcagtgattgggttctcggaggaggagattcgacaagtgctagaggtgacatccatggtgctaaagctggggaacgtgttggtggctgatgagttccaggccagtgggataccagcaagtggcatccgtgatgggagaggtgttcgggagattggggagatggtgggcttgaattcagaagaagtagagagagctttgtgctcgaggaccatggaaacagccaaggaaaaggtggtcactgcactgaatgttatgcaggctcagtatgctcgggacgccctggctaagaacatctacagccgcctctttgactggatagtgaatcgaatcaatgagagcatcaaggtgggcatcggggaaaagaagaaggtaatgggagtccttgatatctacggttttgagatattagaggataatagctttgagcaatttgtgatcaactactgcaatgagaagctgcagcaggtgttcatagagatgaccctgaaagaagagcaagaggaatataagagagaaggcataccgtggacaaaggtggactactttgataatggcatcatttgtaagctcattgagcataatcagcgaggtatcctggccatgttggatgaggagtgcctgcggcctggggtggtcagtgactccactttcctagcaaagctgaaccagctcttctccaagcatggccactacgagagcaaagtcacccagaatgcccagcgtcagtatgaccacaccatgggcctcagctgcttccgcatctgccactatgcgggcaaggtgacatacaacgtgaccagctttattgacaagaataatgacctactcttccgagacctgttgcaggccatgtggaaggcccagcaccccctccttcggtccttgtttcctgagggcaatcctaagcaggcatctctcaaacgccccccgactgctggggcccagttcaagagttctgtggccatcctcatgaagaatctgtattccaagagccccaactacatcaggtgcataaagcccaatgagcatcagcagcgaggtcagttctcttcagacctggtggcaacccaggctcggtacctgggactgctggagaacgtacgggtgcgacgggcaggctatgcccaccgccagggttatgggcccttcctggaaaggtaccgattgctgagccggagcacctggcctcactggaatgggggagaccgggaaggtgttgagaaggtcctgggggagctgagcatgtcctcgggggagctggcctttggcaagacaaagatcttcattagaagccccaagactcttttctacctcgaagaacagaggcgcctgagactccagcagctggccacactcatacagaagatttaccgaggctggcgctgccgcacccactaccaactgatgcgaaagagtcagatcctcatctcctcttggtttcggggaaacatgcaaaagaaatgctatgggaagataaaggcatccgtgttattgatccaggcttttgtgagagggtggaaggcccgaaagaattatcgcaaatatttccggtcagaggctgccctcaccttggcagatttcatctacaagagcatggtacagaaattcctactggggctgaagaacaatttgccatccacaaacgtcttagacaagacatggccagccgccccctacaagtgcctcagcacagcaaatcaggagctgcagcagctcttctaccagtggaagtgcaagaggttccgggatcagctgtccccgaagcaggtagagatcctgagggaaaagctctgtgccagtgaactgttcaagggcaagaaggcttcatatccccagagtgtccccattccattctgtggtgactacattgggctgcaagggaaccccaagctgcagaagctgaaaggcggggaggaggggcctgttctgatggcagaggccgtgaagaaggtcaatcgtggcaatggcaagacttcttctcggattctcctcctgaccaagggccatgtgattctcacagacaccaagaagtcccaggccaaaattgtcattgggctagacaatgtggctggggtgtcagtcaccagcctcaaggatgggctctttagcttgcatctgagtgagatgtcatcggtgggctccaagggggacttcctgctggtcagcgagcatgtgattgaactgctgaccaaaatgtaccgggctgtgctggatgccacgcagaggcagcttacagtcaccgtgactgagaagttctcagtgaggttcaaggagaacagtgtggctgtcaaggtcgtccagggccctgcaggtggtgacaacagcaagctacgctacaaaaaaaaggggagtcattgcttggaggtgactgtgcagtgaggagggggcaccatgcagagatggcagttgcttcctcctgaaccagcactaatccccctctgccctcctgtgtgggaggatctctaacccctctgatcgtggcgcatggcttggggattaaactacccttgaagaggacccttgtcccaaacccttcttgttctctcctccaaaagtagcttcctccaacccgcagcctctctgcacactaataaaacatgtggcttggaaaggttca

SEQ ID NO: 156717 - DNA, 560 bp, Homo sapiens
  Payload ID: 10723
  Gene Symbol: MYO1A
  Gene Name: myosin IA
  ENST ID: ENST00000433964
  CDS Start-End: 272-560
gctgagagttggagaatcaagtctctcttcaggagcctgggctggaagaggcagcaaaagggaaaatcagaagagtggacactggcaagaggagggcagcctttttcccagcttccttgcaccatggacagctcccattaagccacctctccatcctggggccaggactcttatgccccattcctgtcaaattgagatttcatccaccattctccaaggacagtgaagttataccctagttccagtgttgggatcagtggcccctctggacatgcctctcctggaaggttctgtgggggtggaggatcttgtcctcctggaacccttggtggaggagtcactgctcaagaatcttcagcttcgctatgaaaacaaggagatttatacctacattgggaatgtggtgatctcagtgaatccctatcaacagcttcccatctatgggccagagttcattgccaaatatcaagactatactttctatgagctgaagccccatatctacgcattggcaaatgtggcgtaccagtcactgagggacagggaccgagaccagtgta

SEQ ID NO: 156718 - DNA, 3099 bp, Homo sapiens
  Payload ID: 10723
  Gene Symbol: MYO1A
  Gene Name: myosin IA
  ENST ID: ENST00000554234
  CDS Start-End: 319-2385
agtctgctccaagtagagagagtggatgaacctgcgtgctggagattgagtgaaagatggtgtcttgaactggtttcacaatagtcattgcccacttcctccccacaagctacgcattggcaaatgtggcgtaccagtcactgagggacagggaccgagaccagtgtatcctcatcacaggcgagagtggatcagggaagactgaggccagcaagctggtgatgtcttatgtggctgccgtctgtgggaaaggagagcaggtgaactctgtgaaggagcagctgctacagtctaacccagtgctggaggggaaaatacatggatattgaatttgacttcaagggatcccccctcggtggtgtcatcacaaactatctgcttgagaaatcccgattagtgaagcagctcaaaggagaaaggaacttccacatcttctatcagctgctggctggagcagatgaacagctgctgaaggccctgaagcttgagcgggatacaactggctatgcctatctgaatcatgaagtatccagagtggatggcatggacgacgcctccagcttcagggctgtacagagtgcaatggcagtgattgggttctcggaggaggagattcgacaagtgctagaggtgacatccatggtgctaaagctggggaacgtgttggtggctgatgagttccaggccagtgggataccagcaagtggcatccgtgatgggagaggtgttcgggagattggggagatggtgggcttgaattcagaagaagtagagagagctttgtgctcgaggaccatggaaacagccaaggaaaaggtggtcactgcactgaatgttatgcaggctcagtatgctcgggacgccctggctaagaacatctacagccgcctctttgactggatagtgaatcgaatcaatgagagcatcaaggtgggcatcggggaaaagaagaaggtaatgggagtccttgatatctacggttttgagatattagaggataatagctttgagcaatttgtgatcaactactgcaatgagaagctgcagcaggtgttcatagagatgaccctgaaagaagagcaagaggaatataagagagaaggcataccgtggacaaaggtggactactttgataatggcatcatttgtaagctcattgagcataatcagcgaggtatcctggccatgttggatgaggagtgcctgcggcctggggtggtcagtgactccactttcctagcaaagctgaaccagctcttctccaagcatggccactacgagagcaaagtcacccagaatgcccagcgtcagtatgaccacaccatgggcctcagctgcttccgcatctgccactatgcgggcaaggtgacatacaacgtgaccagctttattgacaagaataatgacctactcttccgagacctgttgcaggccatgtggaaggcccagcaccccctccttcggtccttgtttcctgagggcaatcctaagcaggcatctctcaaacgccccccgactgctggggcccagttcaagagttctgtggccatcctcatgaagaatctgtattccaagagccccaactacatcaggtgcataaagcccaatgagcatcagcagcgaggtcagttctcttcagacctggtggcaacccaggctcggtacctgggactgctggagaacgtacgggtgcgacgggcaggctatgcccaccgccagggttatgggcccttcctggaaaggtaccgattgctgagccggagcacctggcctcactggaatgggggagaccgggaaggtgttgagaaggtcctgggggagctgagcatgtcctcgggggagctggcctttggcaagacaaagatcttcattagaagccccaagactcttttctacctcgaagaacagaggcgcctgagactccagcagctggccacactcatacagaagatttaccgaggctggcgctgccgcacccactaccaactgatgcgaaagagtcagatcctcatctcctcttggtttcggggaaacatgcaaaagaaatgctatgggaagataaaggcatccgtgttattgatccaggcttttgtgagagggtggaaggcccgaaagaattatcgcaaatatttccggtcagaggctgccctcaccttggcagatttcatctacaagagcatggtacagaaattcctactggggctgaagaacaatttgccatccacaaacgtcttagacaagacatggccagccgccccctacaagtgcctcagcacagcaaatcaggagctgcagcagctcttctaccagtggaaggcaaaggttccgggatcagctgtccccgaagcaggtagagatcctgagggaaaagctctgtgccagtgaactgttcaagggcaagaaggcttcatatccccagagtgtccccattccattctgtggtgactacattgggctgcaagggaaccccaagctgcagaagctgaaaggcggggaggaggggcctgttctgatggcagaggccgtgaagaaggtcaatcgtggcaatggcaagacttcttctcggattctcctcctgaccaagggccatgtgattctcacagacaccaagaagtcccaggccaaaattgtcattgggctagacaatgtggctggggtgtcagtcaccagcctcaaggatgggctctttagcttgcatctgagtgagatgtcatcggtgggctccaagggggacttcctgctggtcagcgagcatgtgattgaactgctgaccaaaatgtaccgggctgtgctggatgccacgcagaggcagcttacagtcaccgtgactgagaagttctcagtgaggttcaaggagaacagtgtggctgtcaaggtcgtccagggccctgcaggtggtgacaacagcaagctacgctacaaaaaaaaggggagtcattgcttggaggtgactgtgcagtgaggagggggcaccatgcagagatggcagttgcttcctcctgaaccagcactaatccccctctgccctcctgtgtgggaggatctctaacccctctgatcgtggcgcatggcttggggattaaactacccttgaagagg

SEQ ID NO: 156719 - DNA, 566 bp, Homo sapiens
  Payload ID: 10723
  Gene Symbol: MYO1A
  Gene Name: myosin IA
  ENST ID: ENST00000492945
  CDS Start-End: 346-566
agttttccattttaatggagtatctgtattgccttcctcggggtggtgctattcagtgaggcaatgcaagggggagttcaatgaaactgggacatctatacacatggagcctgggctggaagaggcagcaaaagggaaaatcagaagagtggacactggcaagaggagggcagcctttttcccagcttccttgcaccatggacagctcccattaagccacctctccatcctggggccaggactcttatgccccattcctgtcaaattgagatttcatccaccattctccaaggacagtgaagttataccctagttccagtgttgggtgttcgggagattggggagatggtgggcttgaattcagaagaagtagagagagctttgtgctcgaggaccatggaaacagccaaggaaaaggtggtcactgcactgaatgttatgcaggctcagtatgctcgggacgccctggctaagaacatctacagccgcctctttgactggatagtgaatcgaatcaatgagagcatcaaggtgggcatcggggaaaagaagaaggtaatgggagt

SEQ ID NO: 156720 - DNA, 4933 bp, Homo sapiens
  Payload ID: 10724
  Gene Symbol: MYO1B
  Gene Name: myosin IB
  Uniprot ID: O43795
  ENST ID: ENST00000304164
  CDS Start-End: 94-3504
gccccgcagccccgggctgggcccgcgtcccggagcgccaccggagagcgaggacgacgtggaggcggagtggcgcccggcgagctggagaccatggccaaaatggaggtgaaaacctcacttctggacaatatgattggagttggggatatggttcttttagaacctctcaatgaggagaccttcatcaacaacctcaagaagcgctttgaccacagtgaaatatacacatacattggaagtgtggttatatctgttaacccataccggtctttacccatttattcaccagagaaagtggaagaatacaggaacagaaatttttatgaactgagccctcacatctttgccctttcggatgaagcatacagatccctacgagatcaagataaggaccaatgtattctcattactggggaaagtggagcaggaaaaacagaggccagtaagcttgtcatgtcctatgtggcagctgtttgtggaaaaggagcagaagttaatcaagttaaagaacagcttttacagtccaacccggtcctggaagcttttggaaatgccaaaactgtaaggaatgacaactcctctagatttggcaaatatatggatattgaatttgactttaaaggcgatccactaggaggagtaataagtaactatcttttagagaaatctcgggttgttaaacagccaagaggtgaaagaaacttccatgtgttctatcagctgctctctggtgcctctgaagagctcctcaataaacttaagcttgagagggatttcagcaggtataactacctgagtctggattcggccaaagtgaatggagtggatgatgcagcaaattttagaaccgtgcggaatgccatgcagattgtgggctttatggatcatgaagctgagtctgtcttggcggtggtggcagcagtgttgaaactggggaacattgagttcaagcccgaatctcgagtgaatggtctagatgaaagcaaaatcaaagataaaaatgagttaaaagaaatttgtgaattgaccggcattgatcaatcagttctagaacgagcattcagtttccgaacagttgaggccaaacaggagaaagtttcaactacactgaatgtggctcaggcttattatgcccgtgatgctctggctaaaaacctctacagcaggttgttttcatggttggtaaatcgaatcaatgaaagcattaaggcacaaacaaaagtgagaaagaaggtcatgggtgttctggacatttatggctttgagattttcgaggacaacagctttgagcagttcattattaattattgtaacgaaaagctgcaacaaatcttcattgaacttactcttaaagaagagcaggaggagtatatacgggaggatatagaatggactcacattgactacttcaataatgctatcatttgtgacctaatagaaaataacacaaatggaatcctggccatgctggatgaagagtgcctcagacctggcacagtcactgatgagaccttcttagaaaagctgaaccaagtatgtgccacccaccagcattttgagagcaggatgagcaagtgctctcggttcctcaatgacacgtctctgcctcacagctgcttcaggatccagcattatgctggaaaggtgctgtaccaggtggaaggattcgttgacaaaaacaatgaccttctctatcgagacctgtcccaagccatgtggaaggccagccatgccctcatcaagtctttgttccccgaagggaatcccgccaagatcaacctgaaaaggcctcctacagcaggctcacagttcaaggcatccgtggccactctgatgaaaaacctacagaccaagaacccaaactatattaggtgtatcaaaccgaatgataaaaaagcagcacacatcttcaacgaggctctagtgtgtcatcagatcaggtacctggggcttttggagaacgtccgagtgcggagggcaggctacgccttcaggcaggcctatgaaccttgcctagaaagatacaaaatgctttgtaaacaaacatggcctcattggaaaggaccagccaggtctggtgtggaggtcctatttaatgaattagaaattcccgtggaagaatactcctttggtagatcaaagatattcatccgaaacccaagaacattattcaaattagaagacctgaggaagcaacgcctggaggacttggccactctcattcagaagatatatcgggggtggaaatgccgcacacacttcctgctaatgaaaaaaagccaaattgtgattgccgcctggtacaggagatatgcgcaacaaaagaggtaccagcagacaaagagttccgccttagtaattcagtcttatatccggggttggaaggctcgaaaaattctgcgggaactgaagcatcaaaagcgctgtaaggaagcagtcacgaccattgctgcatattggcatgggacccaggcacgaagggaactgagacggctgaaggaggaggctaggaataaacatgctattgcagttatttgggcttactggcttggatctaaggctcgaagggaattgaaacgcttgaaggaggaggctaggcgtaagcatgcagttgctgtcatttgggcttactggcttggactgaaggtacgtagagaatacaggaaattcttcagagccaatgctggaaagaaaatctatgagtttacgcttcagagaattgtgcaaaaatacttcttggaaatgaaaaataagatgccttccttatctccaatagacaagaattggccctcaagaccttacttattcttggattctactcacaaggagctaaaaaggattttccacttgtggaggtgtaaaaaatacagggaccaattcacagaccagcagaaacttatttatgaagagaaactagaagccagtgaactcttcaaagacaagaaggctttatacccatctagtgttgggcaaccattccaaggggcttacctggaaatcaacaagaaccccaagtataagaaactcaaagatgccattgaagaaaagatcatcattgctgaagtcgtgaacaaaattaaccgtgctaatgggaagagtacatctcggattttcctcttaacaaacaataatctccttcttgctgaccaaaagtctggacaaatcaagtcagaggttccattggtggatgtgaccaaggtatcaatgagctcacaaaatgatggcttcttcgccgtccacctcaaagagggctcagaagcagctagtaaaggagactttctcttcagcagtgatcacctgattgaaatggccaccaagctctatcgcacaactctcagccaaaccaaacagaagctcaatattgagatttccgatgagttcctggtacagttcagacaggacaaagtatgtgtgaagtttattcagggaaaccagaaaaatgggagtgtcccaacatgtaaacgaaaaaacaaccgtctccttgaagttgctgtcccttaactggcgcctcctctctactttcatggacttgttcctttgtaatagtgcaatttggttttgttttatttggggttcattgtatgtttgggaatcaccaaaggcttttagagttctttggcaaaataaaaatatttgactaatcaatttttattattggaatagttttaacctttcaaatacatgttctgtcctggagcaggattgtagaaactaacagtgtctattttcatgtctgatgtgttcttcctttagtcatcatgttaggtctgtgtaccctaaatcagcatattactcataaatcattaattaatataagcataggaaatggtcttaaaagatactgcattcattcatcagatatttattccatgcctactctatgctaggcactgtgctagatggtatgaaaacttattaggaacctttttgtttttgagaccattgcattctggctggtttgtgctggtttaacgacatctaagaaggtttagaaatggtgagaccaaaacaataactgttaatgatggacagcattattaggaaccctgtagtatgatatttaacaatataggcttcaagaagggctggtcctaagagggggcagaaatgaatgaccaggttaaatccctctacatgtggtttctgtttgaaaaaaagaaaactgacatttgaacaggacttttaatttgtttaaaactctggtaattacttgtaacagtagaaaatagaagtcattcttattttagaaaaagtgacagaagcagtccagtaagattatatgtttctgtttctggtaaataccatatatgatcctcgaaatgataatatctccagaatattgttttcacccaaatttgagtagatattttaaacacctaacaaagtaaagggctaaaagccattcagatagcagtaaaacattctgtatgatgtgcaataaaacatccaagatcttttttgaaagttttatttataatatacatttttgtatgagaaaggtgattggtacagggtgcctattttagtcatggatcaaaatttgtgtaacttgcagggctttctttctttttcttcaaatttacaagggttcattttggaaactacattttaaactttggaatcaaattgtttcttatttgggaggataatgtatatacattggtattatgttaaataataaaattgttctaatttggtgccatttcctgaatcacaactgtatttttgtatctcaagctattttcatatgttgtgtgtcaatgtatcatctctcagaaaggttttacaatccaaacattatatgttctctgtgtaactgaatttcacttatcttttataaaccagaaacattaattgaaaatattttctggggattttctcttgacttgtatttttaaaaattgctcacataaagaagttctcagaagtc

SEQ ID NO: 156721 - DNA, 5026 bp, Homo sapiens
  Payload ID: 10724
  Gene Symbol: MYO1B
  Gene Name: myosin IB
  Uniprot ID: O43795
  ENST ID: ENST00000339514
  CDS Start-End: 361-3597
ggtggctcccgttcctgcccgcgcgccgaggggcgaatcccaggcagcgaggtcgccgcccccgcccctcggccggcccctccgccagcgggcgagaggggagtggccgggctcctcccgccgccgctgagcactccgcagctgggtgcgcacgggagcctcaaccgcggcgcgtggaggcagtaccagagcgcgcggcgcgcagtcggccggcagccgcgggacagccttggcagaacagccgcggcgggagccccgcagccccgggctgggcccgcgtcccggagcgccaccggagagcgaggacgacgtggaggcggagtggcgcccggcgaggtagcgccaggcgagctggagaccatggccaaaatggaggtgaaaacctcacttctggacaatatgattggagttggggatatggttcttttagaacctctcaatgaggagaccttcatcaacaacctcaagaagcgctttgaccacagtgaaatatacacatacattggaagtgtggttatatctgttaacccataccggtctttacccatttattcaccagagaaagtggaagaatacaggaacagaaatttttatgaactgagccctcacatctttgccctttcggatgaagcatacagatccctacgagatcaagataaggaccaatgtattctcattactggggaaagtggagcaggaaaaacagaggccagtaagcttgtcatgtcctatgtggcagctgtttgtggaaaaggagcagaagttaatcaagttaaagaacagcttttacagtccaacccggtcctggaagcttttggaaatgccaaaactgtaaggaatgacaactcctctagatttggcaaatatatggatattgaatttgactttaaaggcgatccactaggaggagtaataagtaactatcttttagagaaatctcgggttgttaaacagccaagaggtgaaagaaacttccatgtgttctatcagctgctctctggtgcctctgaagagctcctcaataaacttaagcttgagagggatttcagcaggtataactacctgagtctggattcggccaaagtgaatggagtggatgatgcagcaaattttagaaccgtgcggaatgccatgcagattgtgggctttatggatcatgaagctgagtctgtcttggcggtggtggcagcagtgttgaaactggggaacattgagttcaagcccgaatctcgagtgaatggtctagatgaaagcaaaatcaaagataaaaatgagttaaaagaaatttgtgaattgaccggcattgatcaatcagttctagaacgagcattcagtttccgaacagttgaggccaaacaggagaaagtttcaactacactgaatgtggctcaggcttattatgcccgtgatgctctggctaaaaacctctacagcaggttgttttcatggttggtaaatcgaatcaatgaaagcattaaggcacaaacaaaagtgagaaagaaggtcatgggtgttctggacatttatggctttgagattttcgaggacaacagctttgagcagttcattattaattattgtaacgaaaagctgcaacaaatcttcattgaacttactcttaaagaagagcaggaggagtatatacgggaggatatagaatggactcacattgactacttcaataatgctatcatttgtgacctaatagaaaataacacaaatggaatcctggccatgctggatgaagagtgcctcagacctggcacagtcactgatgagaccttcttagaaaagctgaaccaagtatgtgccacccaccagcattttgagagcaggatgagcaagtgctctcggttcctcaatgacacgtctctgcctcacagctgcttcaggatccagcattatgctggaaaggtgctgtaccaggtggaaggattcgttgacaaaaacaatgaccttctctatcgagacctgtcccaagccatgtggaaggccagccatgccctcatcaagtctttgttccccgaagggaatcccgccaagatcaacctgaaaaggcctcctacagcaggctcacagttcaaggcatccgtggccactctgatgaaaaacctacagaccaagaacccaaactatattaggtgtatcaaaccgaatgataaaaaagcagcacacatcttcaacgaggctctagtgtgtcatcagatcaggtacctggggcttttggagaacgtccgagtgcggagggcaggctacgccttcaggcaggcctatgaaccttgcctagaaagatacaaaatgctttgtaaacaaacatggcctcattggaaaggaccagccaggtctggtgtggaggtcctatttaatgaattagaaattcccgtggaagaatactcctttggtagatcaaagatattcatccgaaacccaagaacattattcaaattagaagacctgaggaagcaacgcctggaggacttggccactctcattcagaagatatatcgggggtggaaatgccgcacacacttcctgctaatgaaaaaaagccaaattgtgattgccgcctggtacaggagatatgcgcaacaaaagaggtaccagcagacaaagagttccgccttagtaattcagtcttatatccggggttggaaggctcgaaaaattctgcgggaactgaagcatcaaaagcgctgtaaggaagcagtcacgaccattgctgcatattggcatgggacccaggtacgtagagaatacaggaaattcttcagagccaatgctggaaagaaaatctatgagtttacgcttcagagaattgtgcaaaaatacttcttggaaatgaaaaataagatgccttccttatctccaatagacaagaattggccctcaagaccttacttattcttggattctactcacaaggagctaaaaaggattttccacttgtggaggtgtaaaaaatacagggaccaattcacagaccagcagaaacttatttatgaagagaaactagaagccagtgaactcttcaaagacaagaaggctttatacccatctagtgttgggcaaccattccaaggggcttacctggaaatcaacaagaaccccaagtataagaaactcaaagatgccattgaagaaaagatcatcattgctgaagtcgtgaacaaaattaaccgtgctaatgggaagagtacatctcggattttcctcttaacaaacaataatctccttcttgctgaccaaaagtctggacaaatcaagtcagaggttccattggtggatgtgaccaaggtatcaatgagctcacaaaatgatggcttcttcgccgtccacctcaaagagggctcagaagcagctagtaaaggagactttctcttcagcagtgatcacctgattgaaatggccaccaagctctatcgcacaactctcagccaaaccaaacagaagctcaatattgagatttccgatgagttcctggtacagttcagacaggacaaagtatgtgtgaagtttattcagggaaaccagaaaaatgggagtgtcccaacatgtaaacgaaaaaacaaccgtctccttgaagttgctgtcccttaactggcgcctcctctctactttcatggacttgttcctttgtaatagtgcaatttggttttgttttatttggggttcattgtatgtttgggaatcaccaaaggcttttagagttctttggcaaaataaaaatatttgactaatcaatttttattattggaatagttttaacctttcaaatacatgttctgtcctggagcaggattgtagaaactaacagtgtctattttcatgtctgatgtgttcttcctttagtcatcatgttaggtctgtgtaccctaaatcagcatattactcataaatcattaattaatataagcataggaaatggtcttaaaagatactgcattcattcatcagatatttattccatgcctactctatgctaggcactgtgctagatggtatgaaaacttattaggaacctttttgtttttgagaccattgcattctggctggtttgtgctggtttaacgacatctaagaaggtttagaaatggtgagaccaaaacaataactgttaatgatggacagcattattaggaaccctgtagtatgatatttaacaatataggcttcaagaagggctggtcctaagagggggcagaaatgaatgaccaggttaaatccctctacatgtggtttctgtttgaaaaaaagaaaactgacatttgaacaggacttttaatttgtttaaaactctggtaattacttgtaacagtagaaaatagaagtcattcttattttagaaaaagtgacagaagcagtccagtaagattatatgtttctgtttctggtaaataccatatatgatcctcgaaatgataatatctccagaatattgttttcacccaaatttgagtagatattttaaacacctaacaaagtaaagggctaaaagccattcagatagcagtaaaacattctgtatgatgtgcaataaaacatccaagatcttttttgaaagttttatttataatatacatttttgtatgagaaaggtgattggtacagggtgcctattttagtcatggatcaaaatttgtgtaacttgcagggctttctttctttttcttcaaatttacaagggttcattttggaaactacattttaaactttggaatcaaattgtttcttatttgggaggataatgtatatacattggtattatgttaaataataaaattgttctaatttggtgccatttcctgaatcacaactgtatttttgtatctcaagctattttcatatgttgtgtgtcaatgtatcatctctcagaaaggttttacaatccaaacattatatgttctctgtgtaactgaatttcacttatcttttataaaccagaaacattaattgaaaatattttctggggattttctcttgacttgtatttttaaaaattgctcacataaagaagttctcagaagtc

SEQ ID NO: 156722 - DNA, 4764 bp, Homo sapiens
  Payload ID: 10724
  Gene Symbol: MYO1B
  Gene Name: myosin IB
  ENST ID: ENST00000392316
  CDS Start-End: 12-3335
agctggagaccatggccaaaatggaggtgaaaacctcacttctggacaatatgattggagttggggatatggttcttttagaacctctcaatgaggagaccttcatcaacaacctcaagaagcgctttgaccacagtgaaatatacacatacattggaagtgtggttatatctgttaacccataccggtctttacccatttattcaccagagaaagtggaagaatacaggaacagaaatttttatgaactgagccctcacatctttgccctttcggatgaagcatacagatccctacgagatcaagataaggaccaatgtattctcattactggggaaagtggagcaggaaaaacagaggccagtaagcttgtcatgtcctatgtggcagctgtttgtggaaaaggagcagaagttaatcaagttaaagaacagcttttacagtccaacccggtcctggaagcttttggaaatgccaaaactgtaaggaatgacaactcctctagatttggcaaatatatggatattgaatttgactttaaaggcgatccactaggaggagtaataagtaactatcttttagagaaatctcgggttgttaaacagccaagaggtgaaagaaacttccatgtgttctatcagctgctctctggtgcctctgaagagctcctcaataaacttaagcttgagagggatttcagcaggtataactacctgagtctggattcggccaaagtgaatggagtggatgatgcagcaaattttagaaccgtgcggaatgccatgcagattgtgggctttatggatcatgaagctgagtctgtcttggcggtggtggcagcagtgttgaaactggggaacattgagttcaagcccgaatctcgagtgaatggtctagatgaaagcaaaatcaaagataaaaatgagttaaaagaaatttgtgaattgaccggcattgatcaatcagttctagaacgagcattcagtttccgaacagttgaggccaaacaggagaaagtttcaactacactgaatgtggctcaggcttattatgcccgtgatgctctggctaaaaacctctacagcaggttgttttcatggttggtaaatcgaatcaatgaaagcattaaggcacaaacaaaagtgagaaagaaggtcatgggtgttctggacatttatggctttgagattttcgaggacaacagctttgagcagttcattattaattattgtaacgaaaagctgcaacaaatcttcattgaacttactcttaaagaagagcaggaggagtatatacgggaggatatagaatggactcacattgactacttcaataatgctatcatttgtgacctaatagaaaataacacaaatggaatcctggccatgctggatgaagagtgcctcagacctggcacagtcactgatgagaccttcttagaaaagctgaaccaagtatgtgccacccaccagcattttgagagcaggatgagcaagtgctctcggttcctcaatgacacgtctctgcctcacagctgcttcaggatccagcattatgctggaaaggtgctgtaccaggtggaaggattcgttgacaaaaacaatgaccttctctatcgagacctgtcccaagccatgtggaaggccagccatgccctcatcaagtctttgttccccgaagggaatcccgccaagatcaacctgaaaaggcctcctacagcaggctcacagttcaaggcatccgtggccactctgatgaaaaacctacagaccaagaacccaaactatattaggtgtatcaaaccgaatgataaaaaagcagcacacatcttcaacgaggctctagtgtgtcatcagatcaggtacctggggcttttggagaacgtccgagtgcggagggcaggctacgccttcaggcaggcctatgaaccttgcctagaaagatacaaaatgctttgtaaacaaacatggcctcattggaaaggaccagccaggtctggtgtggaggtcctatttaatgaattagaaattcccgtggaagaatactcctttggtagatcaaagatattcatccgaaacccaagaacattattcaaattagaagacctgaggaagcaacgcctggaggacttggccactctcattcagaagatatatcgggggtggaaatgccgcacacacttcctgctaatgaaaaaaagccaaattgtgattgccgcctggtacaggagatatgcgcaacaaaagaggtaccagcagacaaagagttccgccttagtaattcagtcttatatccggggttggaaggctcgaaaaattctgcgggaactgaagcatcaaaagcgctgtaaggaagcagtcacgaccattgctgcatattggcatgggacccaggctcgaagggaattgaaacgcttgaaggaggaggctaggcgtaagcatgcagttgctgtcatttgggcttactggcttggactgaaggtacgtagagaatacaggaaattcttcagagccaatgctggaaagaaaatctatgagtttacgcttcagagaattgtgcaaaaatacttcttggaaatgaaaaataagatgccttccttatctccaatagacaagaattggccctcaagaccttacttattcttggattctactcacaaggagctaaaaaggattttccacttgtggaggtgtaaaaaatacagggaccaattcacagaccagcagaaacttatttatgaagagaaactagaagccagtgaactcttcaaagacaagaaggctttatacccatctagtgttgggcaaccattccaaggggcttacctggaaatcaacaagaaccccaagtataagaaactcaaagatgccattgaagaaaagatcatcattgctgaagtcgtgaacaaaattaaccgtgctaatgggaagagtacatctcggattttcctcttaacaaacaataatctccttcttgctgaccaaaagtctggacaaatcaagtcagaggttccattggtggatgtgaccaaggtatcaatgagctcacaaaatgatggcttcttcgccgtccacctcaaagagggctcagaagcagctagtaaaggagactttctcttcagcagtgatcacctgattgaaatggccaccaagctctatcgcacaactctcagccaaaccaaacagaagctcaatattgagatttccgatgagttcctggtacagttcagacaggacaaagtatgtgtgaagtttattcagggaaaccagaaaaatgggagtgtcccaacatgtaaacgaaaaaacaaccgtctccttgaagttgctgtcccttaactggcgcctcctctctactttcatggacttgttcctttgtaatagtgcaatttggttttgttttatttggggttcattgtatgtttgggaatcaccaaaggcttttagagttctttggcaaaataaaaatatttgactaatcaatttttattattggaatagttttaacctttcaaatacatgttctgtcctggagcaggattgtagaaactaacagtgtctattttcatgtctgatgtgttcttcctttagtcatcatgttaggtctgtgtaccctaaatcagcatattactcataaatcattaattaatataagcataggaaatggtcttaaaagatactgcattcattcatcagatatttattccatgcctactctatgctaggcactgtgctagatggtatgaaaacttattaggaacctttttgtttttgagaccattgcattctggctggtttgtgctggtttaacgacatctaagaaggtttagaaatggtgagaccaaaacaataactgttaatgatggacagcattattaggaaccctgtagtatgatatttaacaatataggcttcaagaagggctggtcctaagagggggcagaaatgaatgaccaggttaaatccctctacatgtggtttctgtttgaaaaaaagaaaactgacatttgaacaggacttttaatttgtttaaaactctggtaattacttgtaacagtagaaaatagaagtcattcttattttagaaaaagtgacagaagcagtccagtaagattatatgtttctgtttctggtaaataccatatatgatcctcgaaatgataatatctccagaatattgttttcacccaaatttgagtagatattttaaacacctaacaaagtaaagggctaaaagccattcagatagcagtaaaacattctgtatgatgtgcaataaaacatccaagatcttttttgaaagttttatttataatatacatttttgtatgagaaaggtgattggtacagggtgcctattttagtcatggatcaaaatttgtgtaacttgcagggctttctttctttttcttcaaatttacaagggttcattttggaaactacattttaaactttggaatcaaattgtttcttatttgggaggataatgtatatacattggtattatgttaaataataaaattgttctaatttggtgccatttcctgaatcacaactgtatttttgtatctcaagctattttcatatgttgtgtgtcaatgtatcatctctcagaaaggttttacaatccaaacattatatgttctctgtgtaactgaatttcacttatcttttataaaccagaaacattaattgaaaatattttctggggattttctcttgacttgtatttttaaaaattgctcacataaagaagttctcagaagtc

SEQ ID NO: 156723 - DNA, 5082 bp, Homo sapiens
  Payload ID: 10724
  Gene Symbol: MYO1B
  Gene Name: myosin IB
  Uniprot ID: O43795
  ENST ID: ENST00000392318
  CDS Start-End: 248-3658
cctcccgccgccgctgagcactccgcagctgggtgcgcacgggagcctcaaccgcggcgcgtggaggcagtaccagagcgcgcggcgcgcagtcggccggcagccgcgggacagccttggcagaacagccgcggcgggagccccgcagccccgggctgggcccgcgtcccggagcgccaccggagagcgaggacgacgtggaggcggagtggcgcccggcgaggtagcgccaggcgagctggagaccatggccaaaatggaggtgaaaacctcacttctggacaatatgattggagttggggatatggttcttttagaacctctcaatgaggagaccttcatcaacaacctcaagaagcgctttgaccacagtgaaatatacacatacattggaagtgtggttatatctgttaacccataccggtctttacccatttattcaccagagaaagtggaagaatacaggaacagaaatttttatgaactgagccctcacatctttgccctttcggatgaagcatacagatccctacgagatcaagataaggaccaatgtattctcattactggggaaagtggagcaggaaaaacagaggccagtaagcttgtcatgtcctatgtggcagctgtttgtggaaaaggagcagaagttaatcaagttaaagaacagcttttacagtccaacccggtcctggaagcttttggaaatgccaaaactgtaaggaatgacaactcctctagatttggcaaatatatggatattgaatttgactttaaaggcgatccactaggaggagtaataagtaactatcttttagagaaatctcgggttgttaaacagccaagaggtgaaagaaacttccatgtgttctatcagctgctctctggtgcctctgaagagctcctcaataaacttaagcttgagagggatttcagcaggtataactacctgagtctggattcggccaaagtgaatggagtggatgatgcagcaaattttagaaccgtgcggaatgccatgcagattgtgggctttatggatcatgaagctgagtctgtcttggcggtggtggcagcagtgttgaaactggggaacattgagttcaagcccgaatctcgagtgaatggtctagatgaaagcaaaatcaaagataaaaatgagttaaaagaaatttgtgaattgaccggcattgatcaatcagttctagaacgagcattcagtttccgaacagttgaggccaaacaggagaaagtttcaactacactgaatgtggctcaggcttattatgcccgtgatgctctggctaaaaacctctacagcaggttgttttcatggttggtaaatcgaatcaatgaaagcattaaggcacaaacaaaagtgagaaagaaggtcatgggtgttctggacatttatggctttgagattttcgaggacaacagctttgagcagttcattattaattattgtaacgaaaagctgcaacaaatcttcattgaacttactcttaaagaagagcaggaggagtatatacgggaggatatagaatggactcacattgactacttcaataatgctatcatttgtgacctaatagaaaataacacaaatggaatcctggccatgctggatgaagagtgcctcagacctggcacagtcactgatgagaccttcttagaaaagctgaaccaagtatgtgccacccaccagcattttgagagcaggatgagcaagtgctctcggttcctcaatgacacgtctctgcctcacagctgcttcaggatccagcattatgctggaaaggtgctgtaccaggtggaaggattcgttgacaaaaacaatgaccttctctatcgagacctgtcccaagccatgtggaaggccagccatgccctcatcaagtctttgttccccgaagggaatcccgccaagatcaacctgaaaaggcctcctacagcaggctcacagttcaaggcatccgtggccactctgatgaaaaacctacagaccaagaacccaaactatattaggtgtatcaaaccgaatgataaaaaagcagcacacatcttcaacgaggctctagtgtgtcatcagatcaggtacctggggcttttggagaacgtccgagtgcggagggcaggctacgccttcaggcaggcctatgaaccttgcctagaaagatacaaaatgctttgtaaacaaacatggcctcattggaaaggaccagccaggtctggtgtggaggtcctatttaatgaattagaaattcccgtggaagaatactcctttggtagatcaaagatattcatccgaaacccaagaacattattcaaattagaagacctgaggaagcaacgcctggaggacttggccactctcattcagaagatatatcgggggtggaaatgccgcacacacttcctgctaatgaaaaaaagccaaattgtgattgccgcctggtacaggagatatgcgcaacaaaagaggtaccagcagacaaagagttccgccttagtaattcagtcttatatccggggttggaaggctcgaaaaattctgcgggaactgaagcatcaaaagcgctgtaaggaagcagtcacgaccattgctgcatattggcatgggacccaggcacgaagggaactgagacggctgaaggaggaggctaggaataaacatgctattgcagttatttgggcttactggcttggatctaaggctcgaagggaattgaaacgcttgaaggaggaggctaggcgtaagcatgcagttgctgtcatttgggcttactggcttggactgaaggtacgtagagaatacaggaaattcttcagagccaatgctggaaagaaaatctatgagtttacgcttcagagaattgtgcaaaaatacttcttggaaatgaaaaataagatgccttccttatctccaatagacaagaattggccctcaagaccttacttattcttggattctactcacaaggagctaaaaaggattttccacttgtggaggtgtaaaaaatacagggaccaattcacagaccagcagaaacttatttatgaagagaaactagaagccagtgaactcttcaaagacaagaaggctttatacccatctagtgttgggcaaccattccaaggggcttacctggaaatcaacaagaaccccaagtataagaaactcaaagatgccattgaagaaaagatcatcattgctgaagtcgtgaacaaaattaaccgtgctaatgggaagagtacatctcggattttcctcttaacaaacaataatctccttcttgctgaccaaaagtctggacaaatcaagtcagaggttccattggtggatgtgaccaaggtatcaatgagctcacaaaatgatggcttcttcgccgtccacctcaaagagggctcagaagcagctagtaaaggagactttctcttcagcagtgatcacctgattgaaatggccaccaagctctatcgcacaactctcagccaaaccaaacagaagctcaatattgagatttccgatgagttcctggtacagttcagacaggacaaagtatgtgtgaagtttattcagggaaaccagaaaaatgggagtgtcccaacatgtaaacgaaaaaacaaccgtctccttgaagttgctgtcccttaactggcgcctcctctctactttcatggacttgttcctttgtaatagtgcaatttggttttgttttatttggggttcattgtatgtttgggaatcaccaaaggcttttagagttctttggcaaaataaaaatatttgactaatcaatttttattattggaatagttttaacctttcaaatacatgttctgtcctggagcaggattgtagaaactaacagtgtctattttcatgtctgatgtgttcttcctttagtcatcatgttaggtctgtgtaccctaaatcagcatattactcataaatcattaattaatataagcataggaaatggtcttaaaagatactgcattcattcatcagatatttattccatgcctactctatgctaggcactgtgctagatggtatgaaaacttattaggaacctttttgtttttgagaccattgcattctggctggtttgtgctggtttaacgacatctaagaaggtttagaaatggtgagaccaaaacaataactgttaatgatggacagcattattaggaaccctgtagtatgatatttaacaatataggcttcaagaagggctggtcctaagagggggcagaaatgaatgaccaggttaaatccctctacatgtggtttctgtttgaaaaaaagaaaactgacatttgaacaggacttttaatttgtttaaaactctggtaattacttgtaacagtagaaaatagaagtcattcttattttagaaaaagtgacagaagcagtccagtaagattatatgtttctgtttctggtaaataccatatatgatcctcgaaatgataatatctccagaatattgttttcacccaaatttgagtagatattttaaacacctaacaaagtaaagggctaaaagccattcagatagcagtaaaacattctgtatgatgtgcaataaaacatccaagatcttttttgaaagttttatttataatatacatttttgtatgagaaaggtgattggtacagggtgcctattttagtcatggatcaaaatttgtgtaacttgcagggctttctttctttttcttcaaatttacaagggttcattttggaaactacattttaaactttggaatcaaattgtttcttatttgggaggataatgtatatacattggtattatgttaaataataaaattgttctaatttggtgccatttcctgaatcacaactgtatttttgtatctcaagctattttcatatgttgtgtgtcaatgtatcatctctcagaaaggttttacaatccaaacattatatgttctctgtgtaactgaatttcacttatcttttataaaccagaaacattaattgaaaatattttctggggattttctcttgacttgtatttttaaaaattgctcacataaagaagttctcag

SEQ ID NO: 156724 - DNA, 374 bp, Homo sapiens
  Payload ID: 10724
  Gene Symbol: MYO1B
  Gene Name: myosin IB
  ENST ID: ENST00000420448
  CDS Start-End: 124-374
ggaagttaacttttcttaatcgggtttctacaaggtagttcactattgtatgttttatttcttaccaaaacttttcttgggaaaatttgttttattgctccatacgtggtcaagctggagaccatggccaaaatggaggtgaaaacctcacttctggacaatatgattggagttggggatatggttcttttagaacctctcaatgaggagaccttcatcaacaacctcaagaagcgctttgaccacagtgaaatatacacatacattggaagtgtggttatatctgttaacccataccggtctttacccatttattcaccagagaaagtggaagaatacaggaacagaaatttttatgaactgagccctcacat

SEQ ID NO: 156725 - DNA, 1310 bp, Homo sapiens
  Payload ID: 10724
  Gene Symbol: MYO1B
  Gene Name: myosin IB
  ENST ID: ENST00000451437
  CDS Start-End: 400-1310
tttcctcagttagattgcacatgcatgagaagcagtagatgtgtctctcattctttcttctttcattgcctgctaagtactgtttgtataccagtagcatgggtcagagtgggaggttgtcaacagaagagtccagcatgtatccatgatggactctcgatcaactttatatgattaactcatataaaacagccctgtatggaagctgaggctgcctcttcctagccacaggatattgacctactttccccttcttatctgcttgcaaaatatttgttgtacttagtgtgttctccctgtcacaacgaatgtttgtctctctctttcatatgaactgaaggctaaagtgctagttaaatcagtggaaaaagcaatggagaagaaaagttgctggagaccatggccaaaatggaggtgaaaacctcacttctggacaatatgattggagttggggatatggttcttttagaacctctcaatgaggagaccttcatcaacaacctcaagaagcgctttgaccacagtgaaatatacacatacattggaagtgtggttatatctgttaacccataccggtctttacccatttattcaccagagaaagtggaagaatacaggaacagaaatttttatgaactgagccctcacatctttgccctttcggatgaagcatacagatccctacgagatcaagataaggaccaatgtattctcattactggggaaagtggagcaggaaaaacagaggccagtaagcttgtcatgtcctatgtggcagctgtttgtggaaaaggagcagaagttaatcaagttaaagaacagcttttacagtccaacccggtcctggaagcttttggaaatgccaaaactgtaaggaatgacaactcctctagatttggcaaatatatggatattgaatttgactttaaaggcgatccactaggaggagtaataagtaactatcttttagagaaatctcgggttgttaaacagccaagaggtgaaagaaacttccatgtgttctatcagctgctctctggtgcctctgaagagctcctcaataaacttaagcttgagagggatttcagcaggtataactacctgagtctggattcggccaaagtgaatggagtggatgatgcagcaaattttagaaccgtgcggaatgccatgcagattgtgggctttatggatcatgaagctgagtctgtcttggcggtggtggcagcagtgttgaaactggggaacattgagttcaagcccgaatctcgagtgaatggtctagatgaaagcaaaatcaaagataaaaa

SEQ ID NO: 156726 - DNA, 542 bp, Homo sapiens
  Payload ID: 10724
  Gene Symbol: MYO1B
  Gene Name: myosin IB
  ENST ID: ENST00000438652
  CDS Start-End: 95-542
agagacgggagctacgaagggtggtggggccgggaagagagttggggagagggttgggagagggtgatgagagcgcgctggagagctggagaccatggccaaaatggaggtgaaaacctcacttctggacaatatgattggagttggggatatggttcttttagaacctctcaatgaggagaccttcatcaacaacctcaagaagcgctttgaccacagtgaaatatacacatacattggaagtgtggttatatctgttaacccataccggtctttacccatttattcaccagagaaagtggaagaatacaggaacagaaatttttatgaactgagccctcacatctttgccctttcggatgaagcatacagatccctacgagatcaagataaggaccaatgtattctcattactggggaaagtggagcaggaaaaacagaggccagtaagcttgtcatgtcctatgtggcagctgtttgtggaaaaggagcagaagttaatcaagttaaagaacagcttttacagtccaacccggtcctgg

SEQ ID NO: 156727 - DNA, 572 bp, Homo sapiens
  Payload ID: 10724
  Gene Symbol: MYO1B
  Gene Name: myosin IB
  ENST ID: ENST00000418908
  CDS Start-End: 83-572
aaacccgcaaggcgcggaggccgccgcgacgctcaccggggggcgctgtgaagccggcaccgggcggacagagctggagaccatggccaaaatggaggtgaaaacctcacttctggacaatatgattggagttggggatatggttcttttagaacctctcaatgaggagaccttcatcaacaacctcaagaagcgctttgaccacagtgaaatatacacatacattggaagtgtggttatatctgttaacccataccggtctttacccatttattcaccagagaaagtggaagaatacaggaacagaaatttttatgaactgagccctcacatctttgccctttcggatgaagcatacagatccctacgagatcaagataaggaccaatgtattctcattactggggaaagtggagcaggaaaaacagaggccagtaagcttgtcatgtcctatgtggcagctgtttgtggaaaaggagcagaagttaatcaagttaaagaacagcttttacagtccaacccggtcctggaagcttttggaaatgccaaaactgtaaggaatgacaactcct

SEQ ID NO: 156728 - DNA, 791 bp, Homo sapiens
  Payload ID: 10724
  Gene Symbol: MYO1B
  Gene Name: myosin IB
  ENST ID: ENST00000427152
  CDS Start-End: 1-577
gtgtaaaaaatacagggaccaattcacagaccagcagaaacttatttatgaagagaaactagaagccagtgaactcttcaaagacaagaaggctttatacccatctagtgttgggcaaccattccaaggggcttacctggaaatcaacaagaaccccaagtataagaaactcaaagatgccattgaagaaaagatcatcattgctgaagtcgtgaacaaaattaaccgtgctaatgggaagagtacatctcggattttcctcttaacaaacaataatctccttcttgctgaccaaaagtctggacaaatcaagtcagaggttccattggtggatgtgaccaaggtatcaatgagctcacaaaatgatggcttcttcgccgtccacctcaaagagggctcagaagcagctagtaaaggagactttctcttcagcagtgatcacctgattgaaatggccaccaagctctatcgcacaactctcagccaaaccaaacagaagctcaatattgagatttccgatgagtacgttcatgtattgtttgaaaaccctttttctctttcagcttttttgttttagttcagctctcgatctcattcattaatacaactacttattaagtaccaggtatgtgtctagtagttgttccacatgataaatgggcagtgaatgacactgaccaagtctccaacctcatgtacctgacatcctagtggaagagaccagtatgtacaaataaaatgatgaaatagttgataagattttggctaacaagtgtttatggaggaaaaaa

SEQ ID NO: 156729 - DNA, 567 bp, Homo sapiens
  Payload ID: 10724
  Gene Symbol: MYO1B
  Gene Name: myosin IB
  ENST ID: ENST00000634375
  CDS Start-End: 1-567
tggctaaaaacctctacagcaggttgttttcatggttggtaaatcgaatcaatgaaagcattaaggcacaaacaaaagtgagaaagaaggtcatgggtgttctggacatttatggctttgagattttcgagaatgcagacaacagctttgagcagttcattattaattattgtaacgaaaagctgcaacaaatcttcattgaacttactcttaaagaagagcaggaggagtatatacgggaggatatagaatggactcacattgactacttcaataatgctatcatttgtgacctaatagaaaataacacaaatggaatcctggccatgctggatgaagagtgcctcagacctggcacagtcactgatgagaccttcttagaaaagctgaaccaagtatgtgccacccaccagcattttgagagcaggatgagcaagtgctctcggttcctcaatgacacgtctctgcctcacagctgcttcaggatccagcattatgctggaaaggtgctgtaccaggtggaaggattcgttgacaaaaacaatgaccttctctatcgagacctgt

SEQ ID NO: 156730 - DNA, 5145 bp, Homo sapiens
  Payload ID: 10725
  Gene Symbol: MYO1C
  Gene Name: myosin IC
  Uniprot ID: O00159
  ENST ID: ENST00000359786
  CDS Start-End: 326-3517
ggagcccagggtcccccatgggtggctgcatcggctcctctggttacctgggacaacaggcatttcctccatccccagcccctcctcttcctgctccaaccatccgggccaagaggcctcccagtcagacctggacggctccagccgtgtcctgaggagctggaccagccacatcccctggggctgcagttgaagcagaaccaagtggccatcccggcgttagaccgtaggttcctggtcccggagtggtcggagcccgccagtgggcaggcagctcttgctcacaggccgcggtgcccaggccgctggctctccgcagggcggaatggcgctgcaagtggagctggtacccaccggggagatcatccgcgtggttcatccccacaggccctgcaagcttgccctgggcagtgacggggttcgggtgaccatggagagtgcgctcaccgcccgtgaccgggtgggggtgcaggatttcgtgctgctggagaacttcaccagcgaggccgccttcatcgagaacctgcggcggcgatttcgggagaatctcatctacacctacattggccccgtcctggtctctgtcaatccctaccgggacctgcagatctacagccggcagcatatggagcgttaccgtggcgtcagcttctatgaagtgccccctcacctgtttgccgtggcggacactgtgtaccgagcactgcgcacggagcgtcgggaccaggctgtgatgatctctggggagagcggggcaggcaagaccgaggccaccaagaggctgctgcagttctatgcagagacctgcccagcccccgagcgcggaggtgccgtgcgggaccggctgctacagagcaacccggtgctggaggcctttggaaatgccaagaccctccggaacgataactccagcaggttcgggaagtacatggatgtgcagtttgacttcaagggtgcccccgtgggtggccacatcctcagttacctcctggaaaagtcacgagtggtgcaccagaatcatggggagcggaacttccacatcttctaccagctgctggaggggggcgaggaggagactcttcgcaggctgggcttggaacggaacccccagagctacctgtacctggtgaagggccagtgtgccaaagtctcctccatcaacgacaagagtgactggaaggtcgtcaggaaggctctgacagtcattgatttcaccgaggatgaagtggaggacctgctgagcatcgtggccagcgtccttcatttgggcaacatccactttgctgccaacgaggagagcaatgcccaggtcaccaccgagaaccagctcaagtatctgaccaggctcctcagcgtggaaggctcgacgctgcgagaagccctgacacacaggaagatcatcgccaagggggaggagctcctgagcccgctgaacctggagcaggccgcgtacgcacgagacgccctcgccaaggctgtgtacagccgcacttttacctggctcgtcgggaagatcaacaggtcgctggcctccaaggacgtggagagccccagctggcggagcaccacggttctcgggctcctggatatttatggctttgaagtgtttcagcataacagctttgagcagttctgcatcaattactgcaacgagaagctgcagcagctcttcatcgagctcacgctcaagtcggagcaggaggagtacgaggcagagggcatcgcgtgggagcccgtccagtatttcaacaacaaaatcatctgtgatctggtggaggagaagtttaagggcatcatctcgattttggatgaggagtgtctgcgccccggggaggccacagacctgaccttcctggagaagctggaggatactgtcaagcaccatccacacttcctgacgcacaagctggctgaccagcggaccaggaaatctctgggccgaggggaattccgccttctgcactatgcgggggaggtgacctacagcgtgaccgggtttctggacaaaaacaatgaccttctcttccggaaccttaaggagaccatgtgtagctcaaagaatcccattatgagccagtgctttgaccggagcgagctcagtgacaagaagcggccagagacggtcgccacccagttcaagatgagcctcctgcagctggtggagatcctgcagtctaaggagcccgcctacgtccgctgcatcaaacccaatgatgccaaacagcccggccgctttgacgaggtgctgatccgccaccaggtgaagtacctggggctgttggaaaacctgcgcgtgcgcagagccggctttgcctatcgccgcaaatacgaagctttcctgcaaaggtacaagtcactgtgcccagagacgtggcccacgtgggcaggacggccgcaggatggggtggctgtgctggtccgacacctgggctacaagccagaagagtacaagatgggcaggaccaagatcttcatccgcttccccaagaccctgtttgccacagaggatgccctggaggtccggcggcagagcctggccacaaagatccaagctgcctggaggggctttcactggcggcagaaattcctccgggtgaagagatcagccatctgcatccagtcgtggtggcgtggaacactgggccggaggaaggcagccaagaggaagtgggcggcacagaccatccggcggctcatccgaggcttcgtcctgcgccacgccccccgctgccccgagaacgccttcttcctggaccatgtgcgcacctcttttttgctaaacctgaggcggcagctgccccagaatgtcctggacacctcgtggcccacgcccccacctgccctgcgtgaggcctcagagcttctgcgggagttgtgcataaagaacatggtgtggaaatactgccggagtatcagccctgagtggaagcagcagctgcagcagaaggccgtggctagtgagatcttcaagggcaagaaggataattaccctcagagtgtacccaggctcttcatcagcactcggcttggtacagatgagatcagcccccgagtgctgcaggccttgggctctgagcccattcagtatgcggtgcctgttgtgaaatacgaccgcaagggctacaagcctcgctcccggcagctgctgctcacgcccaacgccgtcgtcatcgtggaggacgccaaagtcaagcagaggattgattacgccaacctgaccggaatctctgtcagcagcctgagcgacagtctttttgtgcttcatgtacagcgtgcggacaataagcaaaagggagatgtggtgctgcagagtgaccacgtgattgagacgctgaccaagacagccctcagtgccaaccgcgtgaacagcatcaacatcaaccagggcagcatcacgtttgcagggggccccggcagggatggcaccattgacttcacacccggctcggagctgctcatcaccaaggccaagaacgggcacctggctgtggtcgccccacggctgaattctcggtgataaaggcgcccactggaccctcccaacgcccaatgctttgcttttctcctcctccccttcccagttaccaaagactcgaacttccagacagggacccagggacaccccgaagcccacctgcaatctcccacctcctgcccatccctctcttgagggagcagcaggggccaggagctaccccaggagtgggccaggccgggccacagcaataggaaagccagggccagagcgagccatgccagccctactgccgatgccaaatatttgagagaagggaacttttgctgaggttttctctgaggtttttttgatgctttataggaaactattttttaaaaaaagccatttcccacccaaggacacagtggatgtgttttccctgactccagcagggcaaggaatgtagccgagaggttgtgtgggctgggctctggtgccctcttccctggccaggacacctctcctcctgattcccttggcaccttgtctttctgtctgtttacctgtctccctgcctgcccatctgcatcttttgcagcccactctgacttccatctgggggctgagaccacccttgcctgcccccttctttctgccttaagaatgtccttttaggctgggcatggtggctcacgcctgtaaccccagcactttgggaggcggagacgggcagataacctgaggtcaggatttcgagaccaacctgacctacatggagaaactccgcctctagtaaaaatacaaaattagccgggcatggtggtgcacgcctctaatcccagctactcgggaggctgaggcaggagaatcacttgaacccgggaagtggaggttgcagtgagccaagagtacaccactgcactccagcctgggcaacagagcgagactccgtcttaaaaaaaaaaaaaaagaacgcccttttactgtcctcatcatcccagtttgaggcagtgctggagtggggaaggccgtcttagaccatagaggttggaagacgctgagagatcatccagcccagccccttgatgttacagagcagaagacagatgcccaaacaggagaaggcacttgcccacggtcatacggcaggttgccacaaaaccaagatggcagcccttcctcagcgtgcctcactgccactcccagagccagggagccccataaaacccacatcatgtcttaagagtatatctggctccttgaccagcaatcggccctgggagccaccaggtgggaaaagcgcctctgccagagtccaggccttgggatgacagacagcttgcccgcacactcgggccccactcaaggatgtagggccttttctggcccctgacccctccctggcatgggagcgtggggacggggctggccttgggaggagcggcaggggcatcacctccttctgctgcttctccctgctcctaccctcaagggcctgggggctgcccagctgcctctatgcccttctgggggtctcagcccactgctgacacttctgcaatccagagaaacactaaataaagcaatacgtgtttgccaatgtggtctccttatgaatattaggaaacgaagagggccccggaaggcaaccaagggcctcgtgttgcaggtttttctcgagacagtct

SEQ ID NO: 156731 - DNA, 4734 bp, Homo sapiens
  Payload ID: 10725
  Gene Symbol: MYO1C
  Gene Name: myosin IC
  Uniprot ID: O00159
  ENST ID: ENST00000361007
  CDS Start-End: 110-3196
agagtgcgcccgggccgcggatccccaagcccgccacgccgcccagcccggccccgcccgcgccggaagagccacgccggccctgggcagtgacggggttcgggtgaccatggagagtgcgctcaccgcccgtgaccgggtgggggtgcaggatttcgtgctgctggagaacttcaccagcgaggccgccttcatcgagaacctgcggcggcgatttcgggagaatctcatctacacctacattggccccgtcctggtctctgtcaatccctaccgggacctgcagatctacagccggcagcatatggagcgttaccgtggcgtcagcttctatgaagtgccccctcacctgtttgccgtggcggacactgtgtaccgagcactgcgcacggagcgtcgggaccaggctgtgatgatctctggggagagcggggcaggcaagaccgaggccaccaagaggctgctgcagttctatgcagagacctgcccagcccccgagcgcggaggtgccgtgcgggaccggctgctacagagcaacccggtgctggaggcctttggaaatgccaagaccctccggaacgataactccagcaggttcgggaagtacatggatgtgcagtttgacttcaagggtgcccccgtgggtggccacatcctcagttacctcctggaaaagtcacgagtggtgcaccagaatcatggggagcggaacttccacatcttctaccagctgctggaggggggcgaggaggagactcttcgcaggctgggcttggaacggaacccccagagctacctgtacctggtgaagggccagtgtgccaaagtctcctccatcaacgacaagagtgactggaaggtcgtcaggaaggctctgacagtcattgatttcaccgaggatgaagtggaggacctgctgagcatcgtggccagcgtccttcatttgggcaacatccactttgctgccaacgaggagagcaatgcccaggtcaccaccgagaaccagctcaagtatctgaccaggctcctcagcgtggaaggctcgacgctgcgagaagccctgacacacaggaagatcatcgccaagggggaggagctcctgagcccgctgaacctggagcaggccgcgtacgcacgagacgccctcgccaaggctgtgtacagccgcacttttacctggctcgtcgggaagatcaacaggtcgctggcctccaaggacgtggagagccccagctggcggagcaccacggttctcgggctcctggatatttatggctttgaagtgtttcagcataacagctttgagcagttctgcatcaattactgcaacgagaagctgcagcagctcttcatcgagctcacgctcaagtcggagcaggaggagtacgaggcagagggcatcgcgtgggagcccgtccagtatttcaacaacaaaatcatctgtgatctggtggaggagaagtttaagggcatcatctcgattttggatgaggagtgtctgcgccccggggaggccacagacctgaccttcctggagaagctggaggatactgtcaagcaccatccacacttcctgacgcacaagctggctgaccagcggaccaggaaatctctgggccgaggggaattccgccttctgcactatgcgggggaggtgacctacagcgtgaccgggtttctggacaaaaacaatgaccttctcttccggaaccttaaggagaccatgtgtagctcaaagaatcccattatgagccagtgctttgaccggagcgagctcagtgacaagaagcggccagagacggtcgccacccagttcaagatgagcctcctgcagctggtggagatcctgcagtctaaggagcccgcctacgtccgctgcatcaaacccaatgatgccaaacagcccggccgctttgacgaggtgctgatccgccaccaggtgaagtacctggggctgttggaaaacctgcgcgtgcgcagagccggctttgcctatcgccgcaaatacgaagctttcctgcaaaggtacaagtcactgtgcccagagacgtggcccacgtgggcaggacggccgcaggatggggtggctgtgctggtccgacacctgggctacaagccagaagagtacaagatgggcaggaccaagatcttcatccgcttccccaagaccctgtttgccacagaggatgccctggaggtccggcggcagagcctggccacaaagatccaagctgcctggaggggctttcactggcggcagaaattcctccgggtgaagagatcagccatctgcatccagtcgtggtggcgtggaacactgggccggaggaaggcagccaagaggaagtgggcggcacagaccatccggcggctcatccgaggcttcgtcctgcgccacgccccccgctgccccgagaacgccttcttcctggaccatgtgcgcacctcttttttgctaaacctgaggcggcagctgccccagaatgtcctggacacctcgtggcccacgcccccacctgccctgcgtgaggcctcagagcttctgcgggagttgtgcataaagaacatggtgtggaaatactgccggagtatcagccctgagtggaagcagcagctgcagcagaaggccgtggctagtgagatcttcaagggcaagaaggataattaccctcagagtgtacccaggctcttcatcagcactcggcttggtacagatgagatcagcccccgagtgctgcaggccttgggctctgagcccattcagtatgcggtgcctgttgtgaaatacgaccgcaagggctacaagcctcgctcccggcagctgctgctcacgcccaacgccgtcgtcatcgtggaggacgccaaagtcaagcagaggattgattacgccaacctgaccggaatctctgtcagcagcctgagcgacagtctttttgtgcttcatgtacagcgtgcggacaataagcaaaagggagatgtggtgctgcagagtgaccacgtgattgagacgctgaccaagacagccctcagtgccaaccgcgtgaacagcatcaacatcaaccagggcagcatcacgtttgcagggggccccggcagggatggcaccattgacttcacacccggctcggagctgctcatcaccaaggccaagaacgggcacctggctgtggtcgccccacggctgaattctcggtgataaaggcgcccactggaccctcccaacgcccaatgctttgcttttctcctcctccccttcccagttaccaaagactcgaacttccagacagggacccagggacaccccgaagcccacctgcaatctcccacctcctgcccatccctctcttgagggagcagcaggggccaggagctaccccaggagtgggccaggccgggccacagcaataggaaagccagggccagagcgagccatgccagccctactgccgatgccaaatatttgagagaagggaacttttgctgaggttttctctgaggtttttttgatgctttataggaaactattttttaaaaaaagccatttcccacccaaggacacagtggatgtgttttccctgactccagcagggcaaggaatgtagccgagaggttgtgtgggctgggctctggtgccctcttccctggccaggacacctctcctcctgattcccttggcaccttgtctttctgtctgtttacctgtctccctgcctgcccatctgcatcttttgcagcccactctgacttccatctgggggctgagaccacccttgcctgcccccttctttctgccttaagaatgtccttttaggctgggcatggtggctcacgcctgtaaccccagcactttgggaggcggagacgggcagataacctgaggtcaggatttcgagaccaacctgacctacatggagaaactccgcctctagtaaaaatacaaaattagccgggcatggtggtgcacgcctctaatcccagctactcgggaggctgaggcaggagaatcacttgaacccgggaagtggaggttgcagtgagccaagagtacaccactgcactccagcctgggcaacagagcgagactccgtcttaaaaaaaaaaaaaaagaacgcccttttactgtcctcatcatcccagtttgaggcagtgctggagtggggaaggccgtcttagaccatagaggttggaagacgctgagagatcatccagcccagccccttgatgttacagagcagaagacagatgcccaaacaggagaaggcacttgcccacggtcatacggcaggttgccacaaaaccaagatggcagcccttcctcagcgtgcctcactgccactcccagagccagggagccccataaaacccacatcatgtcttaagagtatatctggctccttgaccagcaatcggccctgggagccaccaggtgggaaaagcgcctctgccagagtccaggccttgggatgacagacagcttgcccgcacactcgggccccactcaaggatgtagggccttttctggcccctgacccctccctggcatgggagcgtggggacggggctggccttgggaggagcggcaggggcatcacctccttctgctgcttctccctgctcctaccctcaagggcctgggggctgcccagctgcctctatgcccttctgggggtctcagcccactgctgacacttctgcaatccagagaaacactaaataaagcaatacgtgtttgcc

SEQ ID NO: 156732 - DNA, 4898 bp, Homo sapiens
  Payload ID: 10725
  Gene Symbol: MYO1C
  Gene Name: myosin IC
  Uniprot ID: O00159
  ENST ID: ENST00000438665
  CDS Start-End: 224-3358
ggaccccccgccccgacacccccacctccaccaaccccacctggaggggaccccagcccggccgcgcgggaggcgggggaggccggggaagccccgcgcttcaggggcccgggtgggggcggtgcggggggcgggccctccctcgctgacgccgccgccaccgccgccgagcccgggacccggagcgcgggcagcggagcgggcgccaggccggccgggcaggatgcgctaccgggcgtcggccctgggcagtgacggggttcgggtgaccatggagagtgcgctcaccgcccgtgaccgggtgggggtgcaggatttcgtgctgctggagaacttcaccagcgaggccgccttcatcgagaacctgcggcggcgatttcgggagaatctcatctacacctacattggccccgtcctggtctctgtcaatccctaccgggacctgcagatctacagccggcagcatatggagcgttaccgtggcgtcagcttctatgaagtgccccctcacctgtttgccgtggcggacactgtgtaccgagcactgcgcacggagcgtcgggaccaggctgtgatgatctctggggagagcggggcaggcaagaccgaggccaccaagaggctgctgcagttctatgcagagacctgcccagcccccgagcgcggaggtgccgtgcgggaccggctgctacagagcaacccggtgctggaggcctttggaaatgccaagaccctccggaacgataactccagcaggttcgggaagtacatggatgtgcagtttgacttcaagggtgcccccgtgggtggccacatcctcagttacctcctggaaaagtcacgagtggtgcaccagaatcatggggagcggaacttccacatcttctaccagctgctggaggggggcgaggaggagactcttcgcaggctgggcttggaacggaacccccagagctacctgtacctggtgaagggccagtgtgccaaagtctcctccatcaacgacaagagtgactggaaggtcgtcaggaaggctctgacagtcattgatttcaccgaggatgaagtggaggacctgctgagcatcgtggccagcgtccttcatttgggcaacatccactttgctgccaacgaggagagcaatgcccaggtcaccaccgagaaccagctcaagtatctgaccaggctcctcagcgtggaaggctcgacgctgcgagaagccctgacacacaggaagatcatcgccaagggggaggagctcctgagcccgctgaacctggagcaggccgcgtacgcacgagacgccctcgccaaggctgtgtacagccgcacttttacctggctcgtcgggaagatcaacaggtcgctggcctccaaggacgtggagagccccagctggcggagcaccacggttctcgggctcctggatatttatggctttgaagtgtttcagcataacagctttgagcagttctgcatcaattactgcaacgagaagctgcagcagctcttcatcgagctcacgctcaagtcggagcaggaggagtacgaggcagagggcatcgcgtgggagcccgtccagtatttcaacaacaaaatcatctgtgatctggtggaggagaagtttaagggcatcatctcgattttggatgaggagtgtctgcgccccggggaggccacagacctgaccttcctggagaagctggaggatactgtcaagcaccatccacacttcctgacgcacaagctggctgaccagcggaccaggaaatctctgggccgaggggaattccgccttctgcactatgcgggggaggtgacctacagcgtgaccgggtttctggacaaaaacaatgaccttctcttccggaaccttaaggagaccatgtgtagctcaaagaatcccattatgagccagtgctttgaccggagcgagctcagtgacaagaagcggccagagacggtcgccacccagttcaagatgagcctcctgcagctggtggagatcctgcagtctaaggagcccgcctacgtccgctgcatcaaacccaatgatgccaaacagcccggccgctttgacgaggtgctgatccgccaccaggtgaagtacctggggctgttggaaaacctgcgcgtgcgcagagccggctttgcctatcgccgcaaatacgaagctttcctgcaaaggtacaagtcactgtgcccagagacgtggcccacgtgggcaggacggccgcaggatggggtggctgtgctggtccgacacctgggctacaagccagaagagtacaagatgggcaggaccaagatcttcatccgcttccccaagaccctgtttgccacagaggatgccctggaggtccggcggcagagcctggccacaaagatccaagctgcctggaggggctttcactggcggcagaaattcctccgggtgaagagatcagccatctgcatccagtcgtggtggcgtggaacactgggccggaggaaggcagccaagaggaagtgggcggcacagaccatccggcggctcatccgaggcttcgtcctgcgccacgccccccgctgccccgagaacgccttcttcctggaccatgtgcgcacctcttttttgctaaacctgaggcggcagctgccccagaatgtcctggacacctcgtggcccacgcccccacctgccctgcgtgaggcctcagagcttctgcgggagttgtgcataaagaacatggtgtggaaatactgccggagtatcagccctgagtggaagcagcagctgcagcagaaggccgtggctagtgagatcttcaagggcaagaaggataattaccctcagagtgtacccaggctcttcatcagcactcggcttggtacagatgagatcagcccccgagtgctgcaggccttgggctctgagcccattcagtatgcggtgcctgttgtgaaatacgaccgcaagggctacaagcctcgctcccggcagctgctgctcacgcccaacgccgtcgtcatcgtggaggacgccaaagtcaagcagaggattgattacgccaacctgaccggaatctctgtcagcagcctgagcgacagtctttttgtgcttcatgtacagcgtgcggacaataagcaaaagggagatgtggtgctgcagagtgaccacgtgattgagacgctgaccaagacagccctcagtgccaaccgcgtgaacagcatcaacatcaaccagggcagcatcacgtttgcagggggccccggcagggatggcaccattgacttcacacccggctcggagctgctcatcaccaaggccaagaacgggcacctggctgtggtcgccccacggctgaattctcggtgataaaggcgcccactggaccctcccaacgcccaatgctttgcttttctcctcctccccttcccagttaccaaagactcgaacttccagacagggacccagggacaccccgaagcccacctgcaatctcccacctcctgcccatccctctcttgagggagcagcaggggccaggagctaccccaggagtgggccaggccgggccacagcaataggaaagccagggccagagcgagccatgccagccctactgccgatgccaaatatttgagagaagggaacttttgctgaggttttctctgaggtttttttgatgctttataggaaactattttttaaaaaaagccatttcccacccaaggacacagtggatgtgttttccctgactccagcagggcaaggaatgtagccgagaggttgtgtgggctgggctctggtgccctcttccctggccaggacacctctcctcctgattcccttggcaccttgtctttctgtctgtttacctgtctccctgcctgcccatctgcatcttttgcagcccactctgacttccatctgggggctgagaccacccttgcctgcccccttctttctgccttaagaatgtccttttaggctgggcatggtggctcacgcctgtaaccccagcactttgggaggcggagacgggcagataacctgaggtcaggatttcgagaccaacctgacctacatggagaaactccgcctctagtaaaaatacaaaattagccgggcatggtggtgcacgcctctaatcccagctactcgggaggctgaggcaggagaatcacttgaacccgggaagtggaggttgcagtgagccaagagtacaccactgcactccagcctgggcaacagagcgagactccgtcttaaaaaaaaaaaaaaagaacgcccttttactgtcctcatcatcccagtttgaggcagtgctggagtggggaaggccgtcttagaccatagaggttggaagacgctgagagatcatccagcccagccccttgatgttacagagcagaagacagatgcccaaacaggagaaggcacttgcccacggtcatacggcaggttgccacaaaaccaagatggcagcccttcctcagcgtgcctcactgccactcccagagccagggagccccataaaacccacatcatgtcttaagagtatatctggctccttgaccagcaatcggccctgggagccaccaggtgggaaaagcgcctctgccagagtccaggccttgggatgacagacagcttgcccgcacactcgggccccactcaaggatgtagggccttttctggcccctgacccctccctggcatgggagcgtggggacggggctggccttgggaggagcggcaggggcatcacctccttctgctgcttctccctgctcctaccctcaagggcctgggggctgcccagctgcctctatgcccttctgggggtctcagcccactgctgacacttctgcaatccagagaaacactaaataaagcaatacgtgtttgccaa

SEQ ID NO: 156733 - DNA, 3676 bp, Homo sapiens
  Payload ID: 10725
  Gene Symbol: MYO1C
  Gene Name: myosin IC
  ENST ID: ENST00000545534
  CDS Start-End: 244-3363
gcccccggccagaaatctgggcctttcgtggtcagaggacaccggcggcccctttgggatccacccccaatcaccaccaccttgttcttctctgaccctggatactctgggtgtccattttttggagccctgagaccctgtttgaagagggatccatctcagccctggttgtggggcgagggtcttgctcagcctgcaccaccctccaccctccagtaggacccagaggcagctgggctttccatggccctgggcagtgacggggttcgggtgaccatggagagtgcgctcaccgcccgtgaccgggtgggggtgcaggatttcgtgctgctggagaacttcaccagcgaggccgccttcatcgagaacctgcggcggcgatttcgggagaatctcatctacacctacattggccccgtcctggtctctgtcaatccctaccgggacctgcagatctacagccggcagcatatggagcgttaccgtggcgtcagcttctatgaagtgccccctcacctgtttgccgtggcggacactgtgtaccgagcactgcgcacggagcgtcgggaccaggctgtgatgatctctggggagagcggggcaggcaagaccgaggccaccaagaggctgctgcagttctatgcagagacctgcccagcccccgagcgcggaggtgccgtgcgggaccggctgctacagagcaacccggtgctggaggcctttggaaatgccaagaccctccggaacgataactccagcaggttcgggaagtacatggatgtgcagtttgacttcaagggtgcccccgtgggtggccacatcctcagttacctcctggaaaagtcacgagtggtgcaccagaatcatggggagcggaacttccacatcttctaccagctgctggaggggggcgaggaggagactcttcgcaggctgggcttggaacggaacccccagagctacctgtacctggtgaagggccagtgtgccaaagtctcctccatcaacgacaagagtgactggaaggtcgtcaggaaggctctgacagtcattgatttcaccgaggatgaagtggaggacctgctgagcatcgtggccagcgtccttcatttgggcaacatccactttgctgccaacgaggagagcaatgcccaggtcaccaccgagaaccagctcaagtatctgaccaggctcctcagcgtggaaggctcgacgctgcgagaagccctgacacacaggaagatcatcgccaagggggaggagctcctgagcccgctgaacctggagcaggccgcgtacgcacgagacgccctcgccaaggctgtgtacagccgcacttttacctggctcgtcgggaagatcaacaggtcgctggcctccaaggacgtggagagccccagctggcggagcaccacggttctcgggctcctggatatttatggctttgaagtgtttcagcataacagctttgagcagttctgcatcaattactgcaacgagaagctgcagcagctcttcatcgagctcacgctcaagtcggagcaggaggagtacgaggcagagggcatcgcgtgggagcccgtccagtatttcaacaacaaaatcatctgtgatctggtggaggagaagtttaagggcatcatctcgattttggatgaggagtgtctgcgccccggggaggccacagacctgaccttcctggagaagctggaggatactgtcaagcaccatccacacttcctgacgcacaagctggctgaccagcggaccaggaaatctctgggccgaggggaattccgccttctgcactatgcgggggaggtgacctacagcgtgaccgggtttctggacaaaaacaatgaccttctcttccggaaccttaaggagaccatgtgtagctcaaagaatcccattatgagccagtgctttgaccggagcgagctcagtgacaagaagcggccagagacggtcgccacccagttcaagatgagcctcctgcagctggtggagatcctgcagtctaaggagcccgcctacgtccgctgcatcaaacccaatgatgccaaacagcccggccgctttgacgaggtgctgatccgccaccaggtgaagtacctggggctgttggaaaacctgcgcgtgcgcagagccggctttgcctatcgccgcaaatacgaagctttcctgcaaaggtacaagtcactgtgcccagagacgtggcccacgtgggcaggacggccgcaggatggggtggctgtgctggtccgacacctgggctacaagccagaagagtacaagatgggcaggaccaagatcttcatccgcttccccaagaccctgtttgccacagaggatgccctggaggtccggcggcagagcctggccacaaagatccaagctgcctggaggggctttcactggcggcagaaattcctccgggtgaagagatcagccatctgcatccagtcgtggtggcgtggaacactgggccggaggaaggcagccaagaggaagtgggcggcacagaccatccggcggctcatccgaggcttcgtcctgcgccacgccccccgctgccccgagaacgccttcttcctggaccatgtgcgcacctcttttttgctaaacctgaggcggcagctgccccagaatgtcctggacacctcgtggcccacgcccccacctgccctgcgtgaggcctcagagcttctgcgggagttgtgcataaagaacatggtgtggaaatactgccggagtatcagccctgagtggaagcagcagctgcagcagaaggccgtggctagtgagatcttcaagggcaagaaggataattaccctcagagtgtacccaggctcttcatcagcactcggcttggtacagatgagatcagcccccgagtgctgcaggccttgggctctgagcccattcagtatgcggtgcctgttgtgaaatacgaccgcaagggctacaagcctcgctcccggcagctgctgctcacgcccaacgccgtcgtcatcgtggaggacgccaaagtcaagcagaggattgattacgccaacctgaccggaatctctgtcagcagcctgagcgacagtctttttgtgcttcatgtacagcgtgcggacaataagcaaaagggagatgtggtgctgcagagtgaccacgtgattgagacgctgaccaagacagccctcagtgccaaccgcgtgaacagcatcaacatcaaccagggcagcatcacgtttgcagggggccccggcagggatggcaccattgacttcacacccggctcggagctgctcatcaccaaggccaagaacgggcacctggctgtggtcgccccacggctgaattctcggtgataaaggcgcccactggaccctcccaacgcccaatgctttgcttttctcctcctccccttcccagttaccaaagactcgaacttccagacagggacccagggacaccccgaagcccacctgcaatctcccacctcctgcccatccctctcttgagggagcagcaggggccaggagctaccccaggagtgggccaggccgggccacagcaataggaaagccagggccagagcgagccatgccagccctactgccgatgccaaatatttgagagaagggaacttttgctgaggttttctctgaggtttttttgatg

SEQ ID NO: 156734 - DNA, 541 bp, Homo sapiens
  Payload ID: 10725
  Gene Symbol: MYO1C
  Gene Name: myosin IC
  ENST ID: ENST00000571715
  CDS Start-End: 140-541
ccgaaacgttaagtgacttgctcagagtcccaccgcgaggaagaaccagcccagccttttgcagactctagacgtccccgcccctgcccgcggtgggatctgagccaaggccctgggcagtgacggggttcgggtgaccatggagagtgcgctcaccgcccgtgaccgggtgggggtgcaggatttcgtgctgctggagaacttcaccagcgaggccgccttcatcgagaacctgcggcggcgatttcgggagaatctcatctacacctacattggccccgtcctggtctctgtcaatccctaccgggacctgcagatctacagccggcagcatatggagcgttaccgtggcgtcagcttctatgaagtgccccctcacctgtttgccgtggcggacactgtgtaccgagcactgcgcacggagcgtcgggaccaggctgtgatgatctctggggagagcggggcaggcaagaccgaggccaccaagaggctgctgcagttctatgcagagacctgcccagcccccgagcgcggaggtgcc

SEQ ID NO: 156735 - DNA, 4804 bp, Homo sapiens
  Payload ID: 10725
  Gene Symbol: MYO1C
  Gene Name: myosin IC
  Uniprot ID: O00159
  ENST ID: ENST00000575158
  CDS Start-End: 178-3264
gtatttggacattggttctatttttaactttcccgggactcgagttcgggggttgggggaggaaaatcccgcttcctctgggacccgcaggcctcggtgcccgcccagcgcccaggcccgccgcggagtgtagtcccaggcccggaagccctgggcagtgacggggttcgggtgaccatggagagtgcgctcaccgcccgtgaccgggtgggggtgcaggatttcgtgctgctggagaacttcaccagcgaggccgccttcatcgagaacctgcggcggcgatttcgggagaatctcatctacacctacattggccccgtcctggtctctgtcaatccctaccgggacctgcagatctacagccggcagcatatggagcgttaccgtggcgtcagcttctatgaagtgccccctcacctgtttgccgtggcggacactgtgtaccgagcactgcgcacggagcgtcgggaccaggctgtgatgatctctggggagagcggggcaggcaagaccgaggccaccaagaggctgctgcagttctatgcagagacctgcccagcccccgagcgcggaggtgccgtgcgggaccggctgctacagagcaacccggtgctggaggcctttggaaatgccaagaccctccggaacgataactccagcaggttcgggaagtacatggatgtgcagtttgacttcaagggtgcccccgtgggtggccacatcctcagttacctcctggaaaagtcacgagtggtgcaccagaatcatggggagcggaacttccacatcttctaccagctgctggaggggggcgaggaggagactcttcgcaggctgggcttggaacggaacccccagagctacctgtacctggtgaagggccagtgtgccaaagtctcctccatcaacgacaagagtgactggaaggtcgtcaggaaggctctgacagtcattgatttcaccgaggatgaagtggaggacctgctgagcatcgtggccagcgtccttcatttgggcaacatccactttgctgccaacgaggagagcaatgcccaggtcaccaccgagaaccagctcaagtatctgaccaggctcctcagcgtggaaggctcgacgctgcgagaagccctgacacacaggaagatcatcgccaagggggaggagctcctgagcccgctgaacctggagcaggccgcgtacgcacgagacgccctcgccaaggctgtgtacagccgcacttttacctggctcgtcgggaagatcaacaggtcgctggcctccaaggacgtggagagccccagctggcggagcaccacggttctcgggctcctggatatttatggctttgaagtgtttcagcataacagctttgagcagttctgcatcaattactgcaacgagaagctgcagcagctcttcatcgagctcacgctcaagtcggagcaggaggagtacgaggcagagggcatcgcgtgggagcccgtccagtatttcaacaacaaaatcatctgtgatctggtggaggagaagtttaagggcatcatctcgattttggatgaggagtgtctgcgccccggggaggccacagacctgaccttcctggagaagctggaggatactgtcaagcaccatccacacttcctgacgcacaagctggctgaccagcggaccaggaaatctctgggccgaggggaattccgccttctgcactatgcgggggaggtgacctacagcgtgaccgggtttctggacaaaaacaatgaccttctcttccggaaccttaaggagaccatgtgtagctcaaagaatcccattatgagccagtgctttgaccggagcgagctcagtgacaagaagcggccagagacggtcgccacccagttcaagatgagcctcctgcagctggtggagatcctgcagtctaaggagcccgcctacgtccgctgcatcaaacccaatgatgccaaacagcccggccgctttgacgaggtgctgatccgccaccaggtgaagtacctggggctgttggaaaacctgcgcgtgcgcagagccggctttgcctatcgccgcaaatacgaagctttcctgcaaaggtacaagtcactgtgcccagagacgtggcccacgtgggcaggacggccgcaggatggggtggctgtgctggtccgacacctgggctacaagccagaagagtacaagatgggcaggaccaagatcttcatccgcttccccaagaccctgtttgccacagaggatgccctggaggtccggcggcagagcctggccacaaagatccaagctgcctggaggggctttcactggcggcagaaattcctccgggtgaagagatcagccatctgcatccagtcgtggtggcgtggaacactgggccggaggaaggcagccaagaggaagtgggcggcacagaccatccggcggctcatccgaggcttcgtcctgcgccacgccccccgctgccccgagaacgccttcttcctggaccatgtgcgcacctcttttttgctaaacctgaggcggcagctgccccagaatgtcctggacacctcgtggcccacgcccccacctgccctgcgtgaggcctcagagcttctgcgggagttgtgcataaagaacatggtgtggaaatactgccggagtatcagccctgagtggaagcagcagctgcagcagaaggccgtggctagtgagatcttcaagggcaagaaggataattaccctcagagtgtacccaggctcttcatcagcactcggcttggtacagatgagatcagcccccgagtgctgcaggccttgggctctgagcccattcagtatgcggtgcctgttgtgaaatacgaccgcaagggctacaagcctcgctcccggcagctgctgctcacgcccaacgccgtcgtcatcgtggaggacgccaaagtcaagcagaggattgattacgccaacctgaccggaatctctgtcagcagcctgagcgacagtctttttgtgcttcatgtacagcgtgcggacaataagcaaaagggagatgtggtgctgcagagtgaccacgtgattgagacgctgaccaagacagccctcagtgccaaccgcgtgaacagcatcaacatcaaccagggcagcatcacgtttgcagggggccccggcagggatggcaccattgacttcacacccggctcggagctgctcatcaccaaggccaagaacgggcacctggctgtggtcgccccacggctgaattctcggtgataaaggcgcccactggaccctcccaacgcccaatgctttgcttttctcctcctccccttcccagttaccaaagactcgaacttccagacagggacccagggacaccccgaagcccacctgcaatctcccacctcctgcccatccctctcttgagggagcagcaggggccaggagctaccccaggagtgggccaggccgggccacagcaataggaaagccagggccagagcgagccatgccagccctactgccgatgccaaatatttgagagaagggaacttttgctgaggttttctctgaggtttttttgatgctttataggaaactattttttaaaaaaagccatttcccacccaaggacacagtggatgtgttttccctgactccagcagggcaaggaatgtagccgagaggttgtgtgggctgggctctggtgccctcttccctggccaggacacctctcctcctgattcccttggcaccttgtctttctgtctgtttacctgtctccctgcctgcccatctgcatcttttgcagcccactctgacttccatctgggggctgagaccacccttgcctgcccccttctttctgccttaagaatgtccttttaggctgggcatggtggctcacgcctgtaaccccagcactttgggaggcggagacgggcagataacctgaggtcaggatttcgagaccaacctgacctacatggagaaactccgcctctagtaaaaatacaaaattagccgggcatggtggtgcacgcctctaatcccagctactcgggaggctgaggcaggagaatcacttgaacccgggaagtggaggttgcagtgagccaagagtacaccactgcactccagcctgggcaacagagcgagactccgtcttaaaaaaaaaaaaaaagaacgcccttttactgtcctcatcatcccagtttgaggcagtgctggagtggggaaggccgtcttagaccatagaggttggaagacgctgagagatcatccagcccagccccttgatgttacagagcagaagacagatgcccaaacaggagaaggcacttgcccacggtcatacggcaggttgccacaaaaccaagatggcagcccttcctcagcgtgcctcactgccactcccagagccagggagccccataaaacccacatcatgtcttaagagtatatctggctccttgaccagcaatcggccctgggagccaccaggtgggaaaagcgcctctgccagagtccaggccttgggatgacagacagcttgcccgcacactcgggccccactcaaggatgtagggccttttctggcccctgacccctccctggcatgggagcgtggggacggggctggccttgggaggagcggcaggggcatcacctccttctgctgcttctccctgctcctaccctcaagggcctgggggctgcccagctgcctctatgcccttctgggggtctcagcccactgctgacacttctgcaatccagagaaacactaaataaagcaatacgtgtttgccaa

SEQ ID NO: 156736 - DNA, 901 bp, Homo sapiens
  Payload ID: 10725
  Gene Symbol: MYO1C
  Gene Name: myosin IC
  ENST ID: ENST00000570984
  CDS Start-End: 101-901
ccgggccgcggatccccaagcccgccacgccgcccagcccggccccgcccgcgccggaagagccacgccggccctgggcagtgacggggttcgggtgaccatggagagtgcgctcaccgcccgtgaccgggtgggggtgcaggatttcgtgctgctggagaacttcaccagcgaggccgccttcatcgagaacctgcggcggcgatttcgggagaatctcatctacacctacattggccccgtcctggtctctgtcaatccctaccgggacctgcagatctacagccggcagcatatggagcgttaccgtggcgtcagcttctatgaagtgccccctcacctgtttgccgtggcggacactgtgtaccgagcactgcgcacggagcgtcgggaccaggctgtgatgatctctggggagagcggggcaggcaagaccgaggccaccaagaggctgctgcagttctatgcagagacctgcccagcccccgagcgcggaggtgccgtgcgggaccggctgctacagagcaacccggtgctggaggcctttggaaatgccaagaccctccggaacgataactccagcaggttcgggaagtacatggatgtgcagtttgacttcaagggtgcccccgtgggtggccacatcctcagttacctcctggaaaagtcacgagtggtgcaccagaatcatggggagcggaacttccacatcttctaccagctgctggaggggggcgaggaggagactcttcgcaggctgggcttggaacggaacccccagagctacctgtacctggtgaagggccagtgtgccaaagtctcctccatcaacgacaagagtgactggaaggtcgtcaggaaggctctgacagtcattgatttcaccgaggatgaagtggag

SEQ ID NO: 156737 - DNA, 385 bp, Homo sapiens
  Payload ID: 10725
  Gene Symbol: MYO1C
  Gene Name: myosin IC
  ENST ID: ENST00000575011
  CDS Start-End: 1-196
cacagaggatgccctggaggtccggcggcagagcctggccactctcccattcatgccactcgtggagcgcacacggcaccaggctcccagctggctccccgcgctctggccaattgcctttctttcccaaccgcagccacaaagatccaagctgcctggaggggctttcactggcggcagaaattcctccgggtgaagagatcagccatctgcatccagtcgtggtggcgtggaacactgggccggaggaaggcagccaagaggaagtgggcggcacagaccatccggcggctcatccgaggcttcgtcctgcgccacgccccccgctgccccgagaacgccttcttcctggaccatgtgcgcacctcttttttgctaaacctga

SEQ ID NO: 156738 - DNA, 753 bp, Homo sapiens
  Payload ID: 10725
  Gene Symbol: MYO1C
  Gene Name: myosin IC
  ENST ID: ENST00000575335
  CDS Start-End: 341-753
cgagtgtgacgggcggggggctccggggtggccggagaaggaggatggccacgcggccctcagtcctcacgctccggcctcccgcgcacacgcctggctctgagattcattcattcatccaggggtccgggaaggggtgactgagccccaccgtgtgcctcgctgcgtgtagggagtgggagccgtctcctgggagggactgacaaggaaacagctgattcctgcggggtgcgataaggaggcgctgcgtgtttgggagaatcaggaaggggttctggaggaggtgacacctgagccgagtctcagtgaggccctgggcagtgacggggttcgggtgaccatggagagtgcgctcaccgcccgtgaccgggtgggggtgcaggatttcgtgctgctggagaacttcaccagcgaggccgccttcatcgagaacctgcggcggcgatttcgggagaatctcatctacacctacattggccccgtcctggtctctgtcaatccctaccgggacctgcagatctacagccggcagcatatggagcgttaccgtggcgtcagcttctatgaagtgccccctcacctgtttgccgtggcggacactgtgtaccgagcactgcgcacggagcgtcgggaccaggctgtgatgatctctggggagagcggggcaggcaagaccgaggccaccaagaggctgctgcagttctatgcagagacctgcccagcccccgagcgcggaggtgccgtgcgggaccg

SEQ ID NO: 156739 - DNA, 583 bp, Homo sapiens
  Payload ID: 10725
  Gene Symbol: MYO1C
  Gene Name: myosin IC
  ENST ID: ENST00000573853
  CDS Start-End: 73-583
gcagagccaagcgagggaggttctgccgaggccgcttcggaggccctgggcagtgacggggttcgggtgaccatggagagtgcgctcaccgcccgtgaccgggtgggggtgcaggatttcgtgctgctggagaacttcaccagcgaggccgccttcatcgagaacctgcggcggcgatttcgggagaatctcatctacacctacattggccccgtcctggtctctgtcaatccctaccgggacctgcagatctacagccggcagcatatggagcgttaccgtggcgtcagcttctatgaagtgccccctcacctgtttgccgtggcggacactgtgtaccgagcactgcgcacggagcgtcgggaccaggctgtgatgatctctggggagagcggggcaggcaagaccgaggccaccaagaggctgctgcagttctatgcagagacctgcccagcccccgagcgcggaggtgccgtgcgggaccggctgctacagagcaacccggtgctggaggcctttggaaatgccaagaccctccggaacgataactccagcaggttcgggaagtacatggatgtgcagt

SEQ ID NO: 156740 - DNA, 555 bp, Homo sapiens
  Payload ID: 10725
  Gene Symbol: MYO1C
  Gene Name: myosin IC
  ENST ID: ENST00000574790
  CDS Start-End: 62-555
caagactcagaacagaaggacggtgtgggaggccctgggcagtgacggggttcgggtgaccatggagagtgcgctcaccgcccgtgaccgggtgggggtgcaggatttcgtgctgctggagaacttcaccagcgaggccgccttcatcgagaacctgcggcggcgatttcgggagaatctcatctacacctacattggccccgtcctggtctctgtcaatccctaccgggacctgcagatctacagccggcagcatatggagcgttaccgtggcgtcagcttctatgaagtgccccctcacctgtttgccgtggcggacactgtgtaccgagcactgcgcacggagcgtcgggaccaggctgtgatgatctctggggagagcggggcaggcaagaccgaggccaccaagaggctgctgcagttctatgcagagacctgcccagcccccgagcgcggaggtgccgtgcgggaccggctgctacagagcaacccggtgctggaggcctttggaaatgccaagaccctccggaacgataactccagcaggttcgggaa

SEQ ID NO: 156741 - DNA, 565 bp, Homo sapiens
  Payload ID: 10725
  Gene Symbol: MYO1C
  Gene Name: myosin IC
  ENST ID: ENST00000570490
  CDS Start-End: 60-565
cctttctccacccaaaaccagcacctcccgggttctgccctctggtcctgcctgcgtccatgccctgtgccctgggcagtgacggggttcgggtgaccatggagagtgcgctcaccgcccgtgaccgggtgggggtgcaggatttcgtgctgctggagaacttcaccagcgaggccgccttcatcgagaacctgcggcggcgatttcgggagaatctcatctacacctacattggccccgtcctggtctctgtcaatccctaccgggacctgcagatctacagccggcagcatatggagcgttaccgtggcgtcagcttctatgaagtgccccctcacctgtttgccgtggcggacactgtgtaccgagcactgcgcacggagcgtcgggaccaggctgtgatgatctctggggagagcggggcaggcaagaccgaggccaccaagaggctgctgcagttctatgcagagacctgcccagcccccgagcgcggaggtgccgtgcgggaccggctgctacagagcaacccggtgctggaggcctttggaaatgccaagaccctccg

SEQ ID NO: 156742 - DNA, 5563 bp, Homo sapiens
  Payload ID: 10726
  Gene Symbol: MYO1D
  Gene Name: myosin ID
  Uniprot ID: O94832
  ENST ID: ENST00000318217
  CDS Start-End: 306-3326
aggctggaggcgggaccagccgctgccgtctccgtctcggtgtcccggcccctacagcgcccggcagccgcggcgggaggagcggaaactgtcgggtgcgtcccgttcggagccgcgccggccgagaaggcgccgaggagcagcgaggcggcctctgtccggcccggacccgccgagcggcgtgcgcgccccctccccgtagcctcgcggcgcggcctcgccccggcccctcccgagctcatcgcgggcccacggagcggccccggaggcccgagcgcgcccacctgagcccccgcgctggcgccatggcggagcaggagagcctggaattcggcaaggcagacttcgtgctgatggacaccgtctccatgcccgagttcatggccaacctcaggctcagatttgaaaaagggcgcatctatacgttcattggagaagtcgtcgtttctgtgaacccttacaagttgttgaacatctatggaagagacacaattgagcagtataaaggccgtgagctgtatgagagaccgcctcacctttttgctattgcggatgctgcttacaaggctatgaagaggcgatcaaaagacacttgtattgtgatatcaggggaaagtggagctggtaaaacggaagccagtaagtacattatgcagtatattgcggccatcaccaaccccagtcagagagcagaggttgaaagagtgaagaatatgttgcttaagtccaactgtgttttggaagcttttggaaatgccaaaaccaaccgtaatgacaactcaagcaggtttggaaaatacatggatatcaactttgacttcaagggtgaccctattggtgggcatatcaataactacttactagaaaagtctcgagtgattgtgcaacagccaggagaaagaagctttcattctttctatcagctactccaaggaggttcagaacaaatgctacgctctctacatctccagaaatccctttcatcctacaactatattcatgtgggagctcaattaaagtcttctatcaatgatgctgccgaattcagagttgttgctgatgccatgaaagtcattggcttcaaacctgaggagatccaaacagtgtataagattttggctgctattctgcacttgggaaatttaaaatttgtagtagatggtgacacgcctcttattgagaatggcaaagtagtatctatcatagcagaattgctctctactaagacagatatggttgagaaagcccttctttaccggactgtggccacaggccgtgacatcattgacaagcagcacacagaacaagaggccagctacggcagagacgcctttgccaaggcaatatatgagcgccttttttgttggatcgttactcgcatcaatgatattattgaggtcaagaactatgacaccacaatccatgggaaaaacactgttattggtgtcttggatatctatggctttgaaatctttgacaacaacagttttgaacaattctgtatcaattactgcaatgagaaactgcagcagctatttattcagctggttctgaagcaagaacaagaggaataccagcgggaagggatcccctggaaacatattgactacttcaacaatcagatcattgttgacctcgtggagcaacagcacaaagggatcattgcaatccttgatgatgcttgcatgaatgtcggcaaagtcaccgatgaaatgtttcttgaagcacttaacagtaaattgggcaaacacgcccatttttccagccgaaagctctgtgcctcagacaaaattctggagtttgatcgagattttcgaattcgacattatgcaggcgatgtagtctattctgtcattggttttattgacaaaaataaagatactttatttcaagatttcaagcgccttatgtataacagttcaaatcctgtgctcaagaatatgtggcctgaaggcaaactgagcattacagaggtgaccaagcgacctctgactgctgctaccttgtttaagaattctatgattgctctagtagacaaccttgcatcaaaggaaccatattacgttcgttgcatcaaacccaatgacaagaaatctccacagatatttgatgatgaacgctgccggcaccaagtagaatatcttggactactggaaaatgtgagagtgcgtcgggcaggatttgccttccgccagacatacgagaagtttcttcacaggtataagatgatctctgaattcacctggcccaaccatgaccttccttcagacaaagaggctgtcaagaaactaattgaacggtgtggttttcaggatgatgtagcttatgggaagaccaaaattttcattcgaacaccccgaacattgtttaccttggaagaactccgtgcccagatgctcataaggattgtcctctttctacaaaaggtgtggcggggcaccctggcccgcatgcggtacaaaagaaccaaggcagctctgacaataatcaggtactaccggcgctacaaagtgaagtcgtacatccacgaggtggccagacgcttccatggcgtcaagaccatgcgagactacgggaagcacgtgaagtggccaagccctcctaaagttcttcgccgttttgaggaggccctgcagacgattttcaatagatggagagcatcccagctcatcaagagcattccggcctcagacctgccccaggtcagggcaaaggttgcagccgtggaaatgttgaagggtcaaagggctgacctcgggctccagagggcctgggagggcaactatcttgcttcaaagccagatacacctcagacctcaggcacttttgtccctgttgctaatgaattgaaacggaaggacaaatacatgaatgtcctcttttcctgtcacgtccgtaaggtaaatcgatttagtaaggtggaagacagagcaatttttgtcactgaccgtcacctgtataaaatggatcccactaaacagtacaaggtgatgaagactatccctctatacaatttgactggtctgagtgtctccaatggaaaggaccaacttgtagtgttccatacgaaagacaacaaagacctcattgtctgcctcttcagcaaacagccaacccatgagagtcgaattggagaacttgttggagtgctggtgaatcatttcaagagtgagaagcgccaccttcaagtgaacgtcaccaacccagtacagtgcagcctgcacgggaagaagtgcaccgtctccgtggagacgcggctcaaccagccccagcccgacttcaccaagaatcgctcgggcttcatcctcagcgtgcccgggaactgacgccccgcggaggcctggcccggagcccggccacactccgagtcctgggtcccagtccagctgctgcctcccaacccatgcccgctagaaacctgctgcgagggcccctcccagaggagccccgcccctgtaagatttccttcctggttttctgcctttggtatcatcttcctctgtccttactgtccacggtccctgttcaataagccaaagaccctggtgccccgcccagacccctgggctgacgtccagaccaatctcaccccagaggcaactggatggtgcctttagttggtgcggatgccccgtggccaggtcaagtcagagcacctggacaggtgtcctccctgctgctgaccctgcagagggaaggggtggggatgcaggaccccactctgcgggagccccatagccacctctcttgcccaaggtgagccagccctggggacccagctcagggaggctctgctcagagttcggcggacccaccccaacccaactcccagccgccagccaaagccactgggtgagcagagtcacccacagggccagcccctcagccaggagccagtggcaggagcggaacagcccatccagcagagtgagtccatccttcccaggttctcccctgggagactccctttgccaccaaggcccccaccagggcctctgaccaccgctctggagaggacagtgtggcatgctccaaggatcatcttacttaactcgcagcctgtggctgtggtcctcttatagatactttcaccgtttgcagggttgctaatcagatacctgctgtcaccacacttgggtcaggaaccctaatgagaacggggagctgccagggtgagggcagccctcagggtcggccgctttccctctggaccacctcccgctgcgtttcctactcagagaaacagcaagggcggggtcaagacacgggatgacgggaagcaggaagcggggcagcagcacagcgtggggtcctggcactgcaggccaggccaggatgcccaccccgccctctacacggccccttggggcctgcgcccgtgaaactggtgccagggagcactgccagcttgccagtttctgcccagcaaaagcacgtatgcttcaggggccttctgagaccaccttccccactgagccccagctgctgagaaggccttgagggaagtagaggctgggagcaaatgccccatgcggtgagaggatgaggggagcctacgcctcaggcatgtggtgagaggatgagggggagggagccaacgcctcaggtggagtgggcagaggtgcaagagagggatgtactgaagcttcttcccgtcctgccacagacacttctcctgccttcccaccctgacccggcagaacccaccaagtgcctgtgtgcagcctcctgtgcctcacccagggcctgaccccagagtggtcccaacaacccggtctcatgcccactccccatccctgcttcccaaaaattgcactgtgtgcagtttgcaacaaagaatcccgctggcatcctgtccttgggaaccctttctcattctccaagcctggtcagctgcctgcacaggcagaggtgccctcagcccagattagcaacactcatagttttgccaattaccagtagacactagtggaaccatctaactggaacttcctctctccttccacttatttcctcaaacttgttgctttacactagacacatgcaaatgtatgttttaaacacaccaaaacagatcatgccaaatgagttgcctgtcaaaggctggagggcaggaggagggcctgggtttgggttctttcctcccagcctttggatggtgccttgggccccttagccccagcgccagggcctcccagctgaggccacaggacaagcacttttttatgatgtactaaaagccacagtatgtggcaactgcaaaaggatcaggaatttagggtatgatctcggtcacgtgtcccgggcgctgaggggaaaggaagcgggcatgattgtagacaatgagggggttctcttgatgtaatgaaatgcaattttatggtttggtgcaaaaactcctattttccagtaaattaactttatttctaaagcatattttgatttgccatcaagagcaataaagcattaaatcttatttttaaaggtgttctgcttatctgtcactgaaaacttggtgaaatttttgcttaaataaagtcaaccattatctgggaggatagaa

SEQ ID NO: 156743 - DNA, 1916 bp, Homo sapiens
  Payload ID: 10726
  Gene Symbol: MYO1D
  Gene Name: myosin ID
  ENST ID: ENST00000583621
  CDS Start-End: 306-1616
aggctggaggcgggaccagccgctgccgtctccgtctcggtgtcccggcccctacagcgcccggcagccgcggcgggaggagcggaaactgtcgggtgcgtcccgttcggagccgcgccggccgagaaggcgccgaggagcagcgaggcggcctctgtccggcccggacccgccgagcggcgtgcgcgccccctccccgtagcctcgcggcgcggcctcgccccggcccctcccgagctcatcgcgggcccacggagcggccccggaggcccgagcgcgcccacctgagcccccgcgctggcgccatggcggagcaggagagcctggaattcggcaaggcagacttcgtgctgatggacaccgtctccatgcccgagttcatggccaacctcaggctcagatttgaaaaagggcgcatctatacgttcattggagaagtcgtcgtttctgtgaacccttacaagttgttgaacatctatggaagagacacaattgagcagtataaaggccgtgagctgtatgagagaccgcctcacctttttgctattgcggatgctgcttacaaggctatgaagaggcgatcaaaagacacttgtattgtgatatcaggggaaagtggagctggtaaaacggaagccagtaagtacattatgcagtatattgcggccatcaccaaccccagtcagagagcagaggttgaaagagtgaagaatatgttgcttaagtccaactgtgttttggaagcttttggaaatgccaaaaccaaccgtaatgacaactcaagcaggtttggaaaatacatggatatcaactttgacttcaagggtgaccctattggtgggcatatcaataactacttactagaaaagtctcgagtgattgtgcaacagccaggagaaagaagctttcattctttctatcagctactccaaggaggttcagaacaaatgctacgctctctacatctccagaaatccctttcatcctacaactatattcatgtgggagctcaattaaagtcttctatcaatgatgctgccgaattcagagttgttgctgatgccatgaaagtcattggcttcaaacctgaggagatccaaacagtgtataagattttggctgctattctgcacttgggaaatttaaaatttgtagtagatggtgacacgcctcttattgagaatggcaaagtagtatctatcatagcagaattgctctctactaagacagatatggttgagaaagcccttctttaccggactgtggccacaggccgtgacatcattgacaagcagcacacagaacaagaggccagctacggcagagacgcctttgccaaggcaatatatgagcgccttttttgttggatcgttactcgcatcaatgatattattgaggtcaagaactatgacaccacaatccatgggaaaaacactgttattggtgtcttggatatctatggctttgaaatctttgacaacaacagttttgaacaattctgtatcaattactgcaatgagaaactgcagcagctatttattcagctggttctgaagcaagaacaagaggaataccagcgggaagggatcccctggaaacatgtgggattgctataatttgatagactgccttgttgatgcccagaacatcctgagttagaaccagtaaacctgttttcactttatggctgctaccacgtggacttactggtttatatctgtctgttaggtttagcatactttattaagttataccttaaattggctgaactttgcttcagaatctagtttcttcttccctttttcctcctttttctcctcttctactttgtagactatatggtattttattgtcttcagttaatgttgtttatattctctgaaacctacacattaaaatacttgttttactttgca

SEQ ID NO: 156744 - DNA, 3500 bp, Homo sapiens
  Payload ID: 10726
  Gene Symbol: MYO1D
  Gene Name: myosin ID
  ENST ID: ENST00000579584
  CDS Start-End: 273-3158
gtctcggtgtcccggcccctacagcgcccggcagccgcggcgggaggagcggaaactgtcgggtgcgtcccgttcggagccgcgccggccgagaaggcgccgaggagcagcgaggcggcctctgtccggcccggacccgccgagcggcgtgcgcgccccctccccgtagcctcgcggcgcggcctcgccccggcccctcccgagctcatcgcgggcccacggagcggccccggaggcccgagcgcgcccacctgagcccccgcgctggcgccatggcggagcaggagagcctggaattcggcaaggcagacttcgtgctgatggacaccgtctccatgcccgagttcatggccaacctcaggctcagatttgaaaaagggcgcatctatacgttcattggagaagtcgtcgtttctgtgaacccttacaagttgttgaacatctatggaagagacacaattgagcagtataaaggccgtgagctgtatgagagaccgcctcacctttttgctattgcggatgctgcttacaaggctatgaagaggcgatcaaaagacacttgtattgtgatatcaggggaaagtggagctggtaaaacggaagccagtaagtacattatgcagtatattgcggccatcaccaaccccagtcagagagcagaggttgaaagagtgaagaatatgttgcttaagtccaactgtgttttggaagcttttggaaatgccaaaaccaaccgtaatgacaactcaagcaggtttggaaaatacatggatatcaactttgacttcaagggtgaccctattggtgggcatatcaataactacttactagaaaagtctcgagtgattgtgcaacagccaggagaaagaagctttcattctttctatcagctactccaaggaggttcagaacaaatgctacgctctctacatctccagaaatccctttcatcctacaactatattcatgtgggagctcaattaaagtcttctatcaatgatgctgccgaattcagagttgttgctgatgccatgaaagtcattggcttcaaacctgaggagatccaaacagtgtataagattttggctgctattctgcacttgggaaatttaaaatttgtagtagatggtgacacgcctcttattgagaatggcaaagtagtatctatcatagcagaattgctctctactaagacagatatggttgagaaagcccttctttaccggactgtggccacaggccgtgacatcattgacaagcagcacacagaacaagaggccagctacggcagagacgcctttgccaaggcaatatatgagcgccttttttgttggatcgttactcgcatcaatgatattattgaggtcaagaactatgacaccacaatccatgggaaaaacactgttattggtgtcttggatatctatggctttgaaatctttgacaacaacagttttgaacaattctgtatcaattactgcaatgagaaactgcagcagctatttattcagctggttctgaagcaagaacaagaggaataccagcgggaagggatcccctggaaacatattgactacttcaacaatcagatcattgttgacctcgtggagcaacagcacaaagggatcattgcaatccttgatgatgcttgcatgaatgtcggcaaagtcaccgatgaaatgtttcttgaagcacttaacagtaaattgggcaaacacgcccatttttccagccgaaagctctgtgcctcagacaaaattctggagtttgatcgagattttcgaattcgacattatgcaggcgatgtagtctattctgtcattggttttattgacaaaaataaagatactttatttcaagatttcaagcgccttatgtataacagttcaaatcctgtgctcaagaatatgtggcctgaaggcaaactgagcattacagaggtgaccaagcgacctctgactgctgctaccttgtttaagaattctatgattgctctagtagacaaccttgcatcaaaggaaccatattacgttcgttgcatcaaacccaatgacaagaaatctccacagatatttgatgatgaacgctgccggcaccaagtagaatatcttggactactggaaaatgtgagagtgcgtcgggcaggatttgccttccgccagacatacgagaagtttcttcacaggtataagatgatctctgaattcacctggcccaaccatgaccttccttcagacaaagaggctgtcaagaaactaattgaacggtgtggttttcaggatgatgtagcttatgggaagaccaaaattttcattcgaacaccccgaacattgtttaccttggaagaactccgtgcccagatgctcataaggattgtcctctttctacaaaaggtgtggcggggcaccctggcccgcatgcggtacaaaagaaccaaggcagctctgacaataatcaggtactaccggcgctacaaagtgaagtcgtacatccacgaggtggccagacgcttccatggcgtcaagaccatgcgagactacgggaagcacgtgaagtggccaagccctcctaaagttcttcgccgttttgaggaggccctgcagacgattttcaatagatggagagcatcccagctcatcaagagcattccggcctcagacctgccccaggtcagggcaaaggttgcagccgtggaaatgttgaagggtcaaagggctgacctcgggctccagagggcctgggagggcaactatcttgcttcaaagccagatacacctcagacctcaggcacttttgtccctgttgctaatgaattgaaacggaaggacaaatacatgaatgtcctcttttcctgtcacgtccgtaaggtaaatcgatttagtaaggtggaagacagagcaatttttgtcactgaccgtcacctgtataaaatggatcccactaaacagtacaaggtgatgaagactatccctctatacaatttgactggtctgagtgtctccaatggaaaggaccaacttgtagtgttccatacgaaagacaacaaagacctcattgtctgcctcttcagcaaacagccaacccatgagagtcgaattggagaacttgttggagtgctggtgaatcatttcaagagaaaccatctgcttatactctgaataaaattcaagaaagcatagattctacataaacaggcccaagattacatggcaaactgagatgaagaggatgctggctgagaaacaaacaaaagtgttcaattatttgaatgaagtaaggaaagatattttaaaatgtaaatcaacattaaaatctgaaaatggcacagttgatattgcagaaaatagaattgatgtgaaaggaaagtttgaagtctctcagtgtgcagaatttactgttataatgggcaacatgttaactttcttagcaatatacaaaataagggtacatcttacagagaaggcatcttatattcaataaaatatggtaatttaaaacat

SEQ ID NO: 156745 - DNA, 558 bp, Homo sapiens
  Payload ID: 10726
  Gene Symbol: MYO1D
  Gene Name: myosin ID
  ENST ID: ENST00000577252
  CDS Start-End: 1-135
aaacacgcccatttttccagccgaaagctctgtgcctcagacaaaattctggagtttgatcgagattttcgaattcgacattatgcaggcgatgtagtttcttcttggaatcttttatcctaccctcaacactgagtgaaccttaggcaagtcacttgacctccctacggatgagactgttagttcctgtatgttgctgttttgcttttatcttaggaatgctggatgataaatacagctatcttttaaaaagtcatcttcttgagctattctgtcattggttttattgacaaaaataaagatactttatttcaagatttcaagcgccttatgtataacagttcaaatcctgtgctcaagaatatgtggcctgaaggcaaactgagcattacagaggtgaccaagcgacctctgactgctgctaccttgtttaagaattctatgattgctctagtagacaaccttgcatcaaaggaaccatattacgttcgttgcatcaaacccaatgacaagaaatctccacagatatttgatgatgaacgctgccggcaccaagta

SEQ ID NO: 156746 - DNA, 5451 bp, Homo sapiens
  Payload ID: 10726
  Gene Symbol: MYO1D
  Gene Name: myosin ID
  ENST ID: ENST00000394649
  CDS Start-End: 545-3301
ttcttcaacttcttgatttaccctaggctggggttcccaaatccagctttgtgtcatgatcacccagcttttaaaatacgcagattccccggactctgtcttctggagatggtgatttattaagcctccttagtgcccagctcaaatgaagaaatattgcaccagaagaagaaagccaagaaatgaagtcacaacgtcagtcatttaatccaccacctgtggtcctaactagttcttatgtcctgtggaacacacagtctaacaaggggataaaactaattgactccatcacatggaaaccatgatttttgccaagagaagcagaaacaagatgctttcacccttgggagagattctcatctaagaactggcaagatttgaaaaagggcgcatctatacgttcattggagaagtcgtcgtttctgtgaacccttacaagttgttgaacatctatggaagagacacaattgagcagtataaaggccgtgagctgtatgagagaccgcctcacctttttgctattgcggatgctgcttacaaggctatgaagaggcgatcaaaagacacttgtattgtgatatcaggggaaagtggagctggtaaaacggaagccagtaagtacattatgcagtatattgcggccatcaccaaccccagtcagagagcagaggttgaaagagtgaagaatatgttgcttaagtccaactgtgttttggaagcttttggaaatgccaaaaccaaccgtaatgacaactcaagcaggtttggaaaatacatggatatcaactttgacttcaagggtgaccctattggtgggcatatcaataactacttactagaaaagtctcgagtgattgtgcaacagccaggagaaagaagctttcattctttctatcagctactccaaggaggttcagaacaaatgctacgctctctacatctccagaaatccctttcatcctacaactatattcatgtgggagctcaattaaagtcttctatcaatgatgctgccgaattcagagttgttgctgatgccatgaaagtcattggcttcaaacctgaggagatccaaacagtgtataagattttggctgctattctgcacttgggaaatttaaaatttgtagtagatggtgacacgcctcttattgagaatggcaaagtagtatctatcatagcagaattgctctctactaagacagatatggttgagaaagcccttctttaccggactgtggccacaggccgtgacatcattgacaagcagcacacagaacaagaggccagctacggcagagacgcctttgccaaggcaatatatgagcgccttttttgttggatcgttactcgcatcaatgatattattgaggtcaagaactatgacaccacaatccatgggaaaaacactgttattggtgtcttggatatctatggctttgaaatctttgacaacaacagttttgaacaattctgtatcaattactgcaatgagaaactgcagcagctatttattcagctggttctgaagcaagaacaagaggaataccagcgggaagggatcccctggaaacatattgactacttcaacaatcagatcattgttgacctcgtggagcaacagcacaaagggatcattgcaatccttgatgatgcttgcatgaatgtcggcaaagtcaccgatgaaatgtttcttgaagcacttaacagtaaattgggcaaacacgcccatttttccagccgaaagctctgtgcctcagacaaaattctggagtttgatcgagattttcgaattcgacattatgcaggcgatgtagtctattctgtcattggttttattgacaaaaataaagatactttatttcaagatttcaagcgccttatgtataacagttcaaatcctgtgctcaagaatatgtggcctgaaggcaaactgagcattacagaggtgaccaagcgacctctgactgctgctaccttgtttaagaattctatgattgctctagtagacaaccttgcatcaaaggaaccatattacgttcgttgcatcaaacccaatgacaagaaatctccacagatatttgatgatgaacgctgccggcaccaagtagaatatcttggactactggaaaatgtgagagtgcgtcgggcaggatttgccttccgccagacatacgagaagtttcttcacaggtataagatgatctctgaattcacctggcccaaccatgaccttccttcagacaaagaggctgtcaagaaactaattgaacggtgtggttttcaggatgatgtagcttatgggaagaccaaaattttcattcgaacaccccgaacattgtttaccttggaagaactccgtgcccagatgctcataaggattgtcctctttctacaaaaggtgtggcggggcaccctggcccgcatgcggtacaaaagaaccaaggcagctctgacaataatcaggtactaccggcgctacaaagtgaagtcgtacatccacgaggtggccagacgcttccatggcgtcaagaccatgcgagactacgggaagcacgtgaagtggccaagccctcctaaagttcttcgccgttttgaggaggccctgcagacgattttcaatagatggagagcatcccagctcatcaagagcattccggcctcagacctgccccaggtcagggcaaaggttgcagccgtggaaatgttgaagggtcaaagggctgacctcgggctccagagggcctgggagggcaactatcttgcttcaaagccagatacacctcagacctcaggcacttttgtccctgttgctaatgaattgaaacggaaggacaaatacatgaatgtcctcttttcctgtcacgtccgtaaggtaaatcgatttagtaaggtggaagacagagcaatttttgtcactgaccgtcacctgtataaaatggatcccactaaacagtacaaggtgatgaagactatccctctatacaatttgactggtctgagtgtctccaatggaaaggaccaacttgtagtgttccatacgaaagacaacaaagacctcattgtctgcctcttcagcaaacagccaacccatgagagtcgaattggagaacttgttggagtgctggtgaatcatttcaagagtgagaagcgccaccttcaagtgaacgtcaccaacccagtacagtgcagcctgcacgggaagaagtgcaccgtctccgtggagacgcggctcaaccagccccagcccgacttcaccaagaatcgctcgggcttcatcctcagcgtgcccgggaactgacgccccgcggaggcctggcccggagcccggccacactccgagtcctgggtcccagtccagctgctgcctcccaacccatgcccgctagaaacctgctgcgagggcccctcccagaggagccccgcccctgtaagatttccttcctggttttctgcctttggtatcatcttcctctgtccttactgtccacggtccctgttcaataagccaaagaccctggtgccccgcccagacccctgggctgacgtccagaccaatctcaccccagaggcaactggatggtgcctttagttggtgcggatgccccgtggccaggtcaagtcagagcacctggacaggtgtcctccctgctgctgaccctgcagagggaaggggtggggatgcaggaccccactctgcgggagccccatagccacctctcttgcccaaggtgagccagccctggggacccagctcagggaggctctgctcagagttcggcggacccaccccaacccaactcccagccgccagccaaagccactgggtgagcagagtcacccacagggccagcccctcagccaggagccagtggcaggagcggaacagcccatccagcagagtgagtccatccttcccaggttctcccctgggagactccctttgccaccaaggcccccaccagggcctctgaccaccgctctggagaggacagtgtggcatgctccaaggatcatcttacttaactcgcagcctgtggctgtggtcctcttatagatactttcaccgtttgcagggttgctaatcagatacctgctgtcaccacacttgggtcaggaaccctaatgagaacggggagctgccagggtgagggcagccctcagggtcggccgctttccctctggaccacctcccgctgcgtttcctactcagagaaacagcaagggcggggtcaagacacgggatgacgggaagcaggaagcggggcagcagcacagcgtggggtcctggcactgcaggccaggccaggatgcccaccccgccctctacacggccccttggggcctgcgcccgtgaaactggtgccagggagcactgccagcttgccagtttctgcccagcaaaagcacgtatgcttcaggggccttctgagaccaccttccccactgagccccagctgctgagaaggccttgagggaagtagaggctgggagcaaatgccccatgcggtgagaggatgaggggagcctacgcctcaggcatgtggtgagaggatgagggggagggagccaacgcctcaggtggagtgggcagaggtgcaagagagggatgtactgaagcttcttcccgtcctgccacagacacttctcctgccttcccaccctgacccggcagaacccaccaagtgcctgtgtgcagcctcctgtgcctcacccagggcctgaccccagagtggtcccaacaacccggtctcatgcccactccccatccctgcttcccaaaaattgcactgtgtgcagtttgcaacaaagaatcccgctggcatcctgtccttgggaaccctttctcattctccaagcctggtcagctgcctgcacaggcagaggtgccctcagcccagattagcaacactcatagttttgccaattaccagtagacactagtggaaccatctaactggaacttcctctctccttccacttatttcctcaaacttgttgctttacactagacacatgcaaatgtatgttttaaacacaccaaaacagatcatgccaaatgagttgcctgtcaaaggctggagggcaggaggagggcctgggtttgggttctttcctcccagcctttggatggtgccttgggccccttagccccagcgccagggcctcccagctgaggccacaggacaagcacttttttatgatgtactaaaagccacagtatgtggcaactgcaaaaggatcaggaatttagggtatgatctcggtcacgtgtcccgggcgctgaggggaaaggaagcgggcatgattgtagacaatgagggggttctcttgatgtaatgaaatgcaattttatggtttggtgcaaaaactcctattttccagtaaattaactttatttctaaagcatattttgatttgccatcaagagcaataaagcattaaatctta

SEQ ID NO: 156747 - DNA, 8673 bp, Homo sapiens
  Payload ID: 10727
  Gene Symbol: MYO1E
  Gene Name: myosin IE
  Uniprot ID: Q12965
  ENST ID: ENST00000288235
  CDS Start-End: 401-3727
atttatggacagattgcccggcccgagccgagactcagccagaggagtacggattaagtggccgaagaaagaggagtgaggcaggggagcgaggcggacgctccgagcgcatcggactcacctgggccggcggcgaccggcgagtacgagtggactcttgccctccgcagcatgcgccccgcctgctaagtcgccgccgtctcgccctcacctagcaccgccaatcccgcctggatggagtcccctctgggttcccattggctcctgtgagtgcttgggtgtcgggagcctgtttttggcgaggggaaccaacttttgaagttcgcccagaagactgcgttccagccccagttccccggcagcgggacccggcgaagacgcgaccgcggcgcgagtcaccatgggaagcaaaggtgtctaccagtaccactggcaaagccacaatgtcaagcacagtggtgtggacgacatggtgctactgtccaagatcacagagaactccatcgtggagaatctgaagaagagatacatggatgactacatttttacatatataggatctgtattaatctcagtcaaccctttcaagcagatgccatattttggggaaaaggaaattgaaatgtaccaaggagcggcacagtatgaaaacccaccacatatctatgcccttgcagataatatgtacagaaacatgatcattgacagagagaaccagtgcgtcattatcagtggtgaaagtggtgctggaaaaacagtggctgccaaatatatcatgagctacatctccagagtgtctggaggagggaccaaagtccagcacgtgaaggacattatcctgcagtccaacccgctgctggaggccttcgggaacgccaagaccgtccggaacaacaactccagccgatttggaaaatactttgaaatccagttcagtccaggtggggaaccagatggtggaaagatctccaacttccttctggaaaaatctagggtggtgatgaggaacccaggagagcggagttttcacatattttaccagctcatcgagggcgcctctgcagagcagaaacacagccttggcatcaccagcatggactattattactacctgagcctctcgggctcatacaaggttgatgacattgacgacaggcgggagtttcaggaaactctgcacgccatgaatgtgattgggatctttgcagaagagcaaacgctggtgttgcagatagtggcgggtattctccacctgggaaacatcagcttcaaagaagttggcaactacgcggctgtggagagtgaagagtttttagcttttcctgcatatctgctagggataaaccaggaccggttgaaagaaaagctaacaagccggcagatggatagcaagtggggaggcaaatccgaatccatccacgtgaccctcaacgtagagcaggcctgttacacccgggatgcgctcgccaaggccctgcacgcccgggtctttgatttcttggtagattccatcaataaagccatggagaaagaccatgaagaatacaacattggcgtcctagacatctatggctttgaaatattccagaaaaatggctttgaacagttttgtatcaattttgttaatgaaaaactgcagcagatttttattgaactgacattaaaggcagaacaggaagaatatgttcaagagggaataagatggacacccattgagtactttaataataaaatcgtatgtgacctcatagagaacaaagtgaaccctcctggcatcatgagcatcctggatgacgtgtgcgccacgatgcatgcggtgggtgagggggcagatcagacgctgctccagaaacttcagatgcagattgggagtcatgagcacttcaacagttggaaccaaggcttcatcattcatcattatgctgggaaggtatcctatgacatggatggcttttgtgaaaggaaccgggatgtgctttttatggatctcatcgagcttatgcagagcagcgagctgcctttcataaagtctttatttccggaaaatctgcaggctgacaagaaagggcgcccaactactgccggaagcaaaataaagaaacaagccaatgaccttgtgagcaccctgatgaaatgtacgccccactacattcgctgcatcaagccaaacgaaaccaagaagcccagagactgggaggaaagcagggtaaagcatcaagtcgaatatttgggtctgaaagagaacattcgagtgagaagagctggctatgcctatcggcgcatcttccaaaaattcctacagaggtatgccattctgaccaaagccacctggccttcttggcagggagaggagaagcaaggcgtcctgcacctgctgcagtcggtcaacatggacagcgaccagttccagctggggaggagtaaagtgttcatcaaagcccccgagtctctatttcttttagaagagatgagagagagaaagtatgatgggtatgctcgagtgatacagaaatcatggaggaaattcgtggcccggaagaaatacgttcaaatgagagaagaagcctcagacctcttattgaacaagaaggagagaaggagaaacagtattaacaggaactttataggggattatattgggatggaagagcacccagaactccagcagttcgtgggcaagagggagaagattgatttcgcagacacagtcaccaagtatgacaggaggttcaagggtgtaaagcgagacctgctccttaccccaaagtgcttgtacttaatcggacgagaaaaagtcaaacagggcccagacaagggcctggtgaaagaagtcctgaagcggaaaatcgagatagaacggatcttgtctgtgtccctcagtactatgcaggatgacatttttattctccatgagcaagagtatgacagtttgcttgaatctgtcttcaaaactgaattcctaagcctcttagcaaagcgttacgaggagaagacccagaagcaactacctctgaaattcagcaatacgcttgaactgaagttgaaaaaggaaaactggggcccctggagtgcagggggctcccggcaagtgcagttccaccaagggtttggggacctggctgtcctcaagcccagtaacaaagtgctgcaggtcagcatcggacctggactgcccaagaactcccgtcctaccagaaggaacactacccaaaatacaggttattccagtgggactcaaaatgccaactacccagtgagagctgcccctcctcccccaggataccatcagaacggagtcatcagaaaccagtatgtgccatatccccatgctcctggaagccagaggtccaatcagaaaagcctgtacacctccatggcccgcccgcccttgcctcggcagcagtctaccagttcagaccgagtgtcacagacgccagagagcctggatttcctcaaggtcccggaccagggagctgcaggggtcaggagacaaacaaccagtcggcctcccccagcagggggcagacccaagccccagcccaagcccaagcctcaggtgccacagtgcaaggctttgtatgcctatgacgctcaggacacagacgaactcagctttaatgccaatgacattattgatattatcaaagaagatccttctggctggtggacgggtcgactacgaggcaagcagggcctgttccccaacaactatgtgaccaagatctgaggtgcccgtgactctgacacatggggcagaggagctccaggcacagaccaggggaggggatatttaggggctccccttacaatccacaatgagcaattgcttctccaaggcctggagctattctggtaccttccccatggaggacactgaaaaggctgggttggggacagggagtatcactccataagtgatcctaaaaggtagcctcttcataggaacccaggaggacaaaaccaccatgcattaagatttatttattgtatttaaacctggtgagaggacaagtgaggtctgctcagaccttgtaggcttctatcaaaacagcaccctgcttgctcaccaggcctagagaatggctgtaggtggccgctgacaagtgcctttagttgaagagcacatttctttcatctctcttgtccatacctgatagacacattcctctctgccaccttccttcagggaggacccgccctctgcagactgggcttagcgtgagcaggcacttcccatgtacgtgccaagggtaagctggcctgctgagcccagggcgacagaggggcactggtttacactttgccgggaccatcagggccgccaagcaggtcaggggctgggggctgggggctgggctgctggctttgctttctctgggtcttcaattagaatgtggctggcccatattggtttgtgtttaaatgctgtacttactacaagaaggatcttttttcaagctgtacatttataaaaacagatcatatactgtatatataaaaatcttgagatggtagaaacatgtatgaatgtactaagtagtattccactgtactcattcataaggtaggttttcttacaaaactcacaccaggtacttaaagatgtgctctgcttttttccaactacggagtgtcactgctttctaggtcagtccctgcagactcttctcaactctttccctataggaaacttactccgcgtcctgcccccacctcctaaataaataaaggaatcggcgaacaccttcttcttttatgacatttgttatgggttgaattgtgtgcctccaaagaagatgttggagtcccagccaccagtacctcacaatatgaccttatttggaaatagagtctttatggagcaaacaaacaaaactaattaaaatgaagtcattagagtgggtcttaatccaatataatggtgtcctgatgaaaaggggaaatttggacacagagaccaacatgccagaggaaagaccatgtgaaaaggcagggagaagacagccattcacaagccctggacagaggcctggaacagattctccctcacaccctcacaaggaaccagccctgcccaccttggtcttggacttccaacctccagaactgtgaggcaatacatttcgctgtttaagccactcggtttgtggtagtttgttacggcagccctaacaaactaaaacaatgttttcttgccataatagtgaaaagctggaatcagtgtaatgcccatcaataatggaatggttgtaagtagagactgccatttctctacctttcctcctctgggtgccatagccattcttaagctactggtaacttagagtttgagcagcatacacctttgaggctttcaggatcctcaagtccatgggaaaaaattatcagggcttacgtataagggaaaaaaattgatctagatttgaaacgaagatacatttaattctgctgtgttttacttcaagaacagggagcaaactccattctgtaacagtaacgaataatgttaaaaggctacttcagttccatgttgcgaccagagaggaaagtagagccatgatgcggtgagttgaggaaaggtaatcctgttgacactagtggtctctaaagtactttcacattcatggactccccgcagtgggaggaagataccaccagaactgggacagaggagcatgctggagtccccacagccaccagcactcaggctgcgttctcagggcaggaacaccaggaccatcttcccttgttatcataagcccctggctggctgggacaagcctttgtttttcctcctgattgattgattggcattttacacttgtgtgtaactgggaaccatcgggctctaggtcacaaaacagggactgagttaaacccccacgagtaacaccctcatccatggaaatcacagaccaagcccttagcacctgcatcgtgtgcccagccagtgccaggctcaaggagatgcccaacaaatggtgctgaaataggtaagtgacccacaggggaaggagacttagatctgcgtagagatgctgaaatgctgacactattaagaaaagtttggagaaatagtggtttatcttaaacttatttgtatatatttagaaattcaacatggggactaccagaaaaatctgggataaataacatttccctttttttcctaattaaaaagtcttcagaaaaatgtcttttttccctttaagacactaacctgggtttcctctagtctgtggatctagcctggcctgccattttgttcactgtgcagttaagcaaatatgaccactttaggagtcacttaccaggaaagaacatacagaagatcaaggggccacccccaccttctggaacttgccatcctgtttgaaataaggggtgttcatgtgcacacacagcaacgtgtatagcagtatcaaacacagtataaaaatgtgacatcccttcaaccaaaggttttaagtaaccaggaactaaatgagaaggcctgactgtgtaccctagggtagaggtgttcaagctttagttgtagaagagagagagacagaggtctgtataagggtggtatccactctactgatggccgtctgtgagacagagagaggctgatctgaaactcctgggatcaaacgatcctcctgcctcagcctctcaaagtgctgggattatgggcaagagccaccgtacctggccaactggcttaaagacatgcaaaagggccgtctcttccacagtgttttgtgaaacaatacagagacatgtggagaggacaaagggtgaagccttcttgaataagcttgctccccaaccatgaaggatgccaacccactgacctcccaacgtgtggtcccagcccatcgtaatcaaacctgactccccactactaccaagtccagcccaatgaaggtagaaaagcatcgtgcagtttcctccttaaaggacctgccctgtgtgcacaccatgtccaccaatattctgctggccagagcttagtcatgtggcctcaactcaagggggctggaggtctctgcacagagctgtctcagcagcttacccagagcaccagagtgacagcgggctcctgccaggtggaagtgttcacaaaaatgagtaagagaaaatatggatgtgcctttatgaattacaaactccatgggcttccatagagcatggcttttacataatctaaattccttctctttgcgactccctcctgaactcatccccagaccctccctgagtggagctggtcacaccaagtcagcctgtgcctctagttgctaccatttcttttataggtgttgtcccagttaagatttcactggcagtagggctggattctggtttccagggcaatcaagagcagagcatgaacggtgcgtctttggtagacaatttaactctgtgtttctggcacccctcacttttgtgatcaaaagaaagaccagaggagcctttctgcaattctgccctctttccctgttttgcttttctcccaaggcctagctgattgattgcagttctttctggatttagtaacttggttttattcctacccactaatcttgatgtctttttccctactagatcatacctttccactctgagcaccctttctaacaagaagactggctcagtatggttcactaggtcgcccaaggtcacacagttcttccctgggggagccatcacaggaactctgagtcaaaggcctgtgcgtttttattttcagacagcacctcactttgtcacccagactagagaacagtggtgcgatcatgccttactgcagtctcaaactccagggctcaggtgatcctcccacctcagcctcccaagtagctgggaccacaagcatgtgccaccacattcggctaattatttgtacagatggggtctccctgtgttgcccagctggtctcaaagctctgggctcaagcagtcttcccgccttggcctcccaaaattctgggattacaagcatgagccactgtgcccaaaaggcctgtgcttttaatcattttctccaattcaacagatatttagtaatgtgatggtctactgtgtcagcctttcaacttccaatatcttcctctcagaacataaaagtctatttaaaaagagagagagaagaaaactcacgcataaaactcaacagctagaaacttgtaagctcctttaatgggcaggagctccatctaacaaatctgaatcctctgattcatctctttccaagaccattaaccttctctttaaaataattaacagctatgttcaagtatcttcttcacactagaagctatactaagtgcttggcatactttacttagcaccaccctatgagggagacactcttatccccacttcacaggtacagaaactaaagtatagagatcaccactacttaaaatcaaacccaaagcacccacgttcagagttagtgctcttctatactatggatacatcatctcatttttaatttccgtgtttttatgatatggtttctacttctgccactcatttcccatttatgacattttagtttggggtgcctgctgtgccatctaagaaagtatcttaaaggtctttttttatgacatcctggaagaatttcctaagtcaggacatttaatatttaactaagtaaaatatgtaataaggaagcta

SEQ ID NO: 156748 - DNA, 562 bp, Homo sapiens
  Payload ID: 10727
  Gene Symbol: MYO1E
  Gene Name: myosin IE
  ENST ID: ENST00000559489
  CDS Start-End: 1-562
ataaaacaattgggaaaaacaaaggagatggatgtgtatgggattactgataagcagccttcactagaacttttagcttttcctgcatatctgctagggataaaccaggaccggttgaaagaaaagctaacaagccggcagatggatagcaagtggggaggcaaatccgaatccatccacgtgaccctcaacgtagagcaggcctgttacacccgggatgcgctcgccaaggccctgcacgcccgggtctttgatttcttggtagattccatcaataaagccatggagaaagaccatgaagaatacaacattggcgtcctagacatctatggctttgaaatattccagaaaaatggctttgaacagttttgtatcaattttgttaatgaaaaactgcagcagatttttattgaactgacattaaaggcagaacaggaagaatatgttcaagagggaataagatggacacccattgagtactttaataataaaatcgtatgtgacctcatagagaacaaagtgaaccctcctggcatcatgagcatcctggatgacgtgtgcg

SEQ ID NO: 156749 - DNA, 828 bp, Homo sapiens
  Payload ID: 10727
  Gene Symbol: MYO1E
  Gene Name: myosin IE
  ENST ID: ENST00000559269
  CDS Start-End: 1-828
ggaaaatactttgaaatccagttcagtccaggtggggaaccagatggtggaaagatctccaacttccttctggaaaaatctagggtggtgatgaggaacccaggagagcggagttttcacatattttaccagctcatcgagggcgcctctgcagagcagaaacacagccttggcatcaccagcatggactattattactacctgagcctctcgggctcatacaaggttgatgacattgacgacaggcgggagtttcaggaaactctgcacgccatgaatgtgattgggatctttgcagaagagcaaacgctggtgttgcagatagtggcgggtattctccacctgggaaacatcagcttcaaagaagttggcaactacgcggctgtggagagtgaagagtttttagcttttcctgcatatctgctagggataaaccaggaccggttgaaagaaaagctaacaagccggcagatggatagcaagtggggaggcaaatccgaatccatccacgtgaccctcaacgtagagcaggcctgttacacccgggatgcgctcgccaaggccctgcacgcccgggtctttgatttcttggtagatggtgtaaagcgagacctgctccttaccccaaagtgcttgtacttaatcggacgagaaaaagtcaaacagggcccagacaagggcctggtgaaagaagtcctgaagcggaaaatcgagatagaacggatcttgtctgtgtccctcagtactatgcaggatgacatttttattctccatgagcaagagtatgacagtttgcttgaatctgtcttcaaaactgaattcctaagc

SEQ ID NO: 156750 - DNA, 557 bp, Homo sapiens
  Payload ID: 10727
  Gene Symbol: MYO1E
  Gene Name: myosin IE
  ENST ID: ENST00000558571
  CDS Start-End: 28-366
gaagacgcgaccgcggcgcgagtcaccatgggaagcaaaggtgtctaccagtaccactggcaaagccacaatgtcaagcacagtggtgtggacgacatggtgctactgtccaagatcacagagaactccatcgtggagaatctgaagaagagatacatggatgactacatttttacatatataggatctgtattaatctcagtcaaccctttcaagcagatgccatattttggggaaaaggaaattgaaatgtaccaaggagcggcacagtatgaaaacccaccacatatctatgcccttgcagataatatgtacagaaacatgatcattgacagagagaaccagtgcgtcattatcagcacgtgaaggacattatcctgcagtccaacccgctgctggaggccttcgggaacgccaagaccgtccggaacaacaactccagccgatttggaaaatactttgaaatccagttcagtccaggtggggaaccagatggtggaaagatctccaacttccttctggaaaaatctagggtggtgatgaggaacccaggagag

SEQ ID NO: 156751 - DNA, 541 bp, Homo sapiens
  Payload ID: 10727
  Gene Symbol: MYO1E
  Gene Name: myosin IE
  ENST ID: ENST00000559412
  CDS Start-End: 1-222
cagacgccagagagcctggatttcctcaaggtcccggaccagggagctgcaggggtcaggagacaaacaaccagtcggcctcccccagcagggggcagacccaagccccagcccaagcccaagcctcaggtcaggggctgggggctgggggctgggctgctggctttgctttctctgggtcttcaattagaatgtggctggcccatattggtttgtgtttaaatgctgtacttactacaagaaggatcttttttcaagctgtacatttataaaaacagatcatatactgtatatataaaaatcttgagatggtagaaacatgtatgaatgtactaagtagtattccactgtactcattcataaggtaggttttcttacaaaactcacaccaggtacttaaagatgtgctctgcttttttccaactacggagtgtcactgctttctaggtcagtccctgcagactcttctcaactctttccctataggaaacttactccgcgtcctgcccccacctcctaaataaataaaggaatcggcgaa

SEQ ID NO: 156752 - DNA, 952 bp, Homo sapiens
  Payload ID: 10727
  Gene Symbol: MYO1E
  Gene Name: myosin IE
  ENST ID: ENST00000560749
  CDS Start-End: 1-952
cagatcagacgctgctccagaaacttcagatgcagattgggagtcatgagcacttcaacagttggaaccaaggcttcatcattcatcattatgctgggaaggtatcctatgacatggatggcttttgtgaaaggaaccgggatgtgctttttatggatctcatcgagcttatgcagagcagcgagctgcctttcataaagtctttatttccggaaaatctgcaggctgacaagaaagggcgcccaactactgccggaagcaaaataaagaaacaagccaatgaccttgtgagcaccctgatgaaatgtacgccccactacattcgctgcatcaagccaaacgaaaccaagaagcccagagactgggaggaaagcaggtatgccattctgaccaaagccacctggccttcttggcagggagaggagaagcaaggcgtcctgcacctgctgcagtcggtcaacatggacagcgaccagttccagctggggaggagtaaagtgttcatcaaagcccccgagtctctatttcttttagaagagatgagagagagaaagtatgatgggtatgctcgagtgatacagaaatcatggaggaaattcgtggcccggaagaaatacgttcaaatgagagaagaagcctcagacctcttattgaacaagaaggagagaaggagaaacagtattaacaggaactttataggggattatattgggatggaagagcacccagaactccagcagttcgtgggcaagagggagaagattgatttcgcagacacagtcaccaagtatgacaggaggttcaagggtgtaaagcgagacctgctccttaccccaaagtgcttgtacttaatcggacgagaaaaagtcaaacagggcccagacaagggcctggtgaaagaagtcctgaagcggaaaatcgagatagaacggatcttgtctgtgtccctcag

SEQ ID NO: 156753 - DNA, 4303 bp, Homo sapiens
  Payload ID: 10728
  Gene Symbol: MYO1F
  Gene Name: myosin IF
  Uniprot ID: O00160
  ENST ID: ENST00000338257
  CDS Start-End: 269-3565
atcaagttctgacccctcccttcaggctcagagccccaaacagccagctccccgcccccctccacacccagcttccctcccccatggcctcggcccctcccgccaaaggaagtgagaaggggctgttgtaagaggaactaaagccgggagtccggtgaacgggcagaagcagggccatgcccaagccacccccaagatccccctgaacctgcacctccatcacgacccattcaggagcctccaggagcccagacaccagccccccaccatgggcagcaaggagcgcttccactggcagagccacaacgtgaagcagagcggcgtggatgacatggtgcttcttccccagatcaccgaagacgccattgccgccaacctccggaagcgcttcatggacgactacatcttcacctacatcggctctgtgctcatctctgtaaaccccttcaagcagatgccctacttcaccgaccgtgagatcgacctctatcagggcgcggcccagtatgagaatcccccgcacatctacgccctcacggacaacatgtaccggaacatgcttatcgactgtgagaaccagtgtgtcatcattagtggagagagtggagctgggaagacagtggcagccaaatatatcatgggctacatctccaaggtgtctggcggaggcgagaaggtccagcacgtcaaagatatcatcctgcagtccaacccgctgctcgaggccttcggcaacgccaagactgtgcgcaacaacaattccagccgctttggcaagtactttgagatccagttcagccgaggtggggagccagatgggggcaagatctccaacttcttgctggagaagtcccgcgtggtcatgcaaaatgaaaatgagaggaacttccacatctactaccagctgctggaaggggcctcccaggagcaaaggcagaacctgggcctcatgacaccggactactattactacctcaaccaatcggacacctaccaggtggacggcacggacgacagaagcgactttggtgagactctgagtgctatgcaggttattgggatcccgcccagcatccagcagctggtcctgcagctcgtggcggggatcttgcacctggggaacatcagtttctgtgaagacgggaattacgcccgagtggagagtgtggacctcctggcctttcccgcctacctgctgggcattgacagcgggcgactgcaggagaagctgaccagccgcaagatggacagccgctggggcgggcgcagcgagtccatcaatgtgaccctcaacgtggagcaggcagcctacacccgtgatgccctggccaaggggctctatgcccgcctcttcgacttcctcgtggaggccatcaaccgtgctatgcagaaaccccaggaagagtacagcatcggtgtgctggacatttacggcttcgagatcttccagaaaaatggcttcgagcagttttgcatcaacttcgtcaatgagaagctgcagcaaatctttatcgaacttaccctgaaggccgagcaggaggagtatgtgcaggaaggcatccgctggactccaatccagtacttcaacaacaaggtcgtctgtgacctcatcgaaaacaagctgagccccccaggcatcatgagcgtcttggacgacgtgtgcgccaccatgcacgccacgggcgggggagcagaccagacactgctgcagaagctgcaggcggctgtggggacccacgagcatttcaacagctggagcgccggcttcgtcatccaccactacgctggcaaggtctcctacgacgtcagcggcttctgcgagaggaaccgagacgttctcttctccgacctcatagagctgatgcagaccagtgagcaggccttcctccggatgctcttccccgagaagctggatggagacaagaaggggcgccccagcaccgccggctccaagatcaagaaacaagccaacgacctggtggccacactgatgaggtgcacaccccactacatccgctgcatcaaacccaacgagaccaagaggccccgagactgggaggagaacagagtcaagcaccaggtggaatacctgggcctgaaggagaacatcagggtgcgcagagccggcttcgcctaccgccgccagttcgccaaattcctgcagaggtatgccattctgacccccgagacgtggccgcggtggcgtggggacgaacgccagggcgtccagcacctgcttcgggcggtcaacatggagcccgaccagtaccagatggggagcaccaaggtctttgtcaagaacccagagtcgcttttcctcctggaggaggtgcgagagcgaaagttcgatggctttgcccgaaccatccagaaggcctggcggcgccacgtggctgtccggaagtacgaggagatgcgggaggaagcttccaacatcctgctgaacaagaaggagcggaggcgcaacagcatcaatcggaacttcgtcggggactacctggggctggaggagcggcccgagctgcgtcagttcctgggcaagagggagcgggtggacttcgccgattcggtcaccaagtacgaccgccgcttcaagcccatcaagcgggacttgatcctgacgcccaagtgtgtgtatgtgattgggcgagagaaagtgaagaagggacctgagaagggccaggtgtgtgaagtcttgaagaagaaagtggacatccaggctctgcggggagtctccctcagcacgcgacaggacgacttcttcatcctccaagaggatgccgccgacagcttcctggagagcgtcttcaagaccgagtttgtcagccttctgtgcaagcgcttcgaggaggcgacgcggaggcccctgcccctcaccttcagcgacacactacagtttcgggtgaagaaggagggctggggcggtggcggcacccgcagcgtcaccttctcccgcggcttcggcgacttggcagtgctcaaggttggcggtcggaccctcacggtcagcgtgggcgatgggctgcccaagagctccaagcctacgcggaagggaatggccaagggaaaacctcggaggtcgtcccaagcccctacccgggcggcccctgcgccccccagaggcatggatcgcaatggggtgcccccctctgccagagggggccccctgcccctggagatcatgtctggagggggcacccacaggcctccccggggccctccgtccacatccctgggagccagcagacgaccccgggcacgtccgccctcagagcacaacacagaattcctcaacgtgcctgaccagggcatggccggcatgcagaggaagcgcagcgtggggcaacggccagtgcctggtgtgggccgacccaagccccagcctcggacacatggtcccaggtgccgggccctataccagtacgtgggccaagatgtggacgagctgagcttcaacgtgaacgaggtcattgagatcctcatggaagatccctcgggctggtggaagggccggcttcacggccaggagggccttttcccaggaaactacgtggagaagatctgagctgggccctgggatactgccttctctttcgcccgcctatctgcctgccggcctggtggggagccaggccctgccaatgagagcctcgtttacctgggctgcaatagcctaaaagtccagtcctttggcctccagtcctgcccaggccctgggtcaccaggtcactgctgcagcccccgcccctgggccctggtcttcctccaacatcacacctgctgcccattctccatttctgtgtgtgtcaaaggggactaacagcagaatctacctcccaactgccatgtgattaagaaatgggtcttgagtcctgtgctgttggcaaagtgccaggcacagttggggaggggggggtccttaacaagcgtgactttgctcattctgtcatcactaaggcaataaacctttgccaggtgaaagcacgagttaacttactaagtgcccaacaaggacgatgttttcacagccctgtgaggtaggagctgtgaaggaccccatcttacaggtggaacaatggaggttcagagaggttcactgacccaagactgcacagagccatgccttgcattcatatgtgaccataaagcttgaatttgtcccagtttgggctgggcgcagtggctcacgcctgtaatcccagcactttgggaggctgaggcgggcagatcacgtgagaccaggagttcaagaccagcctggataacacagcaaaaccctgtttctactaaaaatttaaaaaag

SEQ ID NO: 156754 - DNA, 1254 bp, Homo sapiens
  Payload ID: 10728
  Gene Symbol: MYO1F
  Gene Name: myosin IF
  ENST ID: ENST00000598005
  CDS Start-End: 1-888
ccgagacgttctcttctccgacctcatagagctgatgcagaccaggccttcctccggatgctcttccccgagaagctggatggagacaagaaggggcgccccagcaccgccggctccaagatcaagaaacaagccaacgacctggtggccacactgatgaggtgcacaccccactacatccgctgcatcaaacccaacgagaccaagaggccccgagactgggaggagaacaggactggtgactccccaccccgaggggactcagcctaccctccccaccagagtcaagcaccaggtggaatacctgggcctgaaggagaacatcagggtgcgcagagccggcttcgcctaccgccgccagttcgccaaattcctgcagaggtatgccattctgacccccgagacgtggccgcggtggcgtggggacgaacgccagggcgtccagcacctgcttcgggcggtcaacatggagcccgaccagtaccagatggggagcaccaaggtctttgtcaagaacccagagtcgcttttcctcctggaggaggtgcgagagcgaaagttcgatggctttgcccgaaccatccagaaggcctggcggcgccacgtggctgtccggaagtacgaggagatgcgggaggaagcttccaacatcctgctgaacaagaaggagcggaggcgcaacagcatcaatcggaacttcgtcggggactacctggggctggaggagcggcccgagctgcgtcagttcctgggcaagagggagcgggtggacttcgccgattcggtcaccaagtacgaccgccgcttcaagcccatcaagcgggacttgatcctgacgcccaagtgtgtgtatgtgattgggcgagagaaagtgaagaagggacctgagaagggccaggtgtgtgaagtcttgaagaagaaagtggacatccaggctctgcggggagtctccctcagcacgcgacaggacgacttcttcatcctccaagaggatgccgccgacagcttcctggagagcgtcttcaagaccgagtttgtcagccttctgtgcaagcgcttcgaggaggcgacgcggaggcccctgcccctcaccttcagcgacacactacagtttcgggtgaagaaggagggctggggcggtggcggcacccgcagcgtcaccttctcccgcggcttcggcgacttggcagtgctcaaggttggcggtcggaccctcacggtcagcgtgggcgatgggctgcccaagagctccag

SEQ ID NO: 156755 - DNA, 676 bp, Homo sapiens
  Payload ID: 10728
  Gene Symbol: MYO1F
  Gene Name: myosin IF
  ENST ID: ENST00000602136
  CDS Start-End: 1-357
aaggccgagcaggaggagtatgtgcaggaaggcatccgctggactccaatccagtacttcaacaacaaggtcgtctgtgacctcatcgaaaacaagctgagccccccaggcatcatgagcgtcttggacgacgtgtgcgccaccatgcacgccacgggcgggggagcagaccagacactgctgcagaagctgcaggcggctgtggggacccacgagcatttcaacagctggagcgccggcttcgtcatccaccactacgctggcaaggtctcctacgacgtcagcggcttctgcgagaggaaccgagacgttctcttctccgacctcatagagctgatgcagaccagtgagcagtgagtggtcccaggcatggggacctccggctacaaccccccaaggggatggagggaggaccgggccccactccatcttacccagaactgccatctcgccacaaactcgaggggagtggctgtgcggccaggatggtgtttctatggactagttctgatgtaaaaagtaactccagagtgctgggattacaggcatgcaccaccgcacccggccttattaaccattttaaaatgtacaatttatccgtgttgttccctttttgtgacaaagaaaaaataaaggaaataaataaataaataaaataagataaaatgaaatgaaa

SEQ ID NO: 156756 - DNA, 582 bp, Homo sapiens
  Payload ID: 10728
  Gene Symbol: MYO1F
  Gene Name: myosin IF
  ENST ID: ENST00000598321
  CDS Start-End: 130-360
aaagccgggagtccggtgaacgggcagaagcagggccatgcccaagccacccccaagatccccctgaacctgcacctccatcacgacccattcaggagcctccaggagcccagacaccagccccccaccatgggcagcaaggagcgcttccactggcagagccacaacgtgaagcagagcggcgtggatgacatggtgcttcttccccagatcaccgaagacgccattgccgccaacctccggaagcgcttcatggacgactacatcttcgtaccctgggccaaggctggggacctacatcggctctgtgctcatctctgtaaaccccttcaagcagatgccctacttcaccgaccgtgagatcgacctctatcagggcgcggcccagtatgagaatcccccgcacatctacgccctcacggacaacatgtaccggaacatgcttatcgactgtgagaaccagtgtgtcatcattagtggagagagtggagctgggaagacagtggcagccaaatatatcatgggctacatctccaaggtgtctggcggaggcgagaaggtccagcacgtcaaagatatcat

SEQ ID NO: 156757 - DNA, 531 bp, Homo sapiens
  Payload ID: 10728
  Gene Symbol: MYO1F
  Gene Name: myosin IF
  ENST ID: ENST00000596675
  CDS Start-End: 130-531
aaagccgggagtccggtgaacgggcagaagcagggccatgcccaagccacccccaagatccccctgaacctgcacctccatcacgacccattcaggagcctccaggagcccagacaccagccccccaccatgggcagcaaggagcgcttccactggcagagccacaacgtgaagcagagcggcgtggatgacatggtgcttcttccccagatcaccgaagacgccattgccgccaacctccggaagcgcttcatggacgactacatcttcgtaccctgggccaaggctgggggtgggcagcagatgccctacttcaccgaccgtgagatcgacctctatcagggcgcggcccagtatgagaatcccccgcacatctacgccctcacggacaacatgtaccggaacatgcttatcgactgtgagaaccagtgtgtcatcattagtggagagagtggagctgggaagacagtggcagccaaatatatcatgggctacatctccaaggtgtctggcggaggcgagaaggtccag

SEQ ID NO: 156758 - DNA, 4296 bp, Homo sapiens
  Payload ID: 10728
  Gene Symbol: MYO1F
  Gene Name: myosin IF
  Uniprot ID: O00160
  ENST ID: ENST00000613525
  CDS Start-End: 269-3565
atcaagttctgacccctcccttcaggctcagagccccaaacagccagctccccgcccccctccacacccagcttccctcccccatggcctcggcccctcccgccaaaggaagtgagaaggggctgttgtaagaggaactaaagccgggagtccggtgaacgggcagaagcagggccatgcccaagccacccccaagatccccctgaacctgcacctccatcacgacccattcaggagcctccaggagcccagacaccagccccccaccatgggcagcaaggagcgcttccactggcagagccacaacgtgaagcagagcggcgtggatgacatggtgcttcttccccagatcaccgaagacgccattgccgccaacctccggaagcgcttcatggacgactacatcttcacctacatcggctctgtgctcatctctgtaaaccccttcaagcagatgccctacttcaccgaccgtgagatcgacctctatcagggcgcggcccagtatgagaatcccccgcacatctacgccctcacggacaacatgtaccggaacatgcttatcgactgtgagaaccagtgtgtcatcattagtggagagagtggagctgggaagacagtggcagccaaatatatcatgggctacatctccaaggtgtctggcggaggcgagaaggtccagcacgtcaaagatatcatcctgcagtccaacccgctgctcgaggccttcggcaacgccaagactgtgcgcaacaacaattccagccgctttggcaagtactttgagatccagttcagccgaggtggggagccagatgggggcaagatctccaacttcttgctggagaagtcccgcgtggtcatgcaaaatgaaaatgagaggaacttccacatctactaccagctgctggaaggggcctcccaggagcaaaggcagaacctgggcctcatgacaccggactactattactacctcaaccaatcggacacctaccaggtggacggcacggacgacagaagcgactttggtgagactctgagtgctatgcaggttattgggatcccgcccagcatccagcagctggtcctgcagctcgtggcggggatcttgcacctggggaacatcagtttctgtgaagacgggaattacgcccgagtggagagtgtggacctcctggcctttcccgcctacctgctgggcattgacagcgggcgactgcaggagaagctgaccagccgcaagatggacagccgctggggcgggcgcagcgagtccatcaatgtgaccctcaacgtggagcaggcagcctacacccgtgatgccctggccaaggggctctatgcccgcctcttcgacttcctcgtggaggccatcaaccgtgctatgcagaaaccccaggaagagtacagcatcggtgtgctggacatttacggcttcgagatcttccagaaaaatggcttcgagcagttttgcatcaacttcgtcaatgagaagctgcagcaaatctttatcgaacttaccctgaaggccgagcaggaggagtatgtgcaggaaggcatccgctggactccaatccagtacttcaacaacaaggtcgtctgtgacctcatcgaaaacaagctgagccccccaggcatcatgagcgtcttggacgacgtgtgcgccaccatgcacgccacgggcgggggagcagaccagacactgctgcagaagctgcaggcggctgtggggacccacgagcatttcaacagctggagcgccggcttcgtcatccaccactacgctggcaaggtctcctacgacgtcagcggcttctgcgagaggaaccgagacgttctcttctccgacctcatagagctgatgcagaccagtgagcaggccttcctccggatgctcttccccgagaagctggatggagacaagaaggggcgccccagcaccgccggctccaagatcaagaaacaagccaacgacctggtggccacactgatgaggtgcacaccccactacatccgctgcatcaaacccaacgagaccaagaggccccgagactgggaggagaacagagtcaagcaccaggtggaatacctgggcctgaaggagaacatcagggtgcgcagagccggcttcgcctaccgccgccagttcgccaaattcctgcagaggtatgccattctgacccccgagacgtggccgcggtggcgtggggacgaacgccagggcgtccagcacctgcttcgggcggtcaacatggagcccgaccagtaccagatggggagcaccaaggtctttgtcaagaacccagagtcgcttttcctcctggaggaggtgcgagagcgaaagttcgatggctttgcccgaaccatccagaaggcctggcggcgccacgtggctgtccggaagtacgaggagatgcgggaggaagcttccaacatcctgctgaacaagaaggagcggaggcgcaacagcatcaatcggaacttcgtcggggactacctggggctggaggagcggcccgagctgcgtcagttcctgggcaagagggagcgggtggacttcgccgattcggtcaccaagtacgaccgccgcttcaagcccatcaagcgggacttgatcctgacgcccaagtgtgtgtatgtgattgggcgagagaaagtgaagaagggacctgagaagggccaggtgtgtgaagtcttgaagaagaaagtggacatccaggctctgcggggagtctccctcagcacgcgacaggacgacttcttcatcctccaagaggatgccgccgacagcttcctggagagcgtcttcaagaccgagtttgtcagccttctgtgcaagcgcttcgaggaggcgacgcggaggcccctgcccctcaccttcagcgacacactacagtttcgggtgaagaaggagggctggggcggtggcggcacccgcagcgtcaccttctcccgcggcttcggcgacttggcagtgctcaaggttggcggtcggaccctcacggtcagcgtgggcgatgggctgcccaagagctccaagcctacgcggaagggaatggccaagggaaaacctcggaggtcgtcccaagcccctacccgggcggcccctgcgccccccagaggcatggatcgcaatggggtgcccccctctgccagagggggccccctgcccctggagatcatgtctggagggggcacccacaggcctccccggggccctccgtccacatccctgggagccagcagacgaccccgggcacgtccgccctcagagcacaacacagaattcctcaacgtgcctgaccagggcatggccggcatgcagaggaagcgcagcgtggggcaacggccagtgcctggtgtgggccgacccaagccccagcctcggacacatggtcccaggtgccgggccctataccagtacgtgggccaagatgtggacgagctgagcttcaacgtgaacgaggtcattgagatcctcatggaagatccctcgggctggtggaagggccggcttcacggccaggagggccttttcccaggaaactacgtggagaagatctgagctgggccctgggatactgccttctctttcgcccgcctatctgcctgccggcctggtggggagccaggccctgccaatgagagcctcgtttacctgggctgcaatagcctaaaagtccagtcctttggcctccagtcctgcccaggccctgggtcaccaggtcactgctgcagcccccgcccctgggccctggtcttcctccaacatcacacctgctgcccattctccatttctgtgtgtgtcaaaggggactaacagcagaatctacctcccaactgccatgtgattaagaaatgggtcttgagtcctgtgctgttggcaaagtgccaggcacagttggggaggggggggtccttaacaagcgtgactttgctcattctgtcatcactaaggcaataaacctttgccaggtgaaagcacgagttaacttactaagtgcccaacaaggacgatgttttcacagccctgtgaggtaggagctgtgaaggaccccatcttacaggtggaacaatggaggttcagagaggttcactgacccaagactgcacagagccatgccttgcattcatatgtgaccataaagcttgaatttgtcccagtttgggctgggcgcagtggctcacgcctgtaatcccagcactttgggaggctgaggcgggcagatcacgtgagaccaggagttcaagaccagcctggataacacagcaaaaccctgtttctactaaaaattt

SEQ ID NO: 156759 - DNA, 3267 bp, Homo sapiens
  Payload ID: 10729
  Gene Symbol: MYO1G
  Gene Name: myosin IG
  Uniprot ID: B0I1T2
  ENST ID: ENST00000258787
  CDS Start-End: 138-3194
actttacaccagcactggaggaggctggtggggcagggcgggggcggtggggcctcccctagccttccctccccctctccttcactgtccttccagcaggcacaggaaggtgaggcaaggtgtttccagccggcaggatggaggacgaggaaggccctgagtatggcaaacctgactttgtgcttttggaccaagtgaccatggaggacttcatgaggaacctgcagctcaggttcgagaagggccgcatctacacctacatcggtgaggtgctggtgtccgtgaacccctaccaggagctgcccctgtatgggcctgaggccatcgccaggtaccagggccgtgagctctatgagcggccaccccatctctatgctgtggccaacgccgcctacaaggcaatgaagcaccggtccagggacacctgcatcgtcatctcaggggagagtggggcagggaagacagaagccagtaagcacatcatgcagtacatcgctgctgtcaccaatccaagccagagggctgaggtggagagggtcaaggacgtgctgctcaagtccacctgtgtgctggaggcctttggcaatgcccgcaccaaccgcaatcacaactccagccgctttggcaagtacatggacatcaactttgacttcaagggggacccgatcggaggacacatccacagctacctactggagaagtctcgggtcctcaagcagcacgtgggtgaaagaaacttccacgccttctaccaattgctgagaggcagtgaggacaagcagctgcatgaactgcacttggagagaaaccctgctgtatacaatttcacacaccagggagcaggactcaacatgactgtgcacagtgccttggacagtgatgagcagagccaccaggcagtgaccgaggccatgagggtcatcggcttcagtcctgaagaggtggagtctgtgcatcgcatcctggctgccatattgcacctgggaaacatcgagtttgtggagacggaggagggtgggctgcagaaggagggcctggcagtggccgaggaggcactggtggaccatgtggctgagctgacggccacaccccgggacctcgtgctccgctccctgctggctcgcacagttgcctcgggaggcagggaactcatagagaagggccacactgcagctgaggccagctatgcccgggatgcctgtgccaaggcagtgtaccagcggctgtttgagtgggtggtgaacaggatcaacagtgtcatggaaccccggggccgggatcctcggcgtgatggcaaggacacagtcattggcgtgctggacatctatggcttcgaggtgtttcccgtcaacagtttcgagcagttctgcatcaactactgcaacgagaagctgcagcagctattcatccagctcatcctgaagcaggaacaggaagagtacgagcgcgagggcatcacctggcagagcgttgagtatttcaacaacgccaccattgtggatctggtggagcggccccaccgtggcatcctggccgtgctggacgaggcctgcagctctgctggcaccatcactgaccgaatcttcctgcagaccctggacatgcaccaccgccatcacctacactacaccagccgccagctctgccccacagacaagaccatggagtttggccgagacttccggatcaagcactatgcaggggacgtcacgtactccgtggaaggcttcatcgacaagaacagagatttcctcttccaggacttcaagcggctgctgtacaacagcacggaccccactctacgggccatgtggccggacgggcagcaggacatcacagaggtgaccaagcgccccctgacggctggcacactcttcaagaactccatggtggccctggtggagaaccttgcctccaaggagcccttctacgtccgctgcatcaagcccaatgaggacaaggtagctgggaagctggatgagaaccactgtcgccaccaggtcgcatacctggggctgctggagaatgtgagggtccgcagggctggcttcgcttcccgccagccctactctcgattcctgctcaggtacaagatgacctgtgaatacacatggcccaaccacctgctgggctccgacaaggcagccgtgagcgctctcctggagcagcacgggctgcagggggacgtggcctttggccacagcaagctgttcatccgctcaccccggacactggtcacactggagcagagccgagcccgcctcatccccatcattgtgctgctattgcagaaggcatggcggggcaccttggcgaggtggcgctgccggaggctgagggctatctacaccatcatgcgctggttccggagacacaaggtgcgggctcacctggctgagctgcagcggcgattccaggctgcaaggcagccgccactctacgggcgtgaccttgtgtggccgctgccccctgctgtgctgcagcccttccaggacacctgccacgcactcttctgcaggtggcgggcccggcagctggtgaagaacatccccccttcagacatgccccagatcaaggccaaggtggccgccatgggggccctgcaagggcttcgtcaggactggggctgccgacgggcctgggcccgagactacctgtcctctgccactgacaatcccacagcatcaagcctgtttgctcagcgactaaagacacttcaggacaaagatggcttcggggctgtgctcttttcaagccatgtccgcaaggtgaaccgcttccacaagatccggaaccgggccctcctgctcacagaccagcacctctacaagctggaccctgaccggcagtaccgggtgatgcgggccgtgccccttgaggcggtgacggggctgagcgtgaccagcggaggagaccagctggtggtgctgcacgcccgcggccaggacgacctcgtggtgtgcctgcaccgctcccggccgccattggacaaccgcgttggggagctggtgggcgtgctggccgcacactgccagggggagggccgcaccctggaggttcgcgtctccgactgcatcccactaagccatcgcggggtccggcgcctcatctccgtggagcccaggccggagcagccagagcccgatttccgctgcgctcgcggctccttcaccctgctctggcccagccgctgagcgcccgcacccgccgcaccccgaggccgccaattgtccgccccgccagcgctgcaaataaaccttctgagtc

SEQ ID NO: 156760 - DNA, 3033 bp, Homo sapiens
  Payload ID: 10729
  Gene Symbol: MYO1G
  Gene Name: myosin IG
  ENST ID: ENST00000495831
  CDS Start-End: 109-237
ggggcagggcgggggcggtggggcctcccctagccttccctccccctctccttcactgtccttccagcaggcacaggaaggtgaggcaaggtgtttccagccggcaggatggaggacgaggaaggccctgagtatggcaaacctgactttgtgcttttggaccaagtgaccatggaggacttcatgaggaacctgcagctcaggggagagtggggcagggaagacagaagccagtaagcacatcatgcagtacatcgctgctgtcaccaatccaagccagagggctgaggtggagagggtcaaggacgtgctgctcaagtccacctgtgtgctggaggcctttggcaatgcccgcaccaaccgcaatcacaactccagccgctttggcaagtacatggacatcaactttgacttcaagggggacccgatcggaggacacatccacagctacctactggagaagtctcgggtcctcaagcagcacgtgggtgaaagaaacttccacgccttctaccaattgctgagaggcagtgaggacaagcagctgcatgaactgcacttggagagaaaccctgctgtatacaatttcacacaccagggagcaggactcaacatgactgtgcacagtgccttggacagtgatgagcagagccaccaggcagtgaccgaggccatgagggtcatcggcttcagtcctgaagaggtggagtctgtgcatcgcatcctggctgccatattgcacctgggaaacatcgagtttgtggagacggaggagggtgggctgcagaaggagggcctggcagtggccgaggaggcactggtggaccatgtggctgagctgacggccacaccccgggacctcgtgctccgctccctgctggctcgcacagttgcctcgggaggcagggaactcatagagaagggccacactgcagctgaggccagctatgcccgggatgcctgtgccaaggcagtgtaccagcggctgtttgagtgggtggtgaacaggatcaacagtgtcatggaaccccggggccgggatcctcggcgtgatggcaaggacacagtcattggcgtgctggacatctatggcttcgaggtgtttcccgtcaacagtttcgagcagttctgcatcaactactgcaacgagaagctgcagcagctattcatccagctcatcctgaagcaggaacaggaagagtacgagcgcgagggcatcacctggcagagcgttgagtatttcaacaacgccaccattgtggatctggtggagcggccccaccgtggcatcctggccgtgctggacgaggcctgcagctctgctggcaccatcactgaccgaatcttcctgcagaccctggacatgcaccaccgccatcacctacactacaccagccgccagctctgccccacagacaagaccatggagtttggccgagacttccggatcaagcactatgcaggggacgtcacgtactccgtggaaggcttcatcgacaagaacagagatttcctcttccaggacttcaagcggctgctgtacaacagcacggaccccactctacgggccatgtggccggacgggcagcaggacatcacagaggtgaccaagcgccccctgacggctggcacactcttcaagaactccatggtggccctggtggagaaccttgcctccaaggagcccttctacgtccgctgcatcaagcccaatgaggacaaggtagctgggaagctggatgagaaccactgtcgccaccaggtcgcatacctggggctgctggagaatgtgagggtccgcagggctggcttcgcttcccgccagccctactctcgattcctgctcaggtacaagatgacctgtgaatacacatggcccaaccacctgctgggctccgacaaggcagccgtgagcgctctcctggagcagcacgggctgcagggggacgtggcctttggccacagcaagctgttcatccgctcaccccggacactggtcacactggagcagagccgagcccgcctcatccccatcattgtgctgctattgcagaaggcatggcggggcaccttggcgaggtggcgctgccggaggctgagggctatctacaccatcatgcgctggttccggagacacaaggtgcgggctcacctggctgagctgcagcggcgattccaggctgcaaggcagccgccactctacgggcgtgaccttgtgtggccgctgccccctgctgtgctgcagcccttccaggacacctgccacgcactcttctgcaggtggcgggcccggcagctggtgaagaacatccccccttcagacatgccccagatcaaggccaaggtggccgccatgggggccctgcaagggcttcgtcaggactggggctgccgacgggcctgggcccgagactacctgtcctctgccactgacaatcccacagcatcaagcctgtttgctcagcgactaaagacacttcaggacaaagatggcttcggggctgtgctcttttcaagccatgtccgcaaggtgaaccgcttccacaagatccggaaccgggccctcctgctcacagaccagcacctctacaagctggaccctgaccggcagtaccgggtgatgcgggccgtgccccttgaggcggtgacggggctgagcgtgaccagcggaggagaccagctggtggtgctgcacgcccgcggccaggacgacctcgtggtgtgcctgcaccgctcccggccgccattggacaaccgcgttggggagctggtgggcgtgctggccgcacactgccagggggagggccgcaccctggaggttcgcgtctccgactgcatcccactaagccatcgcggggtccggcgcctcatctccgtggagcccaggccggagcagccagagcccgatttccgctgcgctcgcggctccttcaccctgctctggcccagccgctgagcgcccgcacccgccgcaccccgaggccgccaattgtccgccccgccagcgctgcaaataaaccttctgagtcagcc

SEQ ID NO: 156761 - DNA, 2599 bp, Homo sapiens
  Payload ID: 10729
  Gene Symbol: MYO1G
  Gene Name: myosin IG
  ENST ID: ENST00000464434
  CDS Start-End: 128-760
agcactggaggaggctggtggggcagggcgggggcggtggggcctcccctagccttccctccccctctccttcactgtccttccagcaggcacaggaaggtgaggcaaggtgtttccagccggcaggatggaggacgaggaaggccctgagtatggcaaacctgactttgtgcttttggaccaagtgaccatggaggacttcatgaggaacctgcagctcaggttcgagaagggccgcatctacacctacatcggtgaggtgctggtgtccgtgaacccctaccaggagctgcccctgtatgggcctgaggccatcgccaggtaccagggccgtgagctctatgagcggccaccccatctctatgctgtggccaacgccgcctacaaggcaatgaagcaccggtccagggacacctgcatcgtcatctcaggggagagtggggcagggaagacagaagccagtaagcacatcatgcagtacatcgctgctgtcaccaatccaagccagagggctgaggtggagagggtcaaggacgtgctgctcaagtccacctgtgtgctggaggcctttggcaatgcccgcaccaaccgcaatcacaactccagccgctttggcaagtacatggacatcaactttgacttcaagggggacccgatcggaggacacatccacagctacctactggagaaggtgggcagtctcgggtcctcaagcagcacgtgggtgaaagaaacttccacgccttctaccaattgctgagaggcagtgaggacaagcagctgcatgaactgcacttggagagaaaccctgctgtatacaatttcacacaccagggagcaggactcaacatgactgtgcacagtgccttggacagtgatgagcagagccaccaggcagtgaccgaggccatgagggtcatcggcttcagtcctgaagaggtggagtctgtgcatcgcatcctggctgccatattgcacctgggaaacatcgagtttgtggagacggaggagggtgggctgcagaaggagggcctggcagtggccgaggaggcactggtggaccatgtggctgagctgacggccacaccccgggacctcgtgctccgctccctgctggctcgcacagttgcctcgggaggcagggaactcatagagaagggccacactgcagctgaggccagctatgcccgggatgcctgtgccaaggcagtgtaccagcggctgtttgagtgggtggtgaacaggatcaacagtgtcatggaaccccggggccgggatcctcggcgtgatggcaaggacacagtcattggcgtgctggacatctatggcttcgaggtgtttcccgtcaacagtttcgagcagttctgcatcaactactgcaacgagaagctgcagcagctattcatccagctcatcctgaagcaggaacaggaagagtacgagcgcgagggcatcacctggcagagcgttgagtatttcaacaacgccaccattgtggatctggtggagcggccccaccgtggcatcctggccgtgctggacgaggcctgcagctctgctggcaccatcactgaccgaatcttcctgcagaccctggacatgcaccaccgccatcacctacactacaccagccgccagctctgccccacagacaagaccatggagtttggccgagacttccggatcaagcactatgcaggggacgtcacgtaagggccccctcccacccacatccctggctttcccacaggcaccatggcatgtgtcatggggcaggagcgcttcaggggagtggctcggagacaggtgttatggccacttctgccacccccacccctttaagacactgaaacatgccggacagcagattcacaagtgaagagcaggaaacagggtttgaggatagtggttaaccatggctgcattcttctgggagcctttaaaaaatacccacgtctcatgtctgggcccaaccctataccagcatctgtggggtggggggcttcaggctggtgatgtgggggtggggagggagtggaaggtgcaggggggccaagattctgcatttctaacaagctcccaggtgaggcctcgctaccatacttggaccacgctcccagtgccaaagcccaggtgtcttcaggggttgtcatgatggctattaacttatgtgttgcttgccgcatcccaaaacgatttaaggtgactcacatcaaggtataagtgtttcatgagaacttctcaaggagagggaatagaatagatgatgacaacaaagcagcccaatatcatctacctttatctgttcgcaaaatctacacccatgaggtcgctcatgcctgtaaccccagcactttgggaggccaaagtgggtggatcacctgaggccaagagttcgagaccagcctggccaacatggcaaaacctcatctgtactaaaaatataaaaattatccgggcacgatgacgcgtgcctgtaatgccagttgctcgggaggctgaggcacaagaactgcttgaacctgggaggtagaggttgtggcgaactgagatcgcaccactgcactccagcctgggcaagagagtgagactatttctc

SEQ ID NO: 156762 - DNA, 4364 bp, Homo sapiens
  Payload ID: 10730
  Gene Symbol: MYO1H
  Gene Name: myosin IH
  ENST ID: ENST00000310903
  CDS Start-End: 59-3175
aacttttgaatggctcaagaggaatagttgttaacaacctgctctccctctgtgcgtgatggaatccaagaaagaagacgtgaggaggaaacacatccgtctgcacatggaaggggcgctgactgcccgggacaaggtcggggttcaggattttgtgctattggacgcgtacaccagcgaatctgcctttgtcgacaacctccgcaagcgtttcagcgagaacctcatatacacatatattggcaccctccttgtgtctgtgaatccataccaggagctcggaatctacactgtgagccagatggaactttatcaaggggtcaatttctttgaactgccaccacatgtctacgctatagccgacaacgcttaccgaatgatgtgtgctgaactaaataaccatttcatcctcatttctggagagagtggggcagggaaaacagaggcctccaagaaaattctcgagtattttgcagtgacctgcccaatgacccagtcactacaaatagcccgtgacagactgctgttctccaacccagtgctggaggcttttggaaatgccagaacgctccggaatgacaactccagcagatttgggaaatacatggatatacaatttgattttcagggcattcccgtaggtgggcatatcatcagttacttgatagagaagtcccgagttgtctaccaaaacgaaggcgagcggaatttccacatcttctaccagctgctggcaggtggcgaagaggagcgcctgtcttacctgggactcgagcgagacccccagctgtataaatacctctcacagggtcattgtgccaaagagtcatccattagtgacaagaatgactggaaaactgtttccaacgccttttctgtcattgattttactgaagctgacctcgagaatctctttggaattattgccagtgtcttacacctggggaacattggttttgaagaagacgaccaaggctgtgccactatcccagacacccatgagatcaagtggatagccaagctcctgggggtccacccatcagtccttctggaagctctcacccacagaaaaattgaagccaaaactgaggaggtgatctgcccgttgacactagaactctctgtctacgctagagatgcaatggcaaaggctgtttatggacgaacgtttacttggctggtcaacaaaatcaattcctccttagttaacaaggatttcaccaggaaaactgtaattggattactggacatctatgggtttgaagtctttgacaagaatggttttgaacagttctgtataaattactgcaatgagaaactccagcaactgttaattgagaggactctaaaagcagaacaggcagaatatgaaatggaaggcatagagtgggagccaattaaatatttcaacaacaagatcatctgtgatttggtagaagagagacataaaggaatcatatctattctggatgaagaatgcattcggcctggtcctgctacagacttgagtttcctggagaaattggaagagaaagtgggcaaacatgcacacttcgaaacccgtaagctggctggtccaaagggccgaaagaggattggctggatggagttccgactcctccactatgcaggagaggtcacatactgcaccaagggattcttggaaaaaaacaatgatcttctttacagacatctgaaagaagtgctgtgcaagtccaagaacattatcctgagggaatgcttcctgctggccgagttagaaaaccggaggaggcccccaacagtggggactcagtttaaaaacagtctgagcagccttctagaaaccctcatctctaaggagccctcctacatccgttgcatcaagcccaacgacaggaaagaacccagcaaatttgatgacttcctcataaggcatcagatcaaatacctggggctgatggagcacctgcgggtgagacgggctggttttgcataccgaaggaaatacgagcatttcttgcaaaggtacaagtccttatgcccagacacctggccgcactggcacgggcctccagcagagggcgtggaacggctgatcaagtacatcggctacaaacccgaggaatacaagttaggcaaaaccaaaatattcattcgtttccccagaactctgtttgctaccgaagatgcctttgaatttagtaaacatcaactagttgcaagaatccaagccacttacaaacgctgcctaggaaggagagaatacgtgaaaaaaagacaagcagccatcaaactggaagcccactggcgtggggccctggctcggaaggcaatccaaaggagaaagtgggccgtgcggattatcagaaagttcattaaaggattcatcagtcgcaacaaacccctctgtcctgacaacgaggaatttatcgtgtttgtgcggaagaattacatcttgaatctccggtatcaccttccaaagactgtcctggacaagagctggctgaggcctcctggcatcttggaaaatgcatcagatctgctcaggaaaatgtgcgtgaggaacctggtgcagaagtactgccgcgggatcacagctgagcggaaagcaatgatgcagcaaaaggtagttacaagtgaaatcttcaggggaaggaaagacggctacacagaaagtttaaatcaaccctttgtcaacagtcggatagatgaaggagacattaatccgaaagtgcttcagctaattagccatgagaaaatccagtatggtgtcccggtcattaaatatgacagaaaaggcttcaaagcacggcagcggcaactcattcttactcagaaagcagcttacgtggtggaacttgccaaaatcaagcagaaaatagagtactcagctctcaaaggtgtctccactagcaatctgagtgatggaatcttagtcattcatgtttcaccagaggacagcaagcaaaagggggatgccgttttgcagtgtggacacgtgtttgaagcagttactaaactcgtcatgctggttaagaaggagaacattgtcaatgttgttcaaggaagtttacagttttttattagtccgggaaaagaaggcacaatagttttcgacactggactggaagaacaagtctataaaaataaaaatggacaattaacagtggtgtcagtccggaggaagtcctgatagaggatgacgtctgacctctaccatcgccatttttgctccaactgaggaaactacaggggaagtggggattggatccagttagctacctcttcaaggtaccaggcccgcagcactaacagatcacatctgaagaaactgaggggcgttaggccaaagcctaatcccagctcctcagctgccccatggcaccttatttaaaatgtcaccttctggaagcagaccccaggtcacccgaaggcgcaattctaaacaccctcgacaggatctatgttcagtgcgcagtccaacgtgtcattagagggtgggcaagattctctacctctgtcaagctgccctgagacatgatgaaatactgtgtacagcaagttctcaaataacatttcgttatatgttgataagacatctgattcctgggcagggccactgtctgggtggagtctgtatgttctccccatgtctctgggtttcttctgggtgctctggtttcctcccacgtccccaaggtgtgtgtgtcaggtgcactggcgtgtctatgcggtcccagtctgagtgagtgtgggtgcgtgagccccgtgagaggaggacatcctgtccagggtgggtcccgccttctgccctgagctgctgggattgggctctggccatctgcaaccctgaacgtgcaggttggagaacgaatgaatacaaattttattgtaaaataaaaatgtatataaagcatatgagcacacaaatggacaataaatgccacagcgcaaaagcgtgtagcgagcctgccacgcttgtgactggggaggggctccgtataatctcacctttgcaagcgtttatttactgatgtatgcggccaccactgtgaccaccatcacttaccgattcaccaaaacttaggtaatatggtcttatttttgatttaattaaatatacgtgtagctcatgtatttcacagtttaatatgagaagtgctttggtctttatttagaaattgggtgatgtttttgtgcccagcaacatgctgtaggaatttaactcttgtttacatccattagcctcatggttttgcttcaagtctcagcttccaagaacctatcgatgacttactgtgcatggtctgagactaagtaaaggaaatttcctaaagctgtgaaatttgaattttgctttaaataaatggaactcacatgtg

SEQ ID NO: 156763 - DNA, 4258 bp, Homo sapiens
  Payload ID: 10730
  Gene Symbol: MYO1H
  Gene Name: myosin IH
  Uniprot ID: Q8N1T3
  ENST ID: ENST00000431443
  CDS Start-End: 1-3069
atggaaggggcgctgactgcccgggacaaggtcggggttcaggattttgtgctattggacgcgtacaccagcgaatctgcctttgtcgacaacctccgcaagcgtttcagcgagaacctcatatacacatatattggcaccctccttgtgtctgtgaatccataccaggagctcggaatctacactgtgagccagatggaactttatcaaggggtcaatttctttgaactgccaccacatgtctacgctatagccgacaacgcttaccgaatgatgtgtgctgaactaaataaccatttcatcctcatttctggagagagtggggcagggaaaacagaggcctccaagaaaattctcgagtattttgcagtgacctgcccaatgacccagtcactacaaatagcccgtgacagactgctgttctccaacccagtgctggaggcttttggaaatgccagaacgctccggaatgacaactccagcagatttgggaaatacatggatatacaatttgattttcagggcattcccgtaggtgggcatatcatcagttacttgatagagaagtcccgagttgtctaccaaaacgaaggcgagcggaatttccacatcttctaccagctgctggcaggtggcgaagaggagcgcctgtcttacctgggactcgagcgagacccccagctgtataaatacctctcacagggtcattgtgccaaagagtcatccattagtgacaagaatgactggaaaactgtttccaacgccttttctgtcattgattttactgaagctgacctcgagaatctctttggaattattgccagtgtcttacacctggggaacattggttttgaagaagacgaccaaggctgtgccactatcccagacacccatgagatcaagtggatagccaagctcctgggggtccacccatcagtccttctggaagctctcacccacagaaaaattgaagccaaaactgaggaggtgatctgcccgttgacactagaactctctgtctacgctagagatgcaatggcaaaggctgtttatggacgaacgtttacttggctggtcaacaaaatcaattcctccttagttaacaaggatttcaccaggaaaactgtaattggattactggacatctatgggtttgaagtctttgacaagaatggttttgaacagttctgtataaattactgcaatgagaaactccagcaactgttaattgagaggactctaaaagcagaacaggcagaatatgaaatggaaggcatagagtgggagccaattaaatatttcaacaacaagatcatctgtgatttggtagaagagagacataaaggaatcatatctattctggatgaagaatgcattcggcctggtcctgctacagacttgagtttcctggagaaattggaagagaaagtgggcaaacatgcacacttcgaaacccgtaagctggctggtccaaagggccgaaagaggattggctggatggagttccgactcctccactatgcaggagaggtcacatactgcaccaagggattcttggaaaaaaacaatgatcttctttacagacatctgaaagaagtgctgtgcaagtccaagaacattatcctgagggaatgcttcctgctggccgagttagaaaaccggaggaggcccccaacagtggggactcagtttaaaaacagtctgagcagccttctagaaaccctcatctctaaggagccctcctacatccgttgcatcaagcccaacgacaggaaagaacccagcaaatttgatgacttcctcataaggcatcagatcaaatacctggggctgatggagcacctgcgggtgagacgggctggttttgcataccgaaggaaatacgagcatttcttgcaaaggtacaagtccttatgcccagacacctggccgcactggcacgggcctccagcagagggcgtggaacggctgatcaagtacatcggctacaaacccgaggaatacaagttaggcaaaaccaaaatattcattcgtttccccagaactctgtttgctaccgaagatgcctttgaatttagtaaacatcaactagttgcaagaatccaagccacttacaaacgctgcctaggaaggagagaatacgtgaaaaaaagacaagcagccatcaaactggaagcccactggcgtggggccctggctcggaaggcaatccaaaggagaaagtgggccgtgcggattatcagaaagttcattaaaggattcatcagtcgcaacaaacccctctgtcctgacaacgaggaatttatcgtgtttgtgcggaagaattacatcttgaatctccggtatcaccttccaaagactgtcctggacaagagctggctgaggcctcctggcatcttggaaaatgcatcagatctgctcaggaaaatgtgcgtgaggaacctggtgcagaagtactgccgcgggatcacagctgagcggaaagcaatgatgcagcaaaaggtagttacaagtgaaatcttcaggggaaggaaagacggctacacagaaagtttaaatcaaccctttgtcaacagtcggatagatgaaggagacattaatccgaaagtgcttcagctaattagccatgagaaaatccagtatggtgtcccggtcattaaatatgacagaaaaggcttcaaagcacggcagcggcaactcattcttactcagaaagcagcttacgtggtggaacttgccaaaatcaagcagaaaatagagtactcagctctcaaaggtgtctccactagcaatctgagtgatggaatcttagtcattcatgtttcaccagaggacagcaagcaaaagggggatgccgttttgcagtgtggacacgtgtttgaagcagttactaaactcgtcatgctggttaagaaggagaacattgtcaatgttgttcaaggaagtttacagttttttattagtccgggaaaagaaggcacaatagttttcgacactggactggaagaacaagtctataaaaataaaaatggacaattaacagtggtgtcagtccggaggaagtcctgatagaggatgacgtctgacctctaccatcgccatttttgctccaactgaggaaactacaggggaagtggggattggatccagttagctacctcttcaaggtaccaggcccgcagcactaacagatcacatctgaagaaactgaggggcgttaggccaaagcctaatcccagctcctcagctgccccatggcaccttatttaaaatgtcaccttctggaagcagaccccaggtcacccgaaggcgcaattctaaacaccctcgacaggatctatgttcagtgcgcagtccaacgtgtcattagagggtgggcaagattctctacctctgtcaagctgccctgagacatgatgaaatactgtgtacagcaagttctcaaataacatttcgttatatgttgataagacatctgattcctgggcagggccactgtctgggtggagtctgtatgttctccccatgtctctgggtttcttctgggtgctctggtttcctcccacgtccccaaggtgtgtgtgtcaggtgcactggcgtgtctatgcggtcccagtctgagtgagtgtgggtgcgtgagccccgtgagaggaggacatcctgtccagggtgggtcccgccttctgccctgagctgctgggattgggctctggccatctgcaaccctgaacgtgcaggttggagaacgaatgaatacaaattttattgtaaaataaaaatgtatataaagcatatgagcacacaaatggacaataaatgccacagcgcaaaagcgtgtagcgagcctgccacgcttgtgactggggaggggctccgtataatctcacctttgcaagcgtttatttactgatgtatgcggccaccactgtgaccaccatcacttaccgattcaccaaaacttaggtaatatggtcttatttttgatttaattaaatatacgtgtagctcatgtatttcacagtttaatatgagaagtgctttggtctttatttagaaattgggtgatgtttttgtgcccagcaacatgctgtaggaatttaactcttgtttacatccattagcctcatggttttgcttcaagtctcagcttccaagaacctatcgatgacttactgtgcatggtctgagactaagtaaaggaaatttcctaaagctgtgaaatttgaattttgctttaaataaatggaactcacatgtg

SEQ ID NO: 156764 - DNA, 535 bp, Homo sapiens
  Payload ID: 10730
  Gene Symbol: MYO1H
  Gene Name: myosin IH
  ENST ID: ENST00000543960
  CDS Start-End: 1-381
cagcggcaactcattcttactcagaaagcagcttacgtggtggaacttgccaaaatcaagcagaaaatagagtactcagctctcaaaggtgtctccactagcaatctgagtgatggaatcttagtcattcatgtttcaccagaggacagcaagcaaaagggggatgccgttttgcagtgtggacacgtgtttgaagcagttactaaactcgtcatgctggttaagaaggagaacattgtcaatgttgttcaaggaagtttacagttttttattagtccgggaaaagaaggcacaatagttttcgacactggactggaagaacaagtctataaaaataaaaatggacaattaacagtggtgtcagtccggaggaagtcctgatagaggatgacgtctgacctctaccatcgccatttttgctccaactgaggaaactacaggggaagtggggattggatccagttagctacctcttcaagctacagaatcatgcagaactgtggccccaaaagctgcagggacaatagtaacctgg

SEQ ID NO: 156765 - DNA, 5581 bp, Homo sapiens
  Payload ID: 10731
  Gene Symbol: MYO3A
  Gene Name: myosin IIIA
  Uniprot ID: Q8NEV4
  ENST ID: ENST00000265944
  CDS Start-End: 167-5017
agggagcgcccgtagccagcgcccccgtaaagaaataaggaggcgcccggcttcccgcccaggcccagggccccagtgcagcctggacacagtattcaaagttttggcgtctgagcattgttatgcgttattttcaagctttgctaacggtttttaaacctttgagatgtttccattaattggaaaaacaatcatctttgataactttcctgatccttctgatacatgggaaatcactgagacaattggcaaaggaacttatgggaaagtttttaaagtattgaataagaaaaatggccaaaaagcagcagtcaaaattcttgatccaattcacgatattgacgaagagattgaagcagaatataacatcttaaaagcactttctgaccaccctaatgtggtcagattctatgggatatactttaagaaggataaagtaaatggagacaagctgtggttggttcttgagctctgcagtggaggatcagtgactgaccttgtgaaaggatttctgaagaggggtgaaagaatgagtgagcctctaattgcctatattttacatgaagcactaatgggacttcaacatttgcataacaacaaaactatccacagagatgtgaaaggcaataacattctattgaccacggaaggtggagtgaaactagtagattttggtgtgtctgcacagctcaccagtacccggcaccgtcggaacacatccgtaggaacaccgttttggatggctcctgaggtgattgcatgtgaacagcaattggataccacttatgacgccagatgtgacacttggtccctgggtatcacggccattgagctgggtgatggagatcctccactagctgaccttcatcccatgagagcactcttcaaaataccaaggaatccacccccaaaactaaggcagcctgagctatggtcagcagaattcaatgacttcataagcaagtgcttgactaaagattatgaaaagcgtccaacagtgtcagaacttttacagcataaattcattactcaaattgagggcaaagatgtgatgctacaaaaacaactaacggaattcattggcatccatcaatgcatgggaggcacagaaaaggccagacgtgaacgtattcacacgaagaaagggaacttcaaccgacctctaatatccaatctgaaggatgtagatgatttagcaaccctagaaattttggatgagaatacagtctcagagcaacttgagaagtgttattccagagatcagatctacgtctatgtgggagacatactcattgctcttaacccttttcagagtctgggtctttactccacaaagcattccaaactatatattggatcaaagagaactgccagtcctcctcacatttttgcaatggctgacttaggatatcaatctatgataacatataattcagatcagtgcattgttatttctggagaaagtggtgctggaaagactgaaaatgctcatcttttagttcagcagctgacagtgcttggaaaggctaataacagaaccttgcaagagaagattttacaagtgaacaatttggtagaagcctttggcaatgcctgcactattataaatgacaattctagcagatttggaaaatacttagaaatgaaattcacctcttctggagcggtagtgggagcacagatttctgaatatctcctggaaaaatcccgagttatccaccaagctattggagaaaaaaattttcatattttttactacatttatgctggtttggctgaaaagaagaaactagcccattacaaactgcctgaaaataagcctcccaggtacctacaaaatgaccacctcagaacagtacaagacatcatgaataatagtttctataaatcccagtatgaattaattgagcaatgtttcaaagtcataggttttacaatggagcaacttggtagtatatacagcatactcgctgcaatcttgaatgttggcaacattgaattttcttctgtggcaactgaacaccagattgacaagagccacatttctaatcatacagccctggagaactgtgcttctttgctttgcattcgggcagatgagctacaagaagctctcacctcccactgtgtggtcactagaggagaaacaattatacgacccaatactgtagaaaaagctaccgatgtcagggatgccatggctaaaactttatatggacgtctctttagttggatagtcaattgcattaacagtttgttgaagcatgactcatcaccaagtgggaatggtgatgagctgagcattggcattcttgatatatttggctttgaaaatttcaaaaaaaattccttcgagcagctgtgcattaacattgcaaatgaacaaattcagtattattataatcaacatgtgtttgcatgggaacagaatgaatacctaaatgaagatgtggatgctagagttattgaatatgaggataactggcccctcttagatatgtttctgcaaaagccaatgggtttactttccctacttgatgaagaaagtagatttcccaaggccactgaccagactcttgtagaaaaatttgaaggtaacctgaaatcacaatacttctggagacccaaaagaatggaacttagttttggaattcaccattatgcaggaaaggtcctctataatgcaagtggattcttagccaaaaacagagacactcttcctactgacattgtgctacttttgaggtcatccgacaacagtgtaattaggcaactagtcaaccaccctctgaccaaaacaggtaatctgccacattctaaaactaaaaatgttataaactatcaaatgaggacttcagaaaaattaatcaacctggcaaagggcgacactggagaagccacacgtcatgccagagagacaaccaacatgaaaacacaaacggttgcatcatattttagatattccctgatggatttgttgtctaaaatggtggtgggccaacctcattttgtccgttgcatcaaaccaaatagtgagcgtcaggcaagaaaatatgacaaagagaaagttctgctacagcttcggtacacaggaattctggaaacagcaagaattcgaagactaggattctcccatcggatactttttgctaactttataaagcggtactaccttctctgctacaagtcgagcgaggagccccgcatgagccctgacacctgtgccaccattttggaaaaagctggtctcgataactgggctcttggaaaaacaaaagtgttccttaagtattatcacgtggagcagttaaatctaatgcgaaaggaagctattgacaagcttattttgattcaagcttgtgtcagagcattcttgtgttcaagaagataccaaaaaatacaggagaaaaggaaagaaagcgctataataatacagtcagctgcaagaggacaccttgtcaggaaacaaagaaaagaaattgttgacatgaaaaacacagcagtaacaaccattcaaacttctgatcaggaattcgactacaagaaaaactttgaaaatacaagggaatctttcgtgaagaaacaagcagaaaatgcaatctctgctaatgaaagattcatttcagctccaaataataaaggaagtgtatctgtagtgaagacttccactttcaaacctgaagaggaaaccaccaatgctgtggagagtaacaacagagtgtatcagactccaaaaaaaatgaataatgtgtatgaggaagaggttaagcaagaattctaccttgtagggccagaagtaagccccaaacagaagtctgtcaaagacctggaagagaacagcaatctaaggaaagtggagaaagaggaagctatgatccagagttactatcagaggtacacagaggagaggaattgtgaagagtcaaaagcagcatatctagaaaggaaggccatatcagaaaggccaagctacccagtgccttggttagctgaaaatgagacttcctttaaaaaaactttggaacctacacttagccaaaggtcaatttatcaaaatgcaaacagcatggaaaaagaaaagaagacatctgtagttacccagcgtgcaccgatatgcagccaggaggaaggcagaggccgtctgaggcatgagacagtcaaagagaggcaagttgaaccagtgacacaggcccaggaggaagaagataaagcagcggtattcattcagagcaaataccggggttacaagagaaggcagcagttgaggaaggacaagatgtcttcttttaagcatcagaggattgtcacaacaccaacagaagtagcaagaaacactcataatttgtattcctatcccacaaaacatgaggaaatcaataacatcaagaagaaggataacaaagactcgaaagcaacttcagaaagagaagcatgtggtttggcaattttttcaaaacagatatcaaagttatctgaagaatatttcattctgcagaaaaaattgaatgaaatgattttgtcacagcaactgaagtcactttatctgggtgtctcgcaccataagccaattaatagacgagtttcttctcagcagtgcctctcaggtgtctgtaaaggagaggagccaaaaatattgagacccccaagacgaccccggaaacccaaaacattaaataaccctgaagactccacatactattatctacttcataagtcaatccaagaagaaaaacgaagaccaaggaaagacagtcagggaaaattattagatttggaagatttctattataaggaatttttgcccagtcgttctggaccaaaggaacatagccctagtttaagagaacgaagaccacagcaagaactccagaatcaatgtattaaggctaatgaaaggtgctgggcggcggagagccccgagaaggaggaggagagagagccagcagccaacccctacgacttcaggaggctcctgcgcaaaacctcccagcgccggcgcctcgtccagcagtcctaaccgttcaacgaggcagtcaccgccgtcggaaggcgctggagcctgcggggcagcaggggccaagcaggcactctggggctggcaccagcaggcactgaagctgcggccctgatctccgcagaggctgcctgctgcgctcggccctcaagtgcccgggccggccttcgtgctccgaaacaagagacctgggagccctcgggaaacctcccccgacgctctctctcggaactcccgcaccctcctttctcaccagcccgccagttgtggcaaccctgtccttgttcccctaatctatcactttgttctttttttttgtgactcctgtggactccactgcgcctgggatctcgccaacccctctctcatttggggtgactgaattcacagatttttttttttattggaaacggcttttcttggccaacagaacacttgctagcggttgaatcttagagaaaaaagcccgggaggggtggggagaatttcgaagatgtatttcatctcaagcttgctctttctcttcctttggttattaaggtcactaaataaaggaagtgccttgga

SEQ ID NO: 156766 - DNA, 727 bp, Homo sapiens
  Payload ID: 10731
  Gene Symbol: MYO3A
  Gene Name: myosin IIIA
  ENST ID: ENST00000376301
  CDS Start-End: 12-605
aaacctttgagatgtttccattaattggaaaaacaatcatctttgataactttcctgatccttctgatacatgggaaatcactgagacaattggcaaaggaacttatgggaaagtttttaaagtattgaataagaaaaatggccaaaaagcagcagtcaaaattcttgatccaattcacgatattgacgaagagattgaagcagaatataacatcttaaaagcactttctgaccaccctaatgtggtcagattctatgggatatactttaagaaggataaagtaaatggagacaagctgtggttggttcttgagctctgcagtggaggatcagtgactgaccttgtgaaaggatttctgaagaggggtgaaagaatgagtgagcctctaattgcctatattttacatgaagcactaatgggacttcaacatttgcataacaacaaaactatccacagagatgtgaaaggcaataacattctattgaccacggaaggtggagtgaaactagtagattttggtgtgtctgcacagctcaccagtacccggcaccgtcggaacacatccgtaggaacaccgttttggatggctcctgaggtcagatagagttttgaggcagacaaacgtaatagctgatcctgtttgactttcctttttatgtgtactctatctctgtaagcattttggaatataacagaagaaactctcagttgtgttattttcatgtg

SEQ ID NO: 156767 - DNA, 2723 bp, Homo sapiens
  Payload ID: 10731
  Gene Symbol: MYO3A
  Gene Name: myosin IIIA
  Uniprot ID: Q8NEV4
  ENST ID: ENST00000376302
  CDS Start-End: 160-903
gcccgtagccagcgcccccgtaaagaaataaggaggcgcccggcttcccgcccaggcccagggccccagtgcagcctggacacagtattcaaagttttggcgtctgagcattgttatgcgttattttcaagctttgctaacggtttttaaacctttgagatgtttccattaattggaaaaacaatcatctttgataactttcctgatccttctgatacatgggaaatcactgagacaattggcaaaggaacttatgggaaagtttttaaagtattgaataagaaaaatggccaaaaagcagcagtcaaaattcttgatccaattcacgatattgacgaagagattgaagcagaatataacatcttaaaagcactttctgaccaccctaatgtggtcagattctatgggatatactttaagaaggataaagtaaatggagacaagctgtggttggttcttgagctctgcagtggaggatcagtgactgaccttgtgaaaggatttctgaagaggggtgaaagaatgagtgagcctctaattgcctatattttacatgaagcactaatgggacttcaacatttgcataacaacaaaactatccacagagatgtgaaaggcaataacattctattgaccacggaaggtggagtgaaactagtagattttggtgtgtctgcacagctcaccagtacccggcaccgtcggaacacatccgtaggaacaccgttttggatggctcctgaggtgattgcatgtgaacagcaattggataccacttatgacgccagatgtgacacttggtccctgggtatcacggccattgagctgggtgatggagatcctccactagctgaccttcatcccatgagagcactcttcaaaataccaaggtcagatgactaacattgggtccagtatctgcagcccgatttacttcctccagccaccaagtgttcatcatgctcttcatggagacgttcagatatattccaacaagttgggagcagaagatcctggaatattattctgcttcttctgagacattgtatttgttcagtagttgcatttccctggtctaagtaaaagagctttctcttgataatcagtgtgtctttctctcttttgctaggatttgatttcagaaaatagcagttcctcccaccctttatccattccccaatgagtcagtgaggcatcagagtccatagcctgtgcaagtgttttgctttgctttacctaccaatctagtaattttttactacttgctaagatttccctttgttcagaactttaaaataatattattaagaaaattatatataaaatttatccagaaaataatggttttaaacatgttagtattttgaatatgttaatataaaacaataaatttagaagaataacctcttttggtgccatgaaagcacttgactatttatgtggccccccactccttcatgtgtgtttcaacagattttcccctactatcctataaactaatttctttaaacactattttctatgagtggtggttagtcccttgatgtttcagataactaatgtgaaaagactgcctatatttattaaaggtgttatttttaaatatctttttaaggattttgccttaattataatgcagtgcacagccagagcctgtggtgacagggttccaaaacattagaatatttggcatctaactaaattattataagactaaaacatttgaattcatttttaattttgcctttgaatttcttgtcctatctagatgttccaaattataataccttggctatatatcatcctttacatactgcttattttgttaagtggagaaacaacattatggaaaagaatggaaaacctctatactaaatccaagacatttcattaattttgaagaaagcaggaaaaaaatctgtagtttctaattcctattgtcattcagtatgtaaggtgaagttctgtactgccttagctgttttaactgtggattaaaccatcatatttagtctgatgttattactcttgatgataatgccacatgaaggaaggatgacactgttgatagatattgtacctaggtaacaggcaatgtgcaaagtaattctagaaactgcatcatcttagttatttcttaattatgtctaccagcagtggaattccaagaatactgactatggtaatatggagaaaaagggaatctgaaaagctacccagttctgagtgttctgaaataatccaaactttgttattcaaagcaagccaataaatctcataaaaggaaattttcaggaggacaagaaacaaaacaacatttctggagaaaagaattacttcttttaatgtgcaaattagcaatcttcaaattgtcctaaggattgtgaaatgagcttagtcctgatctggggtagatgagtagctgcacttttctttaatgagcctgtacaaactgtacattaatttcattataagctatttaaggagtaatgcagaactgaagacaaagtatttccatttcactaatgaaaacaaagagctgttagaattaacataaagcagcacttcagcaaattcaactatcatggttgatcaatgttgcttgattacagagttagatcagcctcattttcaaatgatgttcctttgtattcaacgaatgtgccaaaaaatatatttgttcagcttaaactgaaaggaattaataaaattgttaaagttgt

SEQ ID NO: 156768 - DNA, 2203 bp, Homo sapiens
  Payload ID: 10731
  Gene Symbol: MYO3A
  Gene Name: myosin IIIA
  ENST ID: ENST00000543632
  CDS Start-End: 61-2055
gcgtctgagcattgttatgcgttattttcaagctttgctaacggtttttaaacctttgagatgtttccattaattggaaaaacaatcatctttgataactttcctgatccttctgatacatgggaaatcactgagacaattggcaaaggaacttatgggaaagtttttaaagtattgaataagaaaaatggccaaaaagcagcagtcaaaattcttgatccaattcacgatattgacgaagagattgaagcagaatataacatcttaaaagcactttctgaccaccctaatgtggtcagattctatgggatatactttaagaaggataaagtaaatggagacaagctgtggttggttcttgagctctgcagtggaggatcagtgactgaccttgtgaaaggatttctgaagaggggtgaaagaatgagtgagcctctaattgcctatattttacatgaagcactaatgggacttcaacatttgcataacaacaaaactatccacagagatgtgaaaggcaataacattctattgaccacggaaggtggagtgaaactagtagattttggtgtgtctgcacagctcaccagtacccggcaccgtcggaacacatccgtaggaacaccgttttggatggctcctgaggtgattgcatgtgaacagcaattggataccacttatgacgccagatgtgacacttggtccctgggtatcacggccattgagctgggtgatggagatcctccactagctgaccttcatcccatgagagcactcttcaaaataccaaggaatccacccccaaaactaaggcagcctgagctatggtcagcagaattcaatgacttcataagcaagtgcttgactaaagattatgaaaagcgtccaacagtgtcagaacttttacagcataaattcattactcaaattgagggcaaagatgtgatgctacaaaaacaactaacggaattcattggcatccatcaatgcatgggaggcacagaaaaggccagacgtgaacgtattcacacgaagaaagggaacttcaaccgacctctaatatccaatctgaaggatgtagatgatttagcaaccctagaaattttggatgagaatacagtctcagagcaacttgagaagtgttattccagagatcagatctacgtctatgtgggagacatactcattgctcttaacccttttcagagtctgggtctttactccacaaagcattccaaactatatattggatcaaagagaactgccagtcctcctcacatttttgcaatggctgacttaggatatcaatctatgataacatataattcagatcagtgcattgttatttctggagaaagtggtgctggaaagactgaaaatgctcatcttttagttcagcagctgacagtgcttggaaaggctaataacagaaccttgcaagagaagattttacaagtgaacaatttggtagaagcctttggcaatgcctgcactattataaatgacaattctagcagatttggaaaatacttagaaatgaaattcacctcttctggagcggtagtgggagcacagatttctgaatatctcctggaaaaatcccgagttatccaccaagctattggagaaaaaaattttcatattttttactacatttatgctggtttggctgaaaagaagaaactagcccattacaaactgcctgaaaataagcctcccaggtacctacaaaatgaccacctcagaacagtacaagacatcatgaataatagtttctataaatcccagtatgaattaattgagcaatgtttcaaagtcataggttttacaatggaggtgctgggcggcggagagccccgagaaggaggaggagagagagccagcagccaacccctacgacttcaggaggctcctgcgcaaaacctcccagcgccggcgcctcgtccagcagtcctaaccgttcaacgaggcagtcaccgccgtcggaaggcgctggagcctgcggggcagcaggggccaagcaggcactctggggctggcaccagcaggcactgaagctgcggccctgatctccgcagaggctgcctgctgcgctcggccctcaagtgcccgggccggccttcgtgctccgaaacaagagacctgggagccctcgggaaacctcccccgacgctctctctcggaactcccgcaccctcctttc

SEQ ID NO: 156769 - DNA, 5479 bp, Homo sapiens
  Payload ID: 10732
  Gene Symbol: MYO3B
  Gene Name: myosin IIIB
  Uniprot ID: Q8WXR4
  ENST ID: ENST00000317935
  CDS Start-End: 144-3899
ctagatcgaaagtcctttggtaatgatgtgtcatacattctagtcatcaaagacaccattttctgggcctgaagtgttctgctggtttttggaggaatgagaatccaatctctcataagccggattcagaaaataggtcatcgatgaaacatctgtatggattatttcactataatcctatgatgcttggacttgaatcacttccagatcccacagacacctgggaaattatagagaccattggtaaaggcacctatggcaaagtctacaaggtaactaacaagagagatgggagcctggctgcagtgaaaattctggatccagtcagtgatatggatgaagaaattgaggcagaatacaacattttgcagttccttcctaatcatcccaatgttgtaaagttttatgggatgttttacaaagcggatcactgtgtagggggacagctgtggctggtcctggagctgtgtaatgggggctcagtcactgagcttgtcaaaggtctactcagatgtggccagcggttggatgaagcaatgatctcatacatcttgtacggggccctcttgggccttcagcatttgcacaacaaccgaatcatccaccgtgatgtgaaggggaataacattcttctgacaacagaaggaggagttaagctcgttgactttggtgtttcagctcaactcaccagtacacgtctgcggagaaacacatctgttggcaccccgttctggatggcccctgaggtcattgcctgtgagcagcagtatgactcttcctatgacgctcgctgtgacgtctggtccttggggatcacagctattgaactgggggatggagaccctcccctctttgacatgcatcctgtgaaaacactctttaagattccaagaaatcctccacctactttacttcatccagaaaaatggtgtgaagaattcaaccactttatttcacagtgtcttattaaggattttgaaaggcgaccttccgtcacacatctccttgaccacccatttattaaaggagtacatggaaaagttctgtttctgcaaaaacagctggccaaggttctccaagaccagaagcatcaaaatcctgttgctaaaaccaggcatgagaggatgcataccagaagaccttatcatgtggaagatgctgaaaaatactgccttgaggatgatttggtcaacctagaggttctggatgaggatacaattatccatcagttgcagaaacgttatgcagacttgctaatttacacatatgttggagacatcttaattgccttaaaccccttccagaatctaagcatatactctccacagttttccagactttatcatggggtgaaacgcgcctccaatcccccccacatatttgcatcagcagatgctgcttaccagtgcatggttactctcagcaaagaccagtgcattgtcatcagcggagagagtggctctgggaagacagaaagcgcccacctgattgttcagcatttgactttcttgggaaaggccaataatcagaccttgagagagaaaattctacaagtcaactccctggtggaagcctttgggaactcatgcactgccatcaatgacaactcgagccgttttggaaaatatctggaaatgatgtttacaccaactggagttgtgatgggggcaagaatctctgaatatctcctggaaaaatccagagttataaaacaggcagcgagagagaaaaattttcatatattttactatatttatgctggtcttcatcaccaaaagaagctttctgatttcagacttcctgaggaaaaacctcctaggtacatagctgatgaaactggaagggtgatgcacgacataacttccaaggagtcttacagaagacaattcgaagcaattcagcattgcttcaggattatagggttcacggacaaagaggtgcactcagtgtacagaattttggctgggattttgaatattgggaacattgagttcgcagctatttcctctcaacatcagactgataaaagtgaggtgcccaatgctgaagctttgcaaaatgctgcctctgttctgtgcattagccctgaagagctccaggaggccctcacctcccactgtgtggtcacccggggcgagaccatcatccgtgccaacactgtagacagggctgcggacgttcgagacgccatgtccaaagccctgtatgggaggctcttcagctggattgtgaatcgcattaatacactcctgcagccagacgaaaacatatgtagtgcaggaggtggaatgaatgtggggatcttggatatctttggattcgagaattttcagagaaattcatttgagcagctctgcataaacatcgccaatgagcaaatccagtactatttcaatcagcatgtttttgctcttgagcagatggaatatcagaatgaaggcattgatgctgtacccgtggaatatgaggacaaccgcccgctcttggacatgttcctccagaaacccctgggactgcttgcacttttggatgaggaaagtcggtttccccaagcaactgaccagaccctggttgataaatttgaagataatctacgatgcaaatacttctggaggcccaaaggagtggaactgtgctttggcattcagcattatgctggaaaggtattatatgatgcttctggggttcttgagaaaaatagagacactctccctgccgatgtggttgtggtcctgagaacgtcagaaaacaagcttcttcagcagctcttctcaatccctctgaccaaaacaggtaatttggcccagacaagagctaggataacagtggcctcaagttctttgcctccacatttcagtgctgggaaagccaaggtggacactctggaggtgatacggcatccggaagaaaccaccaacatgaagaggcaaactgtggcttcttacttccggtattctctgatggacctgctctccaaaatggtggttggacagccccactttgtgcgctgcattaaacccaatgatgaccgagaggccctgcagttctctcgagagagggtgctggcccagctccgctccacagggattctggagacagtcagcatccgccgccagggctattcccaccgcatcctttttgaagaatttgtgaaaaggtattattacttggcattcacagcacatcaaacacctcttgctagcaaagagagctgtgtggctatcttggaaaagtccagattagatcactgggtactgggaaaaacaaaggtttttctcaaatattaccatgttgagcaattaaatttgctgcttcgagaagtcataggcagagtggttgtgctgcaggcatataccaaggggtggcttggagccaggagatacaaaagggtcagagagaagagagagaagggagccattgccatccagtcaggggacacttcaaaccaaagcagtgggccacattcccccgtcgcagcaggtacgaggggaagtgccgaggttcaagactgcagcgagcctggtgaccataaagttctcaggggctctgtacatcgtaggagccattcacaagcagaatccaacaatggccgtacacagacttcaagcaactctcctgctgtcacagagaaaaatgggcattcacaagcccagagttctccaaaagggtgcgatatcttcgcaggacatgcaaacaagcactcggtttctgggactgatttgctgtcttctcggatatgccatcctgctccagatcagcaaggattgagtctctggggagcccctcaaaagcctgcctttccacattacggatgtaacttttatgggttcagaaaatggtcttgcacagaagcatcgaacacctcgccgacgatgtcagcagcccaaaatgctgagtagccctgaggacaccatgtactataaccagttaaatggaactctagaatatcaagggagcaagaggaagccaagaaaacttggccaaatcaaagtacttgatggggaagatgaatattacaaatctctgtcaccagtggactgtatccctgaggagaacaactcagcccacccttcctttttttcttcatcctcaaaaggagactcttttgctcaacattaaattgtgcttcctaaccctaaatctgtccagagtaggaacattcatggtaatcgactgtctgtcattgcgtaagaaagcactgatatggggtcagcttctttggacatatggtccatgcctgaaccttactgaaccacttgcagattccaaaacatcttatcctatcctctaccactctcccacatgtgttgtgcagcctgagctgggcgctgccttcctttctcatcccatggggccctgtgggacactgagaacacctttacaatagtttaaacagtcattcatgcccccagtgtctaggaagataacagccagtctcaccccagtctaatcatggaccctgataatattgcttgatttttcctatcaagttacttttcaatccattcagaatctgccccagtggagacccaggagttcctttcctgcactcttctccatcctcccacctttgctgggcttttctatcactcccacctcccccagagtcagggctccattgctgagtgccccatcctggaggattggccccaagatctcctagaacaggataattgcctgtgtttaggcagataggcctaaatctttcagattctttctacaaggcaaataacccctctcttgttaattatgatgctgagaaagcctctgtctctttatttcaccttgccaagacacccacactactttggtgatgaaaagaaaggaatgagagggaaagtttggacctgtcactttggtgacagggaaagtccaggtcactttattctgtaactctccattcactggtcaaataactccatgaggctatcagtggctacagtggaaggacctgatcttgtccatctttgtgtgcacagagcctagcacagggcttggtagagggtatatctagtgaatggagaatacatggagaaacttaactaagttacacaagcatatctgacaggaatgttaccttcaattgtatgttacatatgattagtcacttttcatacactataacctctgatttttcactcaagtttgggctgattatattgtaatgatgttagataatactcaacatgattcagtatgacaaacttttttgagcacctactttatataaaacatgacaaattgcagtgtgatgtaatcaaaaacaaagaagccctataagaccatttctctagaacagatgttcttaatatttttcttactctaaaatatgtggtagatagtatgcaagaaaagccgggtgcggtggctcaggcctgtaatcccagcactttgggaggccaagatgggcggatcatgaagtcaggagttcgagaccagcctgaccaacatggtgaaaccccgtctctactaaaaaaaa

SEQ ID NO: 156770 - DNA, 5529 bp, Homo sapiens
  Payload ID: 10732
  Gene Symbol: MYO3B
  Gene Name: myosin IIIB
  Uniprot ID: Q8WXR4
  ENST ID: ENST00000408978
  CDS Start-End: 144-4169
ctagatcgaaagtcctttggtaatgatgtgtcatacattctagtcatcaaagacaccattttctgggcctgaagtgttctgctggtttttggaggaatgagaatccaatctctcataagccggattcagaaaataggtcatcgatgaaacatctgtatggattatttcactataatcctatgatgcttggacttgaatcacttccagatcccacagacacctgggaaattatagagaccattggtaaaggcacctatggcaaagtctacaaggtaactaacaagagagatgggagcctggctgcagtgaaaattctggatccagtcagtgatatggatgaagaaattgaggcagaatacaacattttgcagttccttcctaatcatcccaatgttgtaaagttttatgggatgttttacaaagcggatcactgtgtagggggacagctgtggctggtcctggagctgtgtaatgggggctcagtcactgagcttgtcaaaggtctactcagatgtggccagcggttggatgaagcaatgatctcatacatcttgtacggggccctcttgggccttcagcatttgcacaacaaccgaatcatccaccgtgatgtgaaggggaataacattcttctgacaacagaaggaggagttaagctcgttgactttggtgtttcagctcaactcaccagtacacgtctgcggagaaacacatctgttggcaccccgttctggatggcccctgaggtcattgcctgtgagcagcagtatgactcttcctatgacgctcgctgtgacgtctggtccttggggatcacagctattgaactgggggatggagaccctcccctctttgacatgcatcctgtgaaaacactctttaagattccaagaaatcctccacctactttacttcatccagaaaaatggtgtgaagaattcaaccactttatttcacagtgtcttattaaggattttgaaaggcgaccttccgtcacacatctccttgaccacccatttattaaaggagtacatggaaaagttctgtttctgcaaaaacagctggccaaggttctccaagaccagaagcatcaaaatcctgttgctaaaaccaggcatgagaggatgcataccagaagaccttatcatgtggaagatgctgaaaaatactgccttgaggatgatttggtcaacctagaggttctggatgaggatacaattatccatcagttgcagaaacgttatgcagacttgctaatttacacatatgttggagacatcttaattgccttaaaccccttccagaatctaagcatatactctccacagttttccagactttatcatggggtgaaacgcgcctccaatcccccccacatatttgcatcagcagatgctgcttaccagtgcatggttactctcagcaaagaccagtgcattgtcatcagcggagagagtggctctgggaagacagaaagcgcccacctgattgttcagcatttgactttcttgggaaaggccaataatcagaccttgagagagaaaattctacaagtcaactccctggtggaagcctttgggaactcatgcactgccatcaatgacaactcgagccgttttggaaaatatctggaaatgatgtttacaccaactggagttgtgatgggggcaagaatctctgaatatctcctggaaaaatccagagttataaaacaggcagcgagagagaaaaattttcatatattttactatatttatgctggtcttcatcaccaaaagaagctttctgatttcagacttcctgaggaaaaacctcctaggtacatagctgatgaaactggaagggtgatgcacgacataacttccaaggagtcttacagaagacaattcgaagcaattcagcattgcttcaggattatagggttcacggacaaagaggtgcactcagtgtacagaattttggctgggattttgaatattgggaacattgagttcgcagctatttcctctcaacatcagactgataaaagtgaggtgcccaatgctgaagctttgcaaaatgctgcctctgttctgtgcattagccctgaagagctccaggaggccctcacctcccactgtgtggtcacccggggcgagaccatcatccgtgccaacactgtagacagggctgcggacgttcgagacgccatgtccaaagccctgtatgggaggctcttcagctggattgtgaatcgcattaatacactcctgcagccagacgaaaacatatgtagtgcaggaggtggaatgaatgtggggatcttggatatctttggattcgagaattttcagagaaattcatttgagcagctctgcataaacatcgccaatgagcaaatccagtactatttcaatcagcatgtttttgctcttgagcagatggaatatcagaatgaaggcattgatgctgtacccgtggaatatgaggacaaccgcccgctcttggacatgttcctccagaaacccctgggactgcttgcacttttggatgaggaaagtcggtttccccaagcaactgaccagaccctggttgataaatttgaagataatctacgatgcaaatacttctggaggcccaaaggagtggaactgtgctttggcattcagcattatgctggaaaggtattatatgatgcttctggggttcttgagaaaaatagagacactctccctgccgatgtggttgtggtcctgagaacgtcagaaaacaagcttcttcagcagctcttctcaatccctctgaccaaaacaggtaatttggcccagacaagagctaggataacagtggcctcaagttctttgcctccacatttcagtgctgggaaagccaaggtggacactctggaggtgatacggcatccggaagaaaccaccaacatgaagaggcaaactgtggcttcttacttccggtattctctgatggacctgctctccaaaatggtggttggacagccccactttgtgcgctgcattaaacccaatgatgaccgagaggccctgcagttctctcgagagagggtgctggcccagctccgctccacagggattctggagacagtcagcatccgccgccagggctattcccaccgcatcctttttgaagaatttgtgaaaaggtattattacttggcattcacagcacatcaaacacctcttgctagcaaagagagctgtgtggctatcttggaaaagtccagattagatcactgggtactgggaaaaacaaaggtttttctcaaatattaccatgttgagcaattaaatttgctgcttcgagaagtcataggcagagtggttgtgctgcaggcatataccaaggggtggcttggagccaggagatacaaaagggtcagagagaagagagagaagggagccattgccatccagtcagcctggagaggatatgatgctcggaggaaatttaagaaaataagcaacagaaggaatgagtctgctgctcataatcaagcaggggacacttcaaaccaaagcagtgggccacattcccccgtcgcagcaggtacgaggggaagtgccgaggttcaagactgcagcgagcctggtgaccataaagttctcaggggctctgtacatcgtaggagccattcacaagcagaatccaacaatggccgtacacagacttcaagcaactctcctgctgtcacagagaaaaatgggcattcacaagcccagagttctccaaaagggtgcgatatcttcgcaggacatgcaaacaagcactcggtttctgggactgatttgctgtcttctcggatatgccatcctgctccagatcagcaaggattgagtctctggggagcccctcaaaagcctggttcagaaaatggtcttgcacagaagcatcgaacacctcgccgacgatgtcagcagcccaaaatgctgagtagccctgaggacaccatgtactataaccagttaaatggaactctagaatatcaagggagcaagaggaagccaagaaaacttggccaaatcaaagtacttgatggggaagatgaatattacaaatctctgtcaccagtggactgtatccctgaggagaacaactcagcccacccttcctttttttcttcatcctcaaaaggagactcttttgctcaacattaaattgtgcttcctaaccctaaatctgtccagagtaggaacattcatggtaatcgactgtctgtcattgcgtaagaaagcactgatatggggtcagcttctttggacatatggtccatgcctgaaccttactgaaccacttgcagattccaaaacatcttatcctatcctctaccactctcccacatgtgttgtgcagcctgagctgggcgctgccttcctttctcatcccatggggccctgtgggacactgagaacacctttacaatagtttaaacagtcattcatgcccccagtgtctaggaagataacagccagtctcaccccagtctaatcatggaccctgataatattgcttgatttttcctatcaagttacttttcaatccattcagaatctgccccagtggagacccaggagttcctttcctgcactcttctccatcctcccacctttgctgggcttttctatcactcccacctcccccagagtcagggctccattgctgagtgccccatcctggaggattggccccaagatctcctagaacaggataattgcctgtgtttaggcagataggcctaaatctttcagattctttctacaaggcaaataacccctctcttgttaattatgatgctgagaaagcctctgtctctttatttcaccttgccaagacacccacactactttggtgatgaaaagaaaggaatgagagggaaagtttggacctgtcactttggtgacagggaaagtccaggtcactttattctgtaactctccattcactggtcaaataactccatgaggctatcagtggctacagtggaaggacctgatcttgtccatctttgtgtgcacagagcctagcacagggcttggtagagggtatatctagtgaatggagaatacatggagaaacttaactaagttacacaagcatatctgacaggaatgttaccttcaattgtatgttacatatgattagtcacttttcatacactataacctctgatttttcactcaagtttgggctgattatattgtaatgatgttagataatactcaacatgattcagtatgacaaacttttttgagcacctactttatataaaacatgacaaattgcagtgtgatgtaatcaaaaacaaagaagccctataagaccatttctctagaacagatgttcttaatatttttcttactctaaaatatgtggtagatagtatgcaagaaaagccgggtgcggtggctcaggcctgtaatcccagcactttgggaggccaagatgggcggatcatgaagtcaggagttcgagaccagcctgaccaacatggtgaaaccccgtctctactaaaaaaaa

SEQ ID NO: 156771 - DNA, 5448 bp, Homo sapiens
  Payload ID: 10732
  Gene Symbol: MYO3B
  Gene Name: myosin IIIB
  Uniprot ID: Q8WXR4
  ENST ID: ENST00000409044
  CDS Start-End: 144-4088
ctagatcgaaagtcctttggtaatgatgtgtcatacattctagtcatcaaagacaccattttctgggcctgaagtgttctgctggtttttggaggaatgagaatccaatctctcataagccggattcagaaaataggtcatcgatgaaacatctgtatggattatttcactataatcctatgatgcttggacttgaatcacttccagatcccacagacacctgggaaattatagagaccattggtaaaggcacctatggcaaagtctacaaggtaactaacaagagagatgggagcctggctgcagtgaaaattctggatccagtcagtgatatggatgaagaaattgaggcagaatacaacattttgcagttccttcctaatcatcccaatgttgtaaagttttatgggatgttttacaaagcggatcactgtgtagggggacagctgtggctggtcctggagctgtgtaatgggggctcagtcactgagcttgtcaaaggtctactcagatgtggccagcggttggatgaagcaatgatctcatacatcttgtacggggccctcttgggccttcagcatttgcacaacaaccgaatcatccaccgtgatgtgaaggggaataacattcttctgacaacagaaggaggagttaagctcgttgactttggtgtttcagctcaactcaccagtacacgtctgcggagaaacacatctgttggcaccccgttctggatggcccctgaggtcattgcctgtgagcagcagtatgactcttcctatgacgctcgctgtgacgtctggtccttggggatcacagctattgaactgggggatggagaccctcccctctttgacatgcatcctgtgaaaacactctttaagattccaagaaatcctccacctactttacttcatccagaaaaatggtgtgaagaattcaaccactttatttcacagtgtcttattaaggattttgaaaggcgaccttccgtcacacatctccttgaccacccatttattaaaggagtacatggaaaagttctgtttctgcaaaaacagctggccaaggttctccaagaccagaagcatcaaaatcctgttgctaaaaccaggcatgagaggatgcataccagaagaccttatcatgtggaagatgctgaaaaatactgccttgaggatgatttggtcaacctagaggttctggatgaggatacaattatccatcagttgcagaaacgttatgcagacttgctaatttacacatatgttggagacatcttaattgccttaaaccccttccagaatctaagcatatactctccacagttttccagactttatcatggggtgaaacgcgcctccaatcccccccacatatttgcatcagcagatgctgcttaccagtgcatggttactctcagcaaagaccagtgcattgtcatcagcggagagagtggctctgggaagacagaaagcgcccacctgattgttcagcatttgactttcttgggaaaggccaataatcagaccttgagagagaaaattctacaagtcaactccctggtggaagcctttgggaactcatgcactgccatcaatgacaactcgagccgttttggaaaatatctggaaatgatgtttacaccaactggagttgtgatgggggcaagaatctctgaatatctcctggaaaaatccagagttataaaacaggcagcgagagagaaaaattttcatatattttactatatttatgctggtcttcatcaccaaaagaagctttctgatttcagacttcctgaggaaaaacctcctaggtacatagctgatgaaactggaagggtgatgcacgacataacttccaaggagtcttacagaagacaattcgaagcaattcagcattgcttcaggattatagggttcacggacaaagaggtgcactcagtgtacagaattttggctgggattttgaatattgggaacattgagttcgcagctatttcctctcaacatcagactgataaaagtgaggtgcccaatgctgaagctttgcaaaatgctgcctctgttctgtgcattagccctgaagagctccaggaggccctcacctcccactgtgtggtcacccggggcgagaccatcatccgtgccaacactgtagacagggctgcggacgttcgagacgccatgtccaaagccctgtatgggaggctcttcagctggattgtgaatcgcattaatacactcctgcagccagacgaaaacatatgtagtgcaggaggtggaatgaatgtggggatcttggatatctttggattcgagaattttcagagaaattcatttgagcagctctgcataaacatcgccaatgagcaaatccagtactatttcaatcagcatgtttttgctcttgagcagatggaatatcagaatgaaggcattgatgctgtacccgtggaatatgaggacaaccgcccgctcttggacatgttcctccagaaacccctgggactgcttgcacttttggatgaggaaagtcggtttccccaagcaactgaccagaccctggttgataaatttgaagataatctacgatgcaaatacttctggaggcccaaaggagtggaactgtgctttggcattcagcattatgctggaaaggtattatatgatgcttctggggttcttgagaaaaatagagacactctccctgccgatgtggttgtggtcctgagaacgtcagaaaacaagcttcttcagcagctcttctcaatccctctgaccaaaacaggtaatttggcccagacaagagctaggataacagtggcctcaagttctttgcctccacatttcagtgctgggaaagccaaggtggacactctggaggtgatacggcatccggaagaaaccaccaacatgaagaggcaaactgtggcttcttacttccggtattctctgatggacctgctctccaaaatggtggttggacagccccactttgtgcgctgcattaaacccaatgatgaccgagaggccctgcagttctctcgagagagggtgctggcccagctccgctccacagggattctggagacagtcagcatccgccgccagggctattcccaccgcatcctttttgaagaatttgtgaaaaggtattattacttggcattcacagcacatcaaacacctcttgctagcaaagagagctgtgtggctatcttggaaaagtccagattagatcactgggtactgggaaaaacaaaggtttttctcaaatattaccatgttgagcaattaaatttgctgcttcgagaagtcataggcagagtggttgtgctgcaggcatataccaaggggtggcttggagccaggagatacaaaagggtcagagagaagagagagaagggagccattgccatccagtcaggggacacttcaaaccaaagcagtgggccacattcccccgtcgcagcaggtacgaggggaagtgccgaggttcaagactgcagcgagcctggtgaccataaagttctcaggggctctgtacatcgtaggagccattcacaagcagaatccaacaatggccgtacacagacttcaagcaactctcctgctgtcacagagaaaaatgggcattcacaagcccagagttctccaaaagggtgcgatatcttcgcaggacatgcaaacaagcactcggtttctgggactgatttgctgtcttctcggatatgccatcctgctccagatcagcaaggattgagtctctggggagcccctcaaaagcctggttcagaaaatggtcttgcacagaagcatcgaacacctcgccgacgatgtcagcagcccaaaatgctgagtagccctgaggacaccatgtactataaccagttaaatggaactctagaatatcaagggagcaagaggaagccaagaaaacttggccaaatcaaagtacttgatggggaagatgaatattacaaatctctgtcaccagtggactgtatccctgaggagaacaactcagcccacccttcctttttttcttcatcctcaaaaggagactcttttgctcaacattaaattgtgcttcctaaccctaaatctgtccagagtaggaacattcatggtaatcgactgtctgtcattgcgtaagaaagcactgatatggggtcagcttctttggacatatggtccatgcctgaaccttactgaaccacttgcagattccaaaacatcttatcctatcctctaccactctcccacatgtgttgtgcagcctgagctgggcgctgccttcctttctcatcccatggggccctgtgggacactgagaacacctttacaatagtttaaacagtcattcatgcccccagtgtctaggaagataacagccagtctcaccccagtctaatcatggaccctgataatattgcttgatttttcctatcaagttacttttcaatccattcagaatctgccccagtggagacccaggagttcctttcctgcactcttctccatcctcccacctttgctgggcttttctatcactcccacctcccccagagtcagggctccattgctgagtgccccatcctggaggattggccccaagatctcctagaacaggataattgcctgtgtttaggcagataggcctaaatctttcagattctttctacaaggcaaataacccctctcttgttaattatgatgctgagaaagcctctgtctctttatttcaccttgccaagacacccacactactttggtgatgaaaagaaaggaatgagagggaaagtttggacctgtcactttggtgacagggaaagtccaggtcactttattctgtaactctccattcactggtcaaataactccatgaggctatcagtggctacagtggaaggacctgatcttgtccatctttgtgtgcacagagcctagcacagggcttggtagagggtatatctagtgaatggagaatacatggagaaacttaactaagttacacaagcatatctgacaggaatgttaccttcaattgtatgttacatatgattagtcacttttcatacactataacctctgatttttcactcaagtttgggctgattatattgtaatgatgttagataatactcaacatgattcagtatgacaaacttttttgagcacctactttatataaaacatgacaaattgcagtgtgatgtaatcaaaaacaaagaagccctataagaccatttctctagaacagatgttcttaatatttttcttactctaaaatatgtggtagatagtatgcaagaaaagccgggtgcggtggctcaggcctgtaatcccagcactttgggaggccaagatgggcggatcatgaagtcaggagttcgagaccagcctgaccaacatggtgaaaccccgtctctactaaaaaaaa

SEQ ID NO: 156772 - DNA, 1720 bp, Homo sapiens
  Payload ID: 10732
  Gene Symbol: MYO3B
  Gene Name: myosin IIIB
  ENST ID: ENST00000442690
  CDS Start-End: 1-1081
gaaacatctgtatggattatttcactataatcctatgatgcttggacttgaatcacttccagatcccacagacacctgggaaattatagagaccattggtaaaggcacctatggcaaagtctacaaggtaactaacaagagagatgggagcctggctgcagtgaaaattctggatccagtcagtgatatggatgaagaaattgaggcagaatacaacattttgcagttccttcctaatcatcccaatgttgtaaagttttatgggatgttttacaaagcggatcactgtgtagggggacagctgtggctggtcctggagctgtgtaatgggggctcagtcactgagcttgtcaaaggtctactcagatgtggccagcggttggatgaagcaatgatctcatacatcttgtacggggccctcttgggccttcagcatttgcacaacaaccgaatcatccaccgtgatgtgaaggggaataacattcttctgacaacagaaggaggagttaagctcgttgactttggtgtttcagctcaactcaccagtacacgtctgcggagaaacacatctgttggcaccccgttctggatggcccctgaggtcattgcctgtgagcagcagtatgactcttcctatgacgctcgctgtgacgtctggtccttggggatcacagctattgaactgggggatggagaccctcccctctttgacatgcatcctgtgaaaacactctttaagattccaagaaatcctccacctactttacttcatccagaaaaatggtgtgaagaattcaaccactttatttcacagtgtcttattaaggattttgaaaggcgaccttccgtcacacatctccttgaccacccatttattaaaggagtacatggaaaagttctgtttctgcaaaaacagctggccaaggttctccaagaccagaagcatcaaaatcctgttgctaaaaccaggcatgagaggatgcataccagaagaccttatcatgtggaagatgctgaaaaatactgccttgaggatgatttggtcaacctagaggttctggatgaggtactaaatatttagtagacaattctcattgaagacatttgtttcatgtgaatggtctgaactttctgttgtagaccatgtcctcctaaggtcatttgaaaatttaattgtttgtgtagctatgggatgaagttcagggagcattcagttgctgtgactatgatcctgtgctgtgtttatttagatagcccctagaatgatgaagagaaaaggatttggatttttgcaataaagctctttatattgtagccttaatgatggattatatcagctgaaaatattttgtttgataaaatttgataaaatatttcaattaacccttaagaagttgtttgttcttcataagaaagagcttcatttagggaaatagtgaagttaatatagcttgaattctaaatttgaagtctgtgataatccccatttaaaatatgcatgtttaatagagctgttaattgcactggacctgtttatgctgagtctaactctggggattgttaccttcaatgtctaaatcactaaagtgtaatacaaagtggttaattctgtatttatgccacctaggttttaagtgcagtgctttgagaaattaacttaccattctgtcggtgctctatcagtaggaacagcctattaaataaaattttaaatacaaca

SEQ ID NO: 156773 - DNA, 3320 bp, Homo sapiens
  Payload ID: 10732
  Gene Symbol: MYO3B
  Gene Name: myosin IIIB
  ENST ID: ENST00000484338
  CDS Start-End: 5-3320
gtgcatgctgcagagtgctttactttcaacaaggaaacatctgtatggattatttcactataatcctatgatgcttggacttgaatcacttccagatcccacagacacctgggaaattatagagaccattggtaaaggcacctatggcaaagtctacaaggtaactaacaagagagatgggagcctggctgcagtgaaaattctggatccagtcagtgatatggatgaagaaattgaggcagaatacaacattttgcagttccttcctaatcatcccaatgttgtaaagttttatgggatgttttacaaagcggatcactgtgtagggggacagctgtggctggtcctggagctgtgtaatgggggctcagtcactgagcttgtcaaaggtctactcagatgtggccagcggttggatgaagcaatgatctcatacatcttgtacggggccctcttgggccttcagcatttgcacaacaaccgaatcatccaccgtgatgtgaaggggaataacattcttctgacaacagaaggaggagttaagctcgttgactttggtgtttcagctcaactcaccagtacacgtctgcggagaaacacatctgttggcaccccgttctggatggcccctgaggtcattgcctgtgagcagcagtatgactcttcctatgacgctcgctgtgacgtctggtccttggggatcacagctattgaactgggggatggagaccctcccctctttgacatgcatcctgtgaaaacactctttaagattccaagaaatcctccacctactttacttcatccagaaaaatggtgtgaagaattcaaccactttatttcacagtgtcttattaaggattttgaaaggcgaccttccgtcacacatctccttgaccacccatttattaaaggagtacatggaaaagttctgtttctgcaaaaacagctggccaaggttctccaagaccagaagcatcaaaatcctgttgctaaaaccaggcatgagaggatgcataccagaagaccttatcatgtggaagatgctgaaaaatactgccttgaggatgatttggtcaacctagaggttctggatgaggatacaattatccatcagttgcagaaacgttatgcagacttgctaatttacacatatgttggagacatcttaattgccttaaaccccttccagaatctaagcatatactctccacagttttccagactttatcatggggtgaaacgcgcctccaatcccccccacatatttgcatcagcagatgctgcttaccagtgcatggttactctcagcaaagaccagtgcattgtcatcagcggagagagtggctctgggaagacagaaagcgcccacctgattgttcagcatttgactttcttgggaaaggccaataatcagaccttgagagagaaaattctacaagtcaactccctggtggaagcctttgggaactcatgcactgccatcaatgacaactcgagccgttttggaaaatatctggaaatgatgtttacaccaactggagttgtgatgggggcaagaatctctgaatatctcctggaaaaatccagagttataaaacaggcagcgagagagaaaaattttcatatattttactatatttatgctggtcttcatcaccaaaagaagctttctgatttcagacttcctgaggaaaaacctcctaggtacatagctgatgaaactggaagggtgatgcacgacataacttccaaggagtcttacagaagacaattcgaagcaattcagcattgcttcaggattatagggttcacggacaaagaggtgcactcagtgtacagaattttggctgggattttgaatattgggaacattgagttcgcagctatttcctctcaacatcagactgataaaagtgaggtgcccaatgctgaagctttgcaaaatgctgcctctgttctgtgcattagccctgaagagctccaggaggccctcacctcccactgtgtggtcacccggggcgagaccatcatccgtgccaacactgtagacagggctgcggacgttcgagacgccatgtccaaagccctgtatgggaggctcttcagctggattgtgaatcgcattaatacactcctgcagccagacgaaaacatatgtagtgcaggaggtggaatgaatgtggggatcttggatatctttggattcgagaattttcagagaaattcatttgagcagctctgcataaacatcgccaatgagcaaatccagtactatttcaatcagcatgtttttgctcttgagcagatggaatatcagaatgaaggcattgatgctgtacccgtggaatatgaggacaaccgcccgctcttggacatgttcctccagaaacccctgggactgcttgcacttttggatgaggaaagtcggtttccccaagcaactgaccagaccctggttgataaatttgaagataatctacgatgcaaatacttctggaggcccaaaggagtggaactgtgctttggcattcagcattatgctggaaaggtattatatgatgcttctggggttcttgagaaaaatagagacactctccctgccgatgtggttgtggtcctgagaacgtcagaaaacaagcttcttcagcagctcttctcaatccctctgaccaaaacaggtaatttggcccagacaagagctaggataacagtggcctcaagttctttgcctccacatttcagtgctgggaaagccaaggtggacactctggaggtgatacggcatccggaagaaaccaccaacatgaagaggcaaactgtggcttcttacttccggtattctctgatggacctgctctccaaaatggtggttggacagccccactttgtgcgctgcattaaacccaatgatgaccgagaggccctgcagttctctcgagagagggtgctggcccagctccgctccacagggattctggagacagtcagcatccgccgccagggctattcccaccgcatcctttttgaagaatttgtgaaaaggtattattacttggcattcacagcacatcaaacacctcttgctagcaaagagagctgtgtggctatcttggaaaagtccagattagatcactgggtactgggaaaaacaaaggtttttctcaaatattaccatgttgagcaattaaatttgctgcttcgagaagtcataggcagagtggttgtgctgcaggcatataccaaggggtggcttggagccaggagatacaaaagggtcagagagaagagagagaagggagccattgccatccagtcag

SEQ ID NO: 156774 - DNA, 12411 bp, Homo sapiens
  Payload ID: 10733
  Gene Symbol: MYO9A
  Gene Name: myosin IXA
  Uniprot ID: B2RTY4
  ENST ID: ENST00000356056
  CDS Start-End: 474-8120
gcgcgaccgaagcggataagggacgcggcggcggttggctgtgtctgttgagagagtacaggacagcccggactgcgagaggcggcggcggaggcagtagttgcaccggcagaggcggccgctggcagcggttgaggcggcggtccaacgcgtgctctctgggcggggtgcggcgggggatgtgcctgctcaggccgggcggagtctctctgacagggcgggggatgcgccgcggccgctcgcccggaccctgaggctgctgggcccaccctcccggaaccgtccgaccctcggtggcctcggcctcttctgccatctccggtcctaccctggggcggagggtggaaggcagcttccgtcgaagaggagggggctgcggtggccaccgcggcggagcccgagttattttaccaagaaaatggtttgcacgactttgaacatatactatccatgctgatgggacaggatccaatatgaatataaatgatggaggaagacgacgctttgaagataatgaacatacattacggatatatcctggggctatttcagaagggacaatctactgtccgattcctgccagaaaaaactccacagctgctgaggtgattgagtctcttataaacaaacttcatcttgacaaaacaaaatgttatgttctagcagaggtaaaggaatttggtggagaagaatggattctcaatccaacagattgtccagttcagcgaatgatgctgtggccccgaatggctctggaaaatcgcttaagtggagaggactaccgcttccttctgagagagaaaaaccttgatggatcaatccattatggtagcctgcagtcatggctacgggtaacagaagaacgtcgcaggatgatggaacggggttttcttccacagcctcaacagaaagactttgatgatttatgtagtttacctgatttgaatgagaaaactctcttagaaaacctacgaaatcgctttaagcatgaaaaaatttatacctatgttggcagtattctaatagttattaacccattcaagtttcttcctatttataaccccaaatatgtcaaaatgtatgataaccaccaactgggaaaacttgagccccacatttatgctgtggctgatgtagcttatcatgccatgcttcagcgcaaaaagaatcagtgcatcgtgatttcaggagagagtggttctgggaagactcaaagcacaaactttcttattcaccaccttactgctctcagtcagaaaggatttgccagtggagtagaacagattattcttggagctggaccagtacttgaggcctttggaaatgcaaagacagctcataataacaattcaagtcgttttgggaagtttattcaagtaaattaccaggaaacaggcactgtacttggtgcctatgttgaaaaatatctactggagaagtccagactcgtttatcaggagcataatgaacggaactatcatgtattctattacctcctggcaggagcaagtgaagatgagagatcagcattccatcttaagcaaccagaggaatatcattatctcaatcagataacaaagaaacccctcagacagagctgggatgattattgctatgactctgagccggattgcttcacggtggaaggagaagatttgagacatgactttgagcgcctacaacttgccatggaaatggtaggatttcttcccaagacacgaagacagattttctctcttctctcagccatactacatttgggtaatatctgttacaaaaagaagacataccgggatgactccattgatatctgtaatcctgaagttctgcctattgtctcagaattattagaggttaaagaagagatgctatttgaagcattagttacaaggaagacggtgacagtgggagaaaagcttattttgccatacaagttggcagaggctgtgacagtgaggaactccatggctaagtctctgtatagtgccctgtttgactggatagtttttcgaattaatcatgcacttctgaatagtaaagatttagagcataataccaagacattgtctattggtgttcttgatatttttgggtttgaagattatgaaaataacagctttgaacagttctgtattaattttgctaatgaacgtttacagcactactttaatcagcatatctttaaattggaacaagaggaatatagaactgaaggtatcagctggcacaacatagattacattgataatacctgctgcataaatcttattagcaaaaaaccaacaggactgcttcatcttttggatgaagaaagcaactttccacaggctacaaatcaaacattgctagacaagtttaagcatcaacatgaagataattcttacatcgaatttccagccgtgatggagcctgctttcattataaaacattatgctggaaaagtaaaatatggggtaaaggatttccgggaaaaaaatacagatcatatgcgcccagacattgtagctcttctgagaagcagcaagaatgcatttatctctgggatgattggaattgatcctgtagctgttttccgatgggcaattctccgagcttttttcagagccatggttgctttcagggaagctgggaaaagaaacattcacagaaaaactggacatgatgatacagcgccatgtgcaattttgaaaagtatggatagttttagctttctccaacacccagtccaccagaggagcttagagattctgcagagatgcaaggaagagaagtacagtataacccggaaaaatcccagaacacctctttctgatctccagggcatgaatgctctaaatgaaaaaaaccaacatgatacatttgatattgcctggaatggcagaactgggattcgccagagcagactatcaagtggcacctccttgcttgataaagatggaatatttgctaattcaactagcagcaaactcctggagagagcccatggaattctcacgagaaacaaaaatttcaaatccaagcctgcccttccaaagcacttgctagaagtaaattctttaaagcacctgacaagactgacactacaagatcgcattaccaagtctcttcttcatttacacaagaagaaaaaacctcccagcatcagtgcccagtttcaggcatcattaagcaagctaatggaaacacttggtcaagcagaaccatattttgtaaaatgcattcgctctaatgctgaaaagctgcccttaaggttcagtgatgtcttggtacttagacagcttcgatacaccgggatgctggaaacagttcgaattcgccaatcaggatacagctccaaatattctttccaggattttgtgagccacttccatgtacttcttccccgaaatattattccatccaaatttaacattcaggatttcttcaggaaaataaatcttaatccagataattatcaagttggaaaaaccatggtctttctaaaggagcaggaacgacagcacttacaagatctgcttcaccaagaggtgctccgcagaatcatattgttgcagcgatggttcagggtcttgctgtgtaggcagcatttcctccatctgagacaagcatctgttattatccagagattctggaggaattacctaaatcagaagcaagtcagagatgcagctgtgcagaaggatgcttttgttatggctagtgcagctgctcttctccaagcttcctggcgtgctcacttagagaggcagcggtacttggagttacgggctgcagccatcgttatccagcagaaatggagagattactataggcgcaggcacatggctgctatttgcatacaagcaagatggaaagcctacagggaaagtaaaaggtaccaagaacaaaggaaaaaaattatccttttgcaatcaacatgtagaggattcagagcaagacaaagatttaaagctttaaaagaacaaaggctaagagaaacaaagccagaagttggattggtgaatattaagggatatggatctctggaaattcagggttcagacccttcaggatgggaggattgttcttttgacaacagaataaaagccatagaggaatgtaaatctgtaatagagagtaatcgaattagccgtgaaagttcagtggactgcttgaaggagtcaccaaacaagcagcaggagagagcccaaagccagagtggtgtggacttgcaggaagatgtgcttgtaagagagagacccagatccttggaggatctccatcagaaaaaagtaggccgggctaagagagaaagtaggagaatgagagaactagagcaagctatatttagcttagaattgctgaaagttcgttctcttggtggtatttctccttcagaggatcgcagatggtctacagaattggtgcctgaaggccttcagtctccacggggtacacctgatagtgagagctctcaaggaagcttggaacttctgagctatgaggaaagccaaaagagcaaactagagtctgtcatttcagatgaaggagacttgcagtttccatcacctaagatatccagcagtccaaaatttgattcacgggacaatgccctcagtgcctcaaatgagactagcagtgcagagcatttgaaggatggaactatgaaggaaatggtggtctgcagttctgagtctattacctgtaaaccacagctgaaagactccttcatttcaaatagtctacctacttttttttatatcccccaacaagacccactgaaaacaaattcccaactagacacaagtatccaaagaaacaaactattggaaaatgaagacacagcgggggaagctcttactttggatatcaacagggaaactagaaggtatcactgctcaggaaaagatcagattgttccttctttgaatacagagtcttctaatcctgtgcttaagaagttagaaaagctaaacactgagaaggaagaaaggcaaaaacagttgcagcaacagaatgaaaaagagatgatggaacagattcgccagcaaacagatattttagagaaggagcgcaaagccttcaagacaattgaaaagccaagaattggagagtgtttggtggcaccatcttcctatcagtcaaagcaaagagtagagaggccatcctctctcctcagcttaaatacctcaaataagggagaacttaatgtactggggtccctatcattaaaagatgcagctcttgcccaaaaagacagttcctctgctcacttacccccaaaggaccgacctgtcaccgtgttctttgaaagaaaaggaagtccatgccaatctagtactgtcaaggaattatccaagacagacagaatgggcacccagctgaatgtagcctgtaaactctcaaataatcgcatttcaaaaagagaacactttaggccaactcagtcttacagccacaattctgatgacctttccagagagggaaatgctaggcccattttcttcactccaaaggacaatatgagtattccccttgtcagcaaagaagccttaaacagtaaaaatcctcaactccataaagaagatgaaccagcatggaaacctgtgaagttagctgggccaggccaaagagagacatcacagcgattttcgtcagttgatgaacaagcaaaacttcataagactatgtctcaaggagagattaccaagttggcagtgagacagaaggcttcagattcagatataagacctcagagagctaagatgagattctgggccaaagggaaacaaggggagaagaagactaccagagtgaaacctactacccagtcagaggtttcgccactctttgcaggcacagatgtgattccagctcatcagtttccagatgaattagctgcatatcacccaacacctcctttgagcccagaactgcccggcagttgccggaaggaattcaaagagaacaaagaaccttctccaaaggctaagcgcaagcgaagtgtgaagattagcaacgtggctttggattctatgcattggcaaaatgactctgtccagatcatagcaagtgtcagtgatttaaaaagcatggatgaatttcttctgaaaaaggtgaatgacctagataatgaagacagcaagaaggatacactagtggatgttgtatttaaaaaagccctgaaggaatttcggcagaatatcttcagcttttattcatctgcattggcgatggatgatgggaaaagcatacggtataaagacctctatgcactatttgaacagattctggaaaagacgatgaggcttgagcagcgtgattcactgggtgaatctccagtgagagtttgggtcaacacttttaaagtgtttttagatgaatatatgaatgaattcaagacttcagattgcacagccacaaaggtgccaaaaacagaaagaaagaaaagaaggaaaaaggaaactgatttggtggaagaacacaatggtcacatctttaaagccacccaatatagcatccctacatactgtgaatactgttcttctttgatatggataatggaccgagcctctgtttgcaaattatgcaagtatgcttgccataagaagtgctgtctgaaaaccacagccaagtgctctaaaaagtatgatccagagctgtcatctcgacaatttggggttgaactgtcccgtttgaccagtgaagaccgaactgttcctttagtagtggaaaagctcataaactacattgaaatgcatggactgtatacagaaggtatttatcgaaagtctggttcgactaataaaatcaaggagcttcggcagggtctagatacagatgctgagagtgtaaatctagatgactataacatacacgtcattgcaagtgtattcaaacaatggcttcgagatttgcccaatcctctcatgacctttgaactctatgaggaatttcttcgagctatgggccttcaggagaggaaggagacaatccgtggtgtatactctgtgattgatcaactctcccgaactcatctcaatacactggaacgcctcatctttcatctagtcaggattgctctgcaggaagacactaatcgaatgtctgctaatgctttggccattgtgtttgcgccctgcattctccgctgccctgacaccactgacccactacaaagtgtacaggacatcagtaagactaccacttgtgtggaactgattgttgtggaacaaatgaataaatacaaggctcgtctcaaagatatcagtagcttggaatttgctgagaataaggcaaagaccaggttgtcactgattcgtagatcaatgggaaaggggcgtattcgtcgaggaaactatccaggtccatcgtctcctgttgtagttcggttgccttctgtgtctgatgtctcagaggagaccttgactagtgaggcagccatggagactgacatcacagaacagcagcaagcagctatgcagcaggaggagagagtactgactgagcagattgagaacctacagaaggagaaggaggagctaacatttgagatgcttgtactggaaccccgtgcctctgatgatgaaacccttgagtctgaggcctccattgggactgctgatagctcagagaatttgaatatggagtctgaatatgctatctctgagaaatcagaaagaagcttagcccttagctccctgaagacagctggcaagtctgaaccttccagcaagttgcgaaagcaacttaaaaagcagcaagactctttagatgtcgtggactcttcggtctcctctttatgtctgtctaacacggcatcatctcatgggaccagaaaactatttcagatttattccaaatctccattctaccgagctgcctcaggtaatgaggccctgggaatggaaggaccattgggccagaccaaattcctggaagacaagcctcagttcatcagcagaggaaccttcaacccggaaaagggcaaacaaaaattaaagaatgtgaaaaactcacctcagaaaaccaaagagaccccagaggggacagtcatgtctggccgcagaaaaactgtggacccagactgcacctccaaccaacagctagcactctttggaaataatgaatttatggtctgaaccggcagatgtgtgtccctccgtggctacagagtggtaaacaaatctcacctttggggctgcgtttcatcacctcgtccacaatagtcaatcctaattgtggtcctgcctcttttctaagcatatggctaagactgtatgtgctgaattcctgggcctcctgcagaagcagaaagcctgctggggatggtgccagctgtgccttggctgttgtatttgaattgagatttttactatacaaagccacctagggcctggggatttgggtcagttgtagttgcctctcccccaccctcttttcccttcccaaaggtgggtgttgaactaggggggatattgctgtcctgagggaccctctcatttctgacatttgaagaaaacgtataaatctttcttaaccgtgaaagcaaaagcctttgggtttattttgggatagttaggagctagggtagaatataatttttttccaaaaacttacttacaaacaaaaagcctaatccctctattttaagatttctgaaaaaacactccatgttatattctggggaaagcaaaaacaaaaaaaaaaaacaaaaaaaaaaaaacaaaaaaaaaccgtgattgtttccattaagccatcagagcgtgtctcagatatcttgttatacagtgaagaagagaatacctattttttttgatgatgtttgatgtcatagtaatcagtgctggtttaactcctgtttagttcctgccaaatacattgcatgggctgaagtgtcagtagccatactgttctcatgtttcttggtcctaggatcagattcttctacattattttttagtttcccagagacatggtgatccctaaacttatgaaggtttcatcctaagccattcaggcttttctctttgtatagattaaaccgaaaaccgcatatgagcctgttcatctgctggtggattcccaccacagactcagactcaaacaaacaaacaaataatgtgaccgtttagttagtttccaaaaacattcacatacaatattgcatgaataagtaagtaagtgttacagaaagctgccaaaaaataaaaaggtttttaatatgacctatctaactaactaacttttatcttccttttctcagactatcagtattaaatagatggaaaaaaatcaaggactacttgaagctatttttgttaatattctggttactgaagtttattgtaaatatgtatgtatagtaggcatatttctttttaaccttgtgcttccctccttcccatggaatttcttcccacagatgaggggccactggacagggggatgagagccattcgtccctgggttgagggaattagtaagacatcattttcaccactgggtggtcttcatacacatgagttataatagcattttaagtatcttagcatttgtgggattagaaatctgtttttgctatttataatatataaaaaatgaaacatgatagcctttcttgagataagtatgtgaaatgtttatttttaaagttactaaatgcatcttgtcttgctactacatgcactgctctgaaaaagagcctttaccatctataacctgtattttgggtattcttccttttcatacttctttgaagttgtggaaatattaagtcttttgttaaggcagagtctctctctcctgttacacaacactgaacctcacgccactgcctcagtggttattggccagccccagaggttagacttggagcataattctgagtggcagctaaaggtagcaggagtcttacctctccctactttgggttcagaattgagccagagaaaggaagccattaaaatctccagaataatgatagttaatgagcaaatgttatgctttatatcccacagacatctgccaccttgttcatcttgtcctgaggagtaataaataatgttaagcttttaaaaatctgaatttcagagaatctcctagaggatagaggaaaacccctcagcatggtgtgttagagtgggattgctggttcctcagccccgtgccaggttgcacagtctgtgtttcagtgttcttgggagagtagtgtactgctgggcattaattgttactctgcacttgctccagaatgttggttaaatcctgtatgaaaaaaagagattgcccttatggaataatttcctgtggcccagaggaatggccagaagaacatatgttggcacatgttcttccttctaaatctttgtggggcttttttggcaaaataagttttttggcagttaaaaaacgactgatgtaggtcactttaaaggaactaggtgatggatgttaagagactttataatttttctcagggacctgaaactccagtttggataaaattcaattaaaaaaacttgttttttcagttgctagatttgtggatttctagtaatttaatctgccaggattggggtgggtgggtgaggaggagagagccacaaaatgataagagtggagagcagtgtggggccctccctttgagggaaagccgttgtttacatagggtagtaggccttgttggcctgatcaagagatgaagccataactcttaaaaaccttcagaaccaaacgctgtgtctgcatccatctgttctcactggccctctgcatggtaaagttatgtcaccacaaagtgatgccgcattacaatcacttatgaaactgttagcccttaatatgcatcacatttgtggttccatagtgcttctcctttgcttgtttgatctctgcatggcagcagtggggcagctccacatttggagcccatactccaaaatgcagagcactcttctcacagcacacattcccagccccaaacaaaacctgaattttcaactctgcccattaaagtgaatgtatccctgtaatttagtatgtacttattatggaaaatgtaacaaaagcagagaagtgtgatttcattctgtatcacaaattgaagcaaatcaacagcaaatacagcaggattcagggaggcttagtttacaacgtactttgtacctcctgccatttaaattattttgccactctgggcttctgaaaacacaaagggagatacagccctccaactatgagccttgcagagagagacaaaagggccagaggtcctgggatggaatactagagcccccaccttctcatgctttggaaacctgccagagcacttaccctgctggaagattaatgaagactccattctgtgtttcataacagtagcgttgttttctccatcaaaaacagagggtcacagaaatgtgctgaaaagatgtggtccagcaaggttctgtagtcccacctcagtgcctgtgggctgtgtttttcactgtaacaagcactttggtaaactagaaagaagaaaggattctcaggatgtgttcaaagctaagagagttttcattttaaaaagaaacatacatactcactccatggctttcctcatcctcctctcttttttcttcttggtgggaagctggatgcggggcatgcatcattctgtatggacaaatgtgttatgtccacccatactcttgtgacaactccccagcactgtcctgcaataccatgctggccttggtagtaaaactccttggtatctgtgagagtcctctttttctatgccctagactacttttaaccacttttctctggaatgactcccacatttgattgggtattgaaagggtaacagcaaaatgatgattgtggagatggatctattaggtctcatgttggtcccctggttgaaactattttcaaaaaagccccaacaatgggcctgtcaccttgctagtcatccattcttaatgcctatttatcagccctctgaggtcatataaaagttgcaccttttgaaccaagtatttgtatttactatgggaaaggtgtggactacagattcgtattatattattttaatggattttaagtaatttataagtatgctgagtgtaaattttttttaaaaactgtattataaaaggacatatcctgtgaaatataacattttactgtttaatagaataattctataagaagaatgatttatctcacccacggaactgattacattccggatgcaatcaataggcactttgtaatttcctttttgtttttttttctttgctggggggttgaggggtaacaagataccatctgtataaagtgcagtttgtgtcactcaaaatatgcactgtatggctacacaaaagcagcttgatgaacaaatcaccccatggctcattaaagaacaaagcttccagaagcagc

SEQ ID NO: 156775 - DNA, 7749 bp, Homo sapiens
  Payload ID: 10733
  Gene Symbol: MYO9A
  Gene Name: myosin IXA
  Uniprot ID: B2RTY4
  ENST ID: ENST00000444904
  CDS Start-End: 103-7749
ggggctgcggtggccaccgcggcggagccagttattttaccaagaaaatggtttgcacgactttgaacatatactatccatgctgatgggacaggatccaatatgaatataaatgatggaggaagacgacgctttgaagataatgaacatacattacggatatatcctggggctatttcagaagggacaatctactgtccgattcctgccagaaaaaactccacagctgctgaggtgattgagtctcttataaacaaacttcatcttgacaaaacaaaatgttatgttctagcagaggtaaaggaatttggtggagaagaatggattctcaatccaacagattgtccagttcagcgaatgatgctgtggccccgaatggctctggaaaatcgcttaagtggagaggactaccgcttccttctgagagagaaaaaccttgatggatcaatccattatggtagcctgcagtcatggctacgggtaacagaagaacgtcgcaggatgatggaacggggttttcttccacagcctcaacagaaagactttgatgatttatgtagtttacctgatttgaatgagaaaactctcttagaaaacctacgaaatcgctttaagcatgaaaaaatttatacctatgttggcagtattctaatagttattaacccattcaagtttcttcctatttataaccccaaatatgtcaaaatgtatgataaccaccaactgggaaaacttgagccccacatttatgctgtggctgatgtagcttatcatgccatgcttcagcgcaaaaagaatcagtgcatcgtgatttcaggagagagtggttctgggaagactcaaagcacaaactttcttattcaccaccttactgctctcagtcagaaaggatttgccagtggagtagaacagattattcttggagctggaccagtacttgaggcctttggaaatgcaaagacagctcataataacaattcaagtcgttttgggaagtttattcaagtaaattaccaggaaacaggcactgtacttggtgcctatgttgaaaaatatctactggagaagtccagactcgtttatcaggagcataatgaacggaactatcatgtattctattacctcctggcaggagcaagtgaagatgagagatcagcattccatcttaagcaaccagaggaatatcattatctcaatcagataacaaagaaacccctcagacagagctgggatgattattgctatgactctgagccggattgcttcacggtggaaggagaagatttgagacatgactttgagcgcctacaacttgccatggaaatggtaggatttcttcccaagacacgaagacagattttctctcttctctcagccatactacatttgggtaatatctgttacaaaaagaagacataccgggatgactccattgatatctgtaatcctgaagttctgcctattgtctcagaattattagaggttaaagaagagatgctatttgaagcattagttacaaggaagacggtgacagtgggagaaaagcttattttgccatacaagttggcagaggctgtgacagtgaggaactccatggctaagtctctgtatagtgccctgtttgactggatagtttttcgaattaatcatgcacttctgaatagtaaagatttagagcataataccaagacattgtctattggtgttcttgatatttttgggtttgaagattatgaaaataacagctttgaacagttctgtattaattttgctaatgaacgtttacagcactactttaatcagcatatctttaaattggaacaagaggaatatagaactgaaggtatcagctggcacaacatagattacattgataatacctgctgcataaatcttattagcaaaaaaccaacaggactgcttcatcttttggatgaagaaagcaactttccacaggctacaaatcaaacattgctagacaagtttaagcatcaacatgaagataattcttacatcgaatttccagccgtgatggagcctgctttcattataaaacattatgctggaaaagtaaaatatggggtaaaggatttccgggaaaaaaatacagatcatatgcgcccagacattgtagctcttctgagaagcagcaagaatgcatttatctctgggatgattggaattgatcctgtagctgttttccgatgggcaattctccgagcttttttcagagccatggttgctttcagggaagctgggaaaagaaacattcacagaaaaactggacatgatgatacagcgccatgtgcaattttgaaaagtatggatagttttagctttctccaacacccagtccaccagaggagcttagagattctgcagagatgcaaggaagagaagtacagtataacccggaaaaatcccagaacacctctttctgatctccagggcatgaatgctctaaatgaaaaaaaccaacatgatacatttgatattgcctggaatggcagaactgggattcgccagagcagactatcaagtggcacctccttgcttgataaagatggaatatttgctaattcaactagcagcaaactcctggagagagcccatggaattctcacgagaaacaaaaatttcaaatccaagcctgcccttccaaagcacttgctagaagtaaattctttaaagcacctgacaagactgacactacaagatcgcattaccaagtctcttcttcatttacacaagaagaaaaaacctcccagcatcagtgcccagtttcaggcatcattaagcaagctaatggaaacacttggtcaagcagaaccatattttgtaaaatgcattcgctctaatgctgaaaagctgcccttaaggttcagtgatgtcttggtacttagacagcttcgatacaccgggatgctggaaacagttcgaattcgccaatcaggatacagctccaaatattctttccaggattttgtgagccacttccatgtacttcttccccgaaatattattccatccaaatttaacattcaggatttcttcaggaaaataaatcttaatccagataattatcaagttggaaaaaccatggtctttctaaaggagcaggaacgacagcacttacaagatctgcttcaccaagaggtgctccgcagaatcatattgttgcagcgatggttcagggtcttgctgtgtaggcagcatttcctccatctgagacaagcatctgttattatccagagattctggaggaattacctaaatcagaagcaagtcagagatgcagctgtgcagaaggatgcttttgttatggctagtgcagctgctcttctccaagcttcctggcgtgctcacttagagaggcagcggtacttggagttacgggctgcagccatcgttatccagcagaaatggagagattactataggcgcaggcacatggctgctatttgcatacaagcaagatggaaagcctacagggaaagtaaaaggtaccaagaacaaaggaaaaaaattatccttttgcaatcaacatgtagaggattcagagcaagacaaagatttaaagctttaaaagaacaaaggctaagagaaacaaagccagaagttggattggtgaatattaagggatatggatctctggaaattcagggttcagacccttcaggatgggaggattgttcttttgacaacagaataaaagccatagaggaatgtaaatctgtaatagagagtaatcgaattagccgtgaaagttcagtggactgcttgaaggagtcaccaaacaagcagcaggagagagcccaaagccagagtggtgtggacttgcaggaagatgtgcttgtaagagagagacccagatccttggaggatctccatcagaaaaaagtaggccgggctaagagagaaagtaggagaatgagagaactagagcaagctatatttagcttagaattgctgaaagttcgttctcttggtggtatttctccttcagaggatcgcagatggtctacagaattggtgcctgaaggccttcagtctccacggggtacacctgatagtgagagctctcaaggaagcttggaacttctgagctatgaggaaagccaaaagagcaaactagagtctgtcatttcagatgaaggagacttgcagtttccatcacctaagatatccagcagtccaaaatttgattcacgggacaatgccctcagtgcctcaaatgagactagcagtgcagagcatttgaaggatggaactatgaaggaaatggtggtctgcagttctgagtctattacctgtaaaccacagctgaaagactccttcatttcaaatagtctacctacttttttttatatcccccaacaagacccactgaaaacaaattcccaactagacacaagtatccaaagaaacaaactattggaaaatgaagacacagcgggggaagctcttactttggatatcaacagggaaactagaaggtatcactgctcaggaaaagatcagattgttccttctttgaatacagagtcttctaatcctgtgcttaagaagttagaaaagctaaacactgagaaggaagaaaggcaaaaacagttgcagcaacagaatgaaaaagagatgatggaacagattcgccagcaaacagatattttagagaaggagcgcaaagccttcaagacaattgaaaagccaagaattggagagtgtttggtggcaccatcttcctatcagtcaaagcaaagagtagagaggccatcctctctcctcagcttaaatacctcaaataagggagaacttaatgtactggggtccctatcattaaaagatgcagctcttgcccaaaaagacagttcctctgctcacttacccccaaaggaccgacctgtcaccgtgttctttgaaagaaaaggaagtccatgccaatctagtactgtcaaggaattatccaagacagacagaatgggcacccagctgaatgtagcctgtaaactctcaaataatcgcatttcaaaaagagaacactttaggccaactcagtcttacagccacaattctgatgacctttccagagagggaaatgctaggcccattttcttcactccaaaggacaatatgagtattccccttgtcagcaaagaagccttaaacagtaaaaatcctcaactccataaagaagatgaaccagcatggaaacctgtgaagttagctgggccaggccaaagagagacatcacagcgattttcgtcagttgatgaacaagcaaaacttcataagactatgtctcaaggagagattaccaagttggcagtgagacagaaggcttcagattcagatataagacctcagagagctaagatgagattctgggccaaagggaaacaaggggagaagaagactaccagagtgaaacctactacccagtcagaggtttcgccactctttgcaggcacagatgtgattccagctcatcagtttccagatgaattagctgcatatcacccaacacctcctttgagcccagaactgcccggcagttgccggaaggaattcaaagagaacaaagaaccttctccaaaggctaagcgcaagcgaagtgtgaagattagcaacgtggctttggattctatgcattggcaaaatgactctgtccagatcatagcaagtgtcagtgatttaaaaagcatggatgaatttcttctgaaaaaggtgaatgacctagataatgaagacagcaagaaggatacactagtggatgttgtatttaaaaaagccctgaaggaatttcggcagaatatcttcagcttttattcatctgcattggcgatggatgatgggaaaagcatacggtataaagacctctatgcactatttgaacagattctggaaaagacgatgaggcttgagcagcgtgattcactgggtgaatctccagtgagagtttgggtcaacacttttaaagtgtttttagatgaatatatgaatgaattcaagacttcagattgcacagccacaaaggtgccaaaaacagaaagaaagaaaagaaggaaaaaggaaactgatttggtggaagaacacaatggtcacatctttaaagccacccaatatagcatccctacatactgtgaatactgttcttctttgatatggataatggaccgagcctctgtttgcaaattatgcaagtatgcttgccataagaagtgctgtctgaaaaccacagccaagtgctctaaaaagtatgatccagagctgtcatctcgacaatttggggttgaactgtcccgtttgaccagtgaagaccgaactgttcctttagtagtggaaaagctcataaactacattgaaatgcatggactgtatacagaaggtatttatcgaaagtctggttcgactaataaaatcaaggagcttcggcagggtctagatacagatgctgagagtgtaaatctagatgactataacatacacgtcattgcaagtgtattcaaacaatggcttcgagatttgcccaatcctctcatgacctttgaactctatgaggaatttcttcgagctatgggccttcaggagaggaaggagacaatccgtggtgtatactctgtgattgatcaactctcccgaactcatctcaatacactggaacgcctcatctttcatctagtcaggattgctctgcaggaagacactaatcgaatgtctgctaatgctttggccattgtgtttgcgccctgcattctccgctgccctgacaccactgacccactacaaagtgtacaggacatcagtaagactaccacttgtgtggaactgattgttgtggaacaaatgaataaatacaaggctcgtctcaaagatatcagtagcttggaatttgctgagaataaggcaaagaccaggttgtcactgattcgtagatcaatgggaaaggggcgtattcgtcgaggaaactatccaggtccatcgtctcctgttgtagttcggttgccttctgtgtctgatgtctcagaggagaccttgactagtgaggcagccatggagactgacatcacagaacagcagcaagcagctatgcagcaggaggagagagtactgactgagcagattgagaacctacagaaggagaaggaggagctaacatttgagatgcttgtactggaaccccgtgcctctgatgatgaaacccttgagtctgaggcctccattgggactgctgatagctcagagaatttgaatatggagtctgaatatgctatctctgagaaatcagaaagaagcttagcccttagctccctgaagacagctggcaagtctgaaccttccagcaagttgcgaaagcaacttaaaaagcagcaagactctttagatgtcgtggactcttcggtctcctctttatgtctgtctaacacggcatcatctcatgggaccagaaaactatttcagatttattccaaatctccattctaccgagctgcctcaggtaatgaggccctgggaatggaaggaccattgggccagaccaaattcctggaagacaagcctcagttcatcagcagaggaaccttcaacccggaaaagggcaaacaaaaattaaagaatgtgaaaaactcacctcagaaaaccaaagagaccccagaggggacagtcatgtctggccgcagaaaaactgtggacccagactgcacctccaaccaacagctagcactctttggaaataatgaatttatggtctga

SEQ ID NO: 156776 - DNA, 4008 bp, Homo sapiens
  Payload ID: 10733
  Gene Symbol: MYO9A
  Gene Name: myosin IXA
  Uniprot ID: B2RTY4
  ENST ID: ENST00000424560
  CDS Start-End: 443-2632
gcgcgaccgaagcggataagggacgcggcggcggttggctgtgtctgttgagagagtacaggacagcccggactgcgagaggcggcggcggaggcagtagttgcaccggcagaggcggccgctggcagcggttgaggcggcggtccaacgcgtgctctctgggcggggcggagtctctctgacagggcgggggatgcgccgcggccgctcgcccggaccctgaggctgctgggcccaccctcccggaaccgtccgaccctcggtggcctcggcctcttctgccatctccggtcctaccctggggcggagggtggaaggcagcttccgtcgaagaggagggggctgcggtggccaccgcggcggagcccgagttattttaccaagaaaatggtttgcacgactttgaacatatactatccatgctgatgggacaggatccaatatgaatataaatgatggaggaagacgacgctttgaagataatgaacatacattacggatatatcctggggctatttcagaagggacaatctactgtccgattcctgccagaaaaaactccacagctgctgaggtgattgagtctcttataaacaaacttcatcttgacaaaacaaaatgttatgttctagcagaggtaaaggaatttggtggagaagaatggattctcaatccaacagattgtccagttcagcgaatgatgctgtggccccgaatggctctggaaaatcgcttaagtggagaggactaccgcttccttctgagagagaaaaaccttgatggatcaatccattatggtagcctgcagtcatggctacgggtaacagaagaacgtcgcaggatgatggaacggggttttcttccacagcctcaacagaaagactttgatgatttatgtagtttacctgatttgaatgagaaaactctcttagaaaacctacgaaatcgctttaagcatgaaaaaatttatacctatgttggcagtattctaatagttattaacccattcaagtttcttcctatttataaccccaaatatgtcaaaatgtatgataaccaccaactgggaaaacttgagccccacatttatgctgtggctgatgtagcttatcatgccatgcttcagcgcaaaaagaatcagtgcatcgtgatttcaggagagagtggttctgggaagactcaaagcacaaactttcttattcaccaccttactgctctcagtcagaaaggatttgccagtggagtagaacagattattcttggagctggaccagtacttgaggcctttggaaatgcaaagacagctcataataacaattcaagtcgttttgggaagtttattcaagtaaattaccaggaaacaggcactgtacttggtgcctatgttgaaaaatatctactggagaagtccagactcgtttatcaggagcataatgaacggaactatcatgtattctattacctcctggcaggagcaagtgaagatgagagatcagcattccatcttaagcaaccagaggaatatcattatctcaatcagataacaaagaaacccctcagacagagctgggatgattattgctatgactctgagccggattgcttcacggtggaaggagaagatttgagacatgactttgagcgcctacaacttgccatggaaatggtaggatttcttcccaagacacgaagacagattttctctcttctctcagccatactacatttgggtaatatctgttacaaaaagaagacataccgggatgactccattgatatctgtaatcctgaagttctgcctattgtctcagaattattagaggttaaagaagagatgctatttgaagcattagttacaaggaagacggtgacagtgggagaaaagcttattttgccatacaagttggcagaggctgtgacagtgaggaactccatggctaagtctctgtatagtgccctgtttgactggatagtttttcgaattaatcatgcacttctgaatagtaaagatttagagcataataccaagacattgtctattggtgttcttgatatttttgggtttgaagattatgaaaataacagctttgaacagttctgtattaattttgctaatgaacgtttacagcactactttaatcagcatatctttaaattggaacaagaggaatatagaactgaaggtatcagctggcacaacatagattacattgataatacctgctgcataaatcttattagcaaaaaaccaacaggactgcttcatcttttggatgaagaaagcaactttccacaggctacaaatcaaacattgctagacaagtttaagcatcaacatgaagataattcttacatcgaatttccagccgtgatggagcctgctttcattataaaacattatgctggaaaagtaaaatatggggtaaaggatttccgggaaaaaaatacagatcatatgcgcccagacattgtagctcttctgagaagcagcaagaatgcatttatctctgggatgattggaattgatcctgtagctgttttccgatgggcaattctccgagcttttttcagagccatggttgctttcagggaagctgggaaaagaaacattcacagaaaaactggtaagtagtagttattagtattctaccatacttcatctttttttttttttttacctttctacttctccacaaaaaggagtagaattcttgctatgagattctcaaggacaaaaatcctgcttctgtagtcaatctagtgtcatctcttaactgatttgtgactatgaacagtttttcttttctgtaaaagagttatactgcctttaaaataatgaggataaagtcagagcatctgttcatgaagtgttcattttcttttcctttactcttagttcatggatttttaaaaactttgaaatttagaaatagataaagcaggatactttttctgtatgcctcccccttcaatcataaaatctctcatctcattttctgtgggagggcaacttcataagcacttttggcctactggaaaccaaactattgtttgctgtagctctagtcttagatagggccattgctgcatagagaagattttgtgatacatatgcagttgagatttatgcctttcagtagaaatgttatagggctcacctgtgctttcaggactcccaaagtgatttacgtggctttttgggatgtgcactagtagtaaaacttttaagtttagcttttaaatgtttgagacaaatagatatatttgagagagtgtatttctaaaaatacatgtaaaataattgaacctagtttccattttttagattgtaaagtatttgaactggtctttgtagatgtatagggagaattatagtttattagagaaataaaaggactatctcaaacctgctttgccttttacaaagtgatttctaagaggttatctttgtaaaaagctttaaggaaaattttttttctttaagatgctttcttgtttattatgacaaacttctaatcaagaaaaccactcaaaattgattagcatcctgctaagacataattgagtaagagaagaaacttttcttgtatttactgtcaaagcctatttactttattcacattatctgtatattcctttggcatttaaaatctattatttgtgaaagctagttgttacatatctgttattatcaatatcggcaatgacatgcaatgttattaatgataaacaacctgtattttctctaccttgataaagtctagattccttattttctaatcttgttttcccttctggctagtacagagcttccatataataatctctttttgaaaatttgtattcaacataacatgcatatacaaaagtacacaaagcaaaaatgtatagttcagtggagtaccacaaagtaaacacaaccctggaactaccacctaggttaagaaacacaacattccagccacccaaaatttctccttggaaaaaactttaaaatttttacttttt

SEQ ID NO: 156777 - DNA, 5111 bp, Homo sapiens
  Payload ID: 10733
  Gene Symbol: MYO9A
  Gene Name: myosin IXA
  ENST ID: ENST00000566885
  CDS Start-End: 639-4544
cggcggcggaggcagtagttgcaccggcagaggcggccgctggcagcggttgaggcggcggtccaacgcgtgctctctgggcggggtgcggcgggggatgtgcctgctcaggccgggcggagtctctctgacagggcgggggatgcgccgcggccgctcgcccggaccctgaggctgctgggcccaccctcccggaaccgtccgaccctcggtggcctcggcctcttctgccatctccggtcctaccctggggcggagggtggaaggcagcttccgtcgaagaggagggggctgcggtggccaccgcggcggagcccgaggcctttggaaatgcaaagacagctcataataacaattcaagtcgttttgggaagtttattcaagtaaattaccaggaaacaggcactgtacttggtgcctatgttgaaaaatatctactggagaagtccagactcgtttatcaggagcataatgaacggaactatcatgtattctattacctcctggcaggagcaagtgaagatgagagatcagcattccatcttaagcaaccagaggaatatcattatctcaatcaggattgcttcacggtggaaggagaagatttgagacatgactttgagcgcctacaacttgccatggaaatggtaggatttcttcccaagacacgaagacagattttctctcttctctcagccatactacatttgggtaatatctgttacaaaaagaagacataccgggatgactccattgatatctgtaatcctgaagttctgcctattgtctcagaattattagaggttaaagaagagatgctatttgaagcattagttacaaggaagacggtgacagtgggagaaaagcttattttgccatacaagttggcagaggctgtgacagtgaggaactccatggctaagtctctgtatagtgccctgtttgactggatagtttttcgaattaatcatgcacttctgaatagtaaagatttagagcataataccaagacattgtctattggtgttcttgatatttttgggtttgaagattatgaaaataacagctttgaacagttctgtattaattttgctaatgaacgtttacagcactactttaatcagcatatctttaaattggaacaagaggaatatagaactgaaggtatcagctggcacaacatagattacattgataatacctgctgcataaatcttattagcaaaaaaccaacaggactgcttcatcttttggatgaagaaagcaactttccacaggctacaaatcaaacattgctagacaagtttaagcatcaacatgaagataattcttacatcgaatttccagccgtgatggagcctgctttcattataaaacattatgctggaaaagtaaaatatggggtaaaggatttccgggaaaaaaatacagatcatatgcgcccagacattgtagctcttctgagaagcagcaagaatgcatttatctctgggatgattggaattgatcctgtagctgttttccgatgggcaattctccgagcttttttcagagccatggttgctttcagggaagctgggaaaagaaacattcacagaaaaactggacatgatgatacagcgccatgtgcaattttgaaaagtatggatagttttagctttctccaacacccagtccaccagaggagcttagagattctgcagagatgcaaggaagagaagtacagtaaggctacaaatcctgataaactgttatcacatatccatttggaaatggaaaccaggagcatcctacaccagggtataacccggaaaaatcccagaacacctctttctgatctccagggcatgaatgctctaaatgaaaaaaaccaacatgatacatttgatattgcctggaatggcagaactgggattcgccagagcagactatcaagtggcacctccttgcttgataaagatggaatatttgctaattcaactagcagcaaactcctggagagagcccatggaattctcacgagaaacaaaaatttcaaatccaagcctgcccttccaaagcacttgctagaagtaaattctttaaagcacctgacaagactgacactacaagatcgcattaccaagtctcttcttcatttacacaagaagaaaaaacctcccagcatcagtgcccagtttcaggcatcattaagcaagctaatggaaacacttggtcaagcagaaccatattttgtaaaatgcattcgctctaatgctgaaaagctgcccttaaggttcagtgatgtcttggtacttagacagcttcgatacaccgggatgctggaaacagttcgaattcgccaatcaggatacagctccaaatattctttccaggattttgtgagccacttccatgtacttcttccccgaaatattattccatccaaatttaacattcaggatttcttcaggaaaataaatcttaatccagataattatcaagttggaaaaaccatggtctttctaaaggagcaggaacgacagcacttacaagatctgcttcaccaagaggtgctccgcagaatcatattgttgcagcgatggttcagggtcttgctgtgtaggcagcatttcctccatctgagacaagcatctgttattatccagagattctggaggaattacctaaatcagaagcaagtcagagatgcagctgtgcagaaggatgcttttgttatggctagtgcagctgctcttctccaagcttcctggcgtgctcacttagagaggcagcggtacttggagttacgggctgcagccatcgttatccagcagaaatggagagattactataggcgcaggcacatggctgctatttgcatacaagcaagatggaaagcctacagggaaagtaaaaggtaccaagaacaaaggaaaaaaattatccttttgcaatcaacatgtagaggattcagagcaagacaaagatttaaagctttaaaagaacaaaggctaagagaaacaaagccagaagttggattggtgaatattaagggatatggatctctggaaattcagggttcagacccttcaggatgggaggattgttcttttgacaacagaataaaagccatagaggaatgtaaatctgtaatagagagtaatcgaattagccgtgaaagttcagtggactgcttgaaggagtcaccaaacaagcagcaggagagagcccaaagccagagtggtgtggacttgcaggaagatgtgcttgtaagagagagacccagatccttggaggatctccatcagaaaaaagtaggccgggctaagagagaaagtaggagaatgagagaactagagcaagctatatttagcttagaattgctgaaagttcgttctcttggtggtatttctccttcagaggatcgcagatggtctacagaattggtgcctgaaggccttcagtctccacggggtacacctgatagtgagagctctcaaggaagcttggaacttctgagctatgaggaaagccaaaagagcaaactagagtctgtcatttcagatgaaggagacttgcagtttccatcacctaagatatccagcagtccaaaatttgattcacgggacaatgccctcagtgcctcaaatgagactagcagtgcagagcatttgaaggatggaactatgaaggaaatggtggtctgcagttctgagtctattacctgtaaaccacagctgaaagactccttcatttcaaatagtctacctacttttttttatatcccccaacaagacccactgaaaacaaattcccaactagacacaagtatccaaagaaacaaactattggaaaatgaagacacagcgggggaagctcttactttggatatcaacagggaaactagaaggtatcactgctcaggaaaagatcagattgttccttctttgaatacagagtcttctaatcctgtgcttaagaagttagaaaagctaaacactgagaaggaagaaaggcaaaaacagttgcagcaacagaatgaaaaagagatgatggaacagattcgccagcaaacagatattttagagaaggagcgcaaagccttcaagacaattgaaaagccaagaattggagagtgtttggtggcaccatcttcctatcagtcaaagcaaagagtagagaggccatcctctctcctcagcttaaatacctcaaataagggagaacttaatgtactggggtccctatcattaaaagatgcagctcttgcccaaaaagacagttcctctgctcacttacccccaaaggaccgacctgtcaccgtgttctttgaaagaaaaggaagtccatgccaatctagtactgtcaaggaattatccaagacagacagaatgggcacccagctgaatgtagcctgtaaactctcaaataatcgcatttcaaaaagagaacactttaggccaactcagtcttacagccacaattctgatgacctttccagagagggaaatgctaggcccattttcttcactccaaaggacaatatgagtattcccctgtaagtgaaatgtttatttatgtataaatgggaaacttcttggagtatttttattaaggtgccttgttctgctccaactatttgtgtaaagtggctgctcaacttggccattttctctttgtaaaaatattccctaattgttgactctaccatcacctgaagttggatgtagttatatcctaggaatccttgactgatcatgaatagcagagtaaatactgggttcctccccattaagtgagaagcatttgtgaagggcagtacagtgcctataaacatagtaggcattcaccgaatactggttgctttacagctgtgaagtttagtagttgaaggttgtttgtttcaggctttaaagaagttaatttgttttgttacagctgttggcctatttatggtcatcattacgttcattatacttctttgtatgtgataaacacataacataaaatttcccatcttaaccatttttaaataatatagtacagtagtgttaactgtatatacattgttttgcaaaagatctctagaactttttcttcttgtaaaataaaactctgtacccattgaa

SEQ ID NO: 156778 - DNA, 560 bp, Homo sapiens
  Payload ID: 10733
  Gene Symbol: MYO9A
  Gene Name: myosin IXA
  ENST ID: ENST00000569314
  CDS Start-End: 139-560
agtggcgtcacgtgcgggggcgggacagggcggggccgacccgtgctggcagtagggggcgtgggagttattttaccaagaaaatggtttgcacgactttgaacatatactatccatgctgatgggacaggatccaatatgaatataaatgatggaggaagacgacgctttgaagataatgaacatacattacggatatatcctggggctatttcagaagggacaatctactgtccgattcctgccagaaaaaactccacagctgctgaggtgattgagtctcttataaacaaacttcatcttgacaaaacaaaatgttatgttctagcagaggtaaaggaatttggtggagaagaatggattctcaatccaacagattgtccagttcagcgaatgatgctgtggccccgaatggctctggaaaatcgcttaagtggagaggactaccgcttccttctgagagagaaaaaccttgatggatcaatccattatggtagcctgcagtcatggctacgggtaacagaagaacgtcgcaggatgatggaacggggttttcttcc

SEQ ID NO: 156779 - DNA, 582 bp, Homo sapiens
  Payload ID: 10733
  Gene Symbol: MYO9A
  Gene Name: myosin IXA
  ENST ID: ENST00000568481
  CDS Start-End: 1-582
tttgcccaatcctctcatgacctttgaactctatgaggaatttcttcgagctatgggccttcaggagaggaaggagacaatccgtggtgtatactctgtgattgatcaactctcccgaactcatctcaatacactggaacgcctcatctttcatctagtcagttgtgtggaactgattgttgtggaacaaatgaataaatacaaggctcgtctcaaagatatcagtagcttggaatttgctgagaataaggcaaagaccaggttgtcactgattcgtagatcaatgggaaaggggcgtattcgtcgaggaaactatccaggtccatcgtctcctgttgtagttcggttgccttctgtgtctgatgtctcagaggagaccttgactagtgaggcagccatggagactgacatcacagaacagcagcaagcagctatgcagcaggaggagagagtactgactgagcagattgagaacctacagaaggagaaggaggagctaacatttgagatgcttgtactggaaccccgtgcctctgatgatgaaacccttgagtctgaggcctccattgggactgctgatag

SEQ ID NO: 156780 - DNA, 8111 bp, Homo sapiens
  Payload ID: 10733
  Gene Symbol: MYO9A
  Gene Name: myosin IXA
  ENST ID: ENST00000564571
  CDS Start-End: 161-7351
catctccggtcctaccctggggcggagggtggaaggcagcttccgtcgaagaggagggggctgcggtggccaccgcggcggagcccgagttattttaccaagaaaatggtttgcacgactttgaacatatactatccatgctgatgggacaggatccaatatgaatataaatgatggaggaagacgacgctttgaagataatgaacatacattacggatatatcctggggctatttcagaagggacaatctactgtccgattcctgccagaaaaaactccacagctgctgaggtgattgagtctcttataaacaaacttcatcttgacaaaacaaaatgttatgttctagcagaggtaaaggaatttggtggagaagaatggattctcaatccaacagattgtccagttcagcgaatgatgctgtggccccgaatggctctggaaaatcgcttaagtggagaggactaccgcttccttctgagagagaaaaaccttgatggatcaatccattatggtagcctgcagtcatggctacgggtaacagaagaacgtcgcaggatgatggaacggggttttcttccacagcctcaacagaaagactttgatgatttatgtagtttacctgatttgaatgagaaaactctcttagaaaacctacgaaatcgctttaagcatgaaaaaatttatacctatgttggcagtattctaatagttattaacccattcaagtttcttcctatttataaccccaaatatgtcaaaatgtatgataaccaccaactgggaaaacttgagccccacatttatgctgtggctgatgtagcttatcatgccatgcttcagcgcaaaaagaatcagtgcatcgtgatttcaggagagagtggttctgggaagactcaaagcacaaactttcttattcaccaccttactgctctcagtcagaaaggatttgccagtggagtagaacagattattcttggagctggaccagtacttgaggcctttggaaatgcaaagacagctcataataacaattcaagtcgttttgggaagtttattcaagtaaattaccaggaaacaggcactgtacttggtgcctatgttgaaaaatatctactggagaagtccagactcgtttatcaggagcataatgaacggaactatcatgtattctattacctcctggcaggagcaagtgaagatgagagatcagcattccatcttaagcaaccagaggaatatcattatctcaatcagataacaaagaaacccctcagacagagctgggatgattattgctatgactctgagccggattgcttcacggtggaaggagaagatttgagacatgactttgagcgcctacaacttgccatggaaatggtaggatttcttcccaagacacgaagacagattttctctcttctctcagccatactacatttgggtaatatctgttacaaaaagaagacataccgggatgactccattgatatctgtaatcctgaagttctgcctattgtctcagaattattagaggttaaagaagagatgctatttgaagcattagttacaaggaagacggtgacagtgggagaaaagcttattttgccatacaagttggcagaggctgtgacagtgaggaactccatggctaagtctctgtatagtgccctgtttgactggatagtttttcgaattaatcatgcacttctgaatagtaaagatttagagcataataccaagacattgtctattggtgttcttgatatttttgggtttgaagattatgaaaataacagctttgaacagttctgtattaattttgctaatgaacgtttacagcactactttaatcagcatatctttaaattggaacaagaggaatatagaactgaaggtatcagctggcacaacatagattacattgataatacctgctgcataaatcttattagcaaaaaaccaacaggactgcttcatcttttggatgaagaaagcaactttccacaggctacaaatcaaacattgctagacaagtttaagcatcaacatgaagataattcttacatcgaatttccagccgtgatggagcctgctttcattataaaacattatgctggaaaagtaaaatatggggtaaaggatttccgggaaaaaaatacagatcatatgcgcccagacattgtagctcttctgagaagcagcaagaatgcatttatctctgggatgattggaattgatcctgtagctgttttccgatgggcaattctccgagcttttttcagagccatggttgctttcagggaagctgggaaaagaaacattcacagaaaaactggacatgatgatacagcgccatgtgcaattttgaaaagtatggatagttttagctttctccaacacccagtccaccagaggagcttagagattctgcagagatgcaaggaagagaagtacagtataacccggaaaaatcccagaacacctctttctgatctccagggcatgaatgctctaaatgaaaaaaaccaacatgatacatttgatattgcctggaatggcagaactgggattcgccagagcagactatcaagtggcacctccttgcttgataaagatggaatatttgctaattcaactagcagcaaactcctggagagagcccatggaattctcacgagaaacaaaaatttcaaatccaagcctgcccttccaaagcacttgctagaagtaaattctttaaagcacctgacaagactgacactacaagatcgcattaccaagtctcttcttcatttacacaagaagaaaaaacctcccagcatcagtgcccagtttcaggcatcattaagcaagctaatggaaacacttggtcaagcagaaccatattttgtaaaatgcattcgctctaatgctgaaaagctgcccttaaggttcagtgatgtcttggtacttagacagcttcgatacaccgggatgctggaaacagttcgaattcgccaatcaggatacagctccaaatattctttccaggattttgtgagccacttccatgtacttcttccccgaaatattattccatccaaatttaacattcaggatttcttcaggaaaataaatcttaatccagataattatcaagttggaaaaaccatggtctttctaaaggagcaggaacgacagcacttacaagatctgcttcaccaagaggtgctccgcagaatcatattgttgcagcgatggttcagggtcttgctgtgtaggcagcatttcctccatctgagacaagcatctgttattatccagagattctggaggaattacctaaatcagaagcaagtcagagatgcagctgtgcagaaggatgcttttgttatggctagtgcagctgctcttctccaagcttcctggcgtgctcacttagagaggcagcggtacttggagttacgggctgcagccatcgttatccagcagaaatggagagattactataggcgcaggcacatggctgctatttgcatacaagcaagatggaaagcctacagggaaagtaaaaggtaccaagaacaaaggaaaaaaattatccttttgcaatcaacatgtagaggattcagagcaagacaaagatttaaagctttaaaagaacaaaggctaagagaaacaaagccagaagttggattggtgaatattaagggatatggatctctggaaattcagggttcagacccttcaggatgggaggattgttcttttgacaacagaataaaagccatagaggaatgtaaatctgtaatagagagtaatcgaattagccgtgaaagttcagtggactgcttgaaggagtcaccaaacaagcagcaggagagagcccaaagccagagtggtgtggacttgcaggaagatgtgcttgtaagagagagacccagatccttggaggatctccatcagaaaaaagtaggccgggctaagagagaaagtaggagaatgagagaactagagcaagctatatttagcttagaattgctgaaagttcgttctcttggtggtatttctccttcagaggatcgcagatggtctacagaattggtgcctgaaggccttcagtctccacggggtacacctgatagtgagagctctcaaggaagcttggaacttctgagctatgaggaaagccaaaagagcaaactagagtctgtcatttcagatgaaggagacttgcagtttccatcacctaagatatccagcagtccaaaatttgattcacgggacaatgccctcagtgcctcaaatgagactagcagtgcagagcatttgaaggatggaactatgaaggaaatggtggtctgcagttctgagtctattacctgtaaaccacagctgaaagactccttcatttcaaatagtctacctacttttttttatatcccccaacaagacccactgaaaacaaattcccaactagacacaagtatccaaagaaacaaactattggaaaatgaagacacagcgggggaagctcttactttggatatcaacagggaaactagaaggtatcactgctcaggaaaagatcagattgttccttctttgaatacagagtcttctaatcctgtgcttaagaagttagaaaagctaaacactgagaaggaagaaaggcaaaaacagttgcagcaacagaatgaaaaagagatgatggaacagattcgccagcaaacagatattttagagaaggagcgcaaagccttcaagacaattgaaaagccaagaattggagagtgtttggtggcaccatcttcctatcagtcaaagcaaagagtagagaggccatcctctctcctcagcttaaatacctcaaataagggagaacttaatgtactggggtccctatcattaaaagatgcagctcttgcccaaaaagacagttcctctgctcacttacccccaaaggaccgacctgtcaccgtgttctttgaaagaaaaggaagtccatgccaatctagtactgtcaaggaattatccaagacagacagaatgggcacccagctgaatgtagcctgtaaactctcaaataatcgcatttcaaaaagagaacactttaggccaactcagtcttacagccacaattctgatgacctttccagagagggaaatgctaggcccattttcttcactccaaaggacaatatgagtattccccttgtcagcaaagaagccttaaacagtaaaaatcctcaactccataaagaagatgaaccagcatggaaacctgtgaagttagctgggccaggccaaagagagacatcacagcgattttcgtcagttgatgaacaagcaaaacttcataagactatgtctcaaggagagattaccaagttggcagtgagacagaaggcttcagattcagatataagacctcagagagctaagatgagattctgggccaaagggaaacaaggggagaagaagactaccagagtgaaacctactacccagtcagaggtttcgccactctttgcaggcacagatgtgattccagctcatcagtttccagatgaattagctgcatatcacccaacacctcctttgagcccagaactgcccggcagttgccggaaggaattcaaagagaacaaagaaccttctccaaaggctaagcgcaagcgaagtgtgaagattagcaacgtggctttggattctatgcattggcaaaatgactctgtccagatcatagcaagtgtcagtgatttaaaaagcatggatgaatttcttctgaaaaaggtgaatgacctagataatgaagacagcaagaaggatacactagtggatgttgtatttaaaaaagccctgaaggaatttcggcagaatatcttcagcttttattcatctgcattggcgatggatgatgggaaaagcatacggtataaagacctctatgcactatttgaacagattctggaaaagacgatgaggcttgagcagcgtgattcactgggtgaatctccagtgagagtttgggtcaacacttttaaagtgtttttagatgaatatatgaatgaattcaagacttcagattgcacagccacaaaggtgccaaaaacagaaagaaagaaaagaaggaaaaaggaaactgatttggtggaagaacacaatggtcacatctttaaagccacccaatatagcatccctacatactgtgaatactgttcttctttgatatggataatggaccgagcctctgtttgcaaattatgcaagtatgcttgccataagaagtgctgtctgaaaaccacagccaagtgctctaaaaagtatgatccagagctgtcatctcgacaatttggggttgaactgtcccgtttgaccagtgaagaccgaactgttcctttagtagtggaaaagctcataaactacattgaaatgcatggactgtatacagaaggtatttatcgaaagtctggttcgactaataaaatcaaggagcttcggcagggtctagatacagatgctgagagtgtaaatctagatgactataacatacacgtcattgcaagtgtattcaaacaatggcttcgagatttgcccaatcctctcatgacctttgaactctatgaggaatttcttcgagctatgggccttcaggagaggaaggagacaatccgtggtgtatactctgtgattgatcaactctcccgaactcatctcaatacactggaacgcctcatctttcatctagtcaggattgctctgcaggaagacactaatcgaatgtctgctaatgctttggccattgtgtttgcgccctgcattctccgctgccctgacaccactgacccactacaaagtgtacaggacatcagtaagactaccacttgtgtggaactgattgttgtggaacaaatgaataaatacaaggctcgtctcaaagatatcagtagcttggaatttgctgagaataaggcaaagaccaggttgtcactgattcgtagatcaatgggaaaggggcgtattcgtcgaggaaactatccaggtccatcgtctcctgttgtagttcggttgccttctgtgtctgatgtctcagaggagaccttgactagtgaggcagccatggagactgacatcacagaacagcagcaagcagctatgcagcaggaggagagagtactgactgagcagattgagaacctacagaaggagaaggaggagctaacatttgagatgcttgtactggaaccccgtgcctctgatgatgaaacccttgagtctgaggcctccattgggactgctgatagctcagagaatttgaatatggagtctgaatatgctatctctgagaaatcagaagcttagcccttagctccctgaagacagctggcaagtctgaaccttccagcaagttgcgaaagcaacttaaaaagcagcaagactctttagatgtcgtggactcttcggtctcctctttatgtctgtctaacacggcatcatctcatgggaccagaaaactatttcagatttattccaaatctccattctaccgagctgcctcaggtaatgaggccctgggaatggaaggaccattgggccagaccaaattcctggaagacaagcctcagttcatcagcagaggaaccttcaacccggaaaagggcaaacaaaaattaaagaatgtgaaaaactcacctcagaaaaccaaagagaccccagaggggacagtcatgtctggccgcagaaaaactgtggacccagactgcacctccaaccaacagctagcactctttggaaataatgaatttatggtctgaaccggcagatgtgtgtccctccgtggctacagagtggtaaacaaatctcacctttggggctgcgtttcatcacctcgtccacaatagtcaatcctaattgtggtcctgcctcttttctaagcatatggctaagactgtatgtgctgaattcctgggcctcctgcagaagcagaaagcctgctggggatggtgccagctgtgccttggctgttgtatttgaattgagatttttactatacaaagccacctagggcctggggatttgggtcagttgtagttgcctctcccccaccctcttttcccttccc

SEQ ID NO: 156781 - DNA, 564 bp, Homo sapiens
  Payload ID: 10733
  Gene Symbol: MYO9A
  Gene Name: myosin IXA
  ENST ID: ENST00000564931
  CDS Start-End: 345-564
gcgctgagaatccaggtccagaatcgggagggagcacggatacgccagaatctgagtgggtgggagagcgatccactgccgagacaaaccgaagtggggaggaggcttcttacctgcctcgggcctcaccaccccaaccagccttcaggcacctctgtgttggccggaaagcgacagctacggtcgcaaactcagaggtttcgtccccaaccttgcgacatccctttccagtacagggagaatctaaagctgagttccctgctctgccgtaagttattttaccaagaaaatggtttgcacgactttgaacatatactatccatgctgatgggacaggatccaatatgaatataaatgatggaggaagacgacgctttgaagataatgaacatacattacggatatatcctggggctatttcagaagggacaatctactgtccgattcctgccagaaaaaactccacagctgctgaggtgattgagtctcttataaacaaacttcatcttgacaaaacaaaatgttatgttctagcagaggtaaaggaatttggtggagaagaat

SEQ ID NO: 156782 - DNA, 549 bp, Homo sapiens
  Payload ID: 10733
  Gene Symbol: MYO9A
  Gene Name: myosin IXA
  ENST ID: ENST00000568438
  CDS Start-End: 1-271
ttataaccccaaatatgtcaaaatgtatgataaccaccaactgggaaaacttgagccccacatttatgctgtggctgatgtagcttatcatgccatgcttcagcgcaaaaagaatcagtgcatcgtgatttcaggagagagtggttctgggaagactcaaagcacaaactttcttattcaccaccttactgctctcagtcagaaaggatttgccagtggagtagaacagattattcttggagctggaccagtacttgagtgcctatgttgaaaaatatctactggagaagtccagactcgtttatcaggagcataatgaacggaactatcatgtattctattacctcctggcaggagcaagtgaagatgagagatcagcattccatcttaagcaaccagaggaatatcattatctcaatcagataacaaagaaacccctcagacagagctgggatgattattgctatgactctgagccggattgcttcacggtggaaggagaagatttgagacatgactttgagcgcctacaacttgccatggaaatgg

SEQ ID NO: 156783 - DNA, 1922 bp, Homo sapiens
  Payload ID: 10733
  Gene Symbol: MYO9A
  Gene Name: myosin IXA
  ENST ID: ENST00000568042
  CDS Start-End: 1-1391
ataaaatcaaggagcttcggcagggtctagatacagatgctgagagtgtaaatctagatgactataacatacacgtcattgcaagtgtattcaaacaatggcttcgagatttgcccaatcctctcatgacctttgaactctatgaggaatttcttcgagctatgggccttcaggagaggaaggagacaatccgtggtgtatactctgtgattgatcaactctcccgaactcatctcaatacactggaacgcctcatctttcatctagtcaggattgctctgcaggaagacactaatcgaatgtctgctaatgctttggccattgtgtttgcgccctgcattctccgctgccctgacaccactgacccactacaaagtgtacaggacatcagtaagactaccacttgtgtggaactgattgttgtggaacaaatgaataaatacaaggctcgtctcaaagatatcagtagcttggaatttgctgagaataaggcaaagaccaggttgtcactgattcgtagatcaatgaaacctgtactaattgcagttagattcatgaacattacccgcaattcagtctcgggaaaggggcgtattcgtcgaggaaactatccaggtccatcgtctcctgttgtagttcggttgccttctgtgtctgatgtctcagaggagaccttgactagtgaggcagccatggagactgacatcacagaacagcagcaagcagctatgcagcaggaggagagagtactgactgagcagattgagaacctacagaaggagaaggaggagctaacatttgagatgcttgtactggaaccccgtgcctctgatgatgaaacccttgagtctgaggcctccattgggactgctgatagctcagagaatttgaatatggagtctgaatatgctatctctgagaaatcagaaagaagcttagcccttagctccctgaagacagctggcaagtctgaaccttccagcaagttgcgaaagcaacttaaaaagcagcaagactctttagatgtcgtggactcttcggtctcctctttatgtctgtctaacacggcatcatctcatgggaccagaaaactatttcagatttattccaaatctccattctaccgagctgcctcaggtaatgaggccctgggaatggaaggaccattgggccagaccaaattcctggaagacaagcctcagttcatcagcagaggaaccttcaacccggaaaagggcaaacaaaaattaaagaatgtgaaaaactcacctcagaaaaccaaagagaccccagaggggacagtcatgtctggccgcagaaaaactgtggacccagactgcacctccaaccaacagctagcactctttggaaataatgaatttatggtctgaaccggcagatgtgtgtccctccgtggctacagagtggtaaacaaatctcacctttggggctgcgtttcatcacctcgtccacaatagtcaatcctaattgtggtcctgcctcttttctaagcatatggctaagactgtatgtgctgaattcctgggcctcctgcagaagcagaaagcctgctggggatggtgccagctgtgccttggctgttgtatttgaattgagatttttactatacaaagccacctagggcctggggatttgggtcagttgtagttgcctctcccccaccctcttttcccttcccaaaggtgggtgttgaactaggggggatattgctgtcctgagggaccctctcatttctgacatttgaagaaaacgtataaatctttcttaaccgtgaaagcaaaagcctttgggtttattttgggatagttaggagctagggtagaatataatttttttccaaaaacttacttacaaacaaaaagcctaatccctctattttaagatttctgaaaaaacactcc

SEQ ID NO: 156784 - DNA, 4784 bp, Homo sapiens
  Payload ID: 10733
  Gene Symbol: MYO9A
  Gene Name: myosin IXA
  ENST ID: ENST00000561618
  CDS Start-End: 1-4196
gttcagtggactgcttgaaggagtcaccaaacaagcagcaggagagagcccaaagccagagtggtgtggacttgcaggaagatgtgcttgtaagagagagacccagatccttggaggatctccatcagaaaaaagtaggccgggctaagagagaaagtaggagaatgagagaactagagcaagctatatttagcttagaattgctgaaagttcgttctcttggtggtatttctccttcagaggatcgcagatggtctacagaattggtgcctgaaggccttcagtctccacggggtacacctgatagtgagagctctcaaggaagcttggaacttctgagctatgaggaaagccaaaagagcaaactagagtctgtcatttcagatgaaggagacttgcagtttccatcacctaagatatccagcagtccaaaatttgattcacgggacaatgccctcagtgcctcaaatgagactagcagtgcagagcatttgaaggatggaactatgaaggaaatggtggtctgcagttctgagtctattacctgtaaaccacagctgaaagactccttcatttcaaatagtctacctacttttttttatatcccccaacaagacccactgaaaacaaattcccaactagacacaagtatccaaagaaacaaactattggaaaatgaagacacagcgggggaagctcttactttggatatcaacagggaaactagaaggtatcactgctcaggaaaagatcagattgttccttctttgaatacagagtcttctaatcctgtgcttaagaagttagaaaagctaaacactgagaaggaagaaaggcaaaaacagttgcagcaacagaatgaaaaagagatgatggaacagattcgccagcaaacagatattttagagaaggagcgcaaagccttcaagacaattgaaaagccaagaattggagagtgtttggtggcaccatcttcctatcagtcaaagcaaagagtagagaggccatcctctctcctcagcttaaatacctcaaataagggagaacttaatgtactggggtccctatcattaaaagatgcagctcttgcccaaaaagacagttcctctgctcacttacccccaaaggaccgacctgtcaccgtgttctttgaaagaaaaggaagtccatgccaatctagtactgtcaaggaattatccaagacagacagaatgggcacccagctgaatgtagcctgtaaactctcaaataatcgcatttcaaaaagagaacactttaggccaactcagtcttacagccacaattctgatgacctttccagagagggaaatgctaggcccattttcttcactccaaaggacaatatgagtattccccttgtcagcaaagaagccttaaacagtaaaaatcctcaactccataaagaagatgaaccagcatggaaacctgtgaagttagctgggccaggccaaagagaggttgccagaccggcccataaaaagaaagctcgaatggcgcggacgcgctccgatttcttgactagaggtacttttgccgatggggagggggatacagaggaagatgattacgatgacattattgagccccttctctcccttgaccaagcttctcactgtgagctagggcctgcacccagcctgggtcaggcctctcacagtgactccgaaatgacatcacagcgattttcgtcagttgatgaacaagcaaaacttcataagactatgtctcaaggagagattaccaagttggcagtgagacagaaggcttcagattcagatataagacctcagagagctaagatgagattctgggccaaagggaaacaaggggagaagaagactaccagagtgaaacctactacccagtcagaggtttcgccactctttgcaggcacagatgtgattccagctcatcagtttccagatgaattagctgcatatcacccaacacctcctttgagcccagaactgcccggcagttgccggaaggaattcaaagagaacaaagaaccttctccaaaggctaagcgcaagcgaagtgtgaagattagcaacgtggctttggattctatgcattggcaaaatgactctgtccagatcatagcaagtgtcagtgatttaaaaagcatggatgaatttcttctgaaaaaggtgaatgacctagataatgaagacagcaagaaggatacactagtggatgttgtatttaaaaaagccctgaaggaatttcggcagaatatcttcagcttttattcatctgcattggcgatggatgatgggaaaagcatacggtataaagacctctatgcactatttgaacagattctggaaaagacgatgaggcttgagcagcgtgattcactgggtgaatctccagtgagagtttgggtcaacacttttaaagtgtttttagatgaatatatgaatgaattcaagacttcagattgcacagccacaaaggtgccaaaaacagaaagaaagaaaagaaggaaaaaggaaactgatttggtggaagaacacaatggtcacatctttaaagccacccaatatagcatccctacatactgtgaatactgttcttctttgatatggataatggaccgagcctctgtttgcaaattatgcaagtatgcttgccataagaagtgctgtctgaaaaccacagccaagtgctctaaaaagtatgatccagagctgtcatctcgacaatttggggttgaactgtcccgtttgaccagtgaagaccgaactgttcctttagtagtggaaaagctcataaactacattgaaatgcatggactgtatacagaaggtatttatcgaaagtctggttcgactaataaaatcaaggagcttcggcagggtctagatacagatgctgagagtgtaaatctagatgactataacatacacgtcattgcaagtgtattcaaacaatggcttcgagatttgcccaatcctctcatgacctttgaactctatgaggaatttcttcgagctatgggccttcaggagaggaaggagacaatccgtggtgtatactctgtgattgatcaactctcccgaactcatctcaatacactggaacgcctcatctttcatctagtcaggattgctctgcaggaagacactaatcgaatgtctgctaatgctttggccattgtgtttgcgccctgcattctccgctgccctgacaccactgacccactacaaagtgtacaggacatcagtaagactaccacttgtgtggaactgattgttgtggaacaaatgaataaatacaaggctcgtctcaaagatatcagtagcttggaatttgctgagaataaggcaaagaccaggttgtcactgattcgtagatcaatgggaaaggggcgtattcgtcgaggaaactatccaggtccatcgtctcctgttgtagttcggttgccttctgtgtctgatgtctcagaggagaccttgactagtgaggcagccatggagactgacatcacagaacagcagcaagcagctatgcagcaggaggagagagtactgactgagcagattgagaacctacagaaggagaaggaggagctaacatttgagatgcttgtactggaaccccgtgcctctgatgatgaaacccttgagtctgaggcctccattgggactgctgatagctcagagaatttgaatatggagtctgaatatgctatctctgagaaatcagaaagaagcttagcccttagctccctgaagacagctggcaagtctgaaccttccagcaagttgcgaaagcaacttaaaaagcagcaagactctttagatgtcgtggactcttcggtctcctctttatgtctgtctaacacggcatcatctcatgggaccagaaaactatttcagatttattccaaatctccattctaccgagctgcctcaggtaatgaggccctgggaatggaaggaccattgggccagaccaaattcctggaagacaagcctcagttcatcagcagaggaaccttcaacccggaaaagggcaaacaaaaattaaagaatgtgaaaaactcacctcagaaaaccaaagagaccccagaggggacagtcatgtctggccgcagaaaaactgtggacccagactgcacctccaaccaacagctagcactctttggaaataatgaatttatggtctgaaccggcagatgtgtgtccctccgtggctacagagtggtaaacaaatctcacctttggggctgcgtttcatcacctcgtccacaatagtcaatcctaattgtggtcctgcctcttttctaagcatatggctaagactgtatgtgctgaattcctgggcctcctgcagaagcagaaagcctgctggggatggtgccagctgtgccttggctgttgtatttgaattgagatttttactatacaaagccacctagggcctggggatttgggtcagttgtagttgcctctcccccaccctcttttcccttcccaaaggtgggtgttgaactaggggggatattgctgtcctgagggaccctctcatttctgacatttgaagaaaacgtataaatctttcttaaccgtgaaagcaaaagcctttgggtttattttgggatagttaggagctagggtagaatataatttttttccaaaaacttacttacaaacaaaaagcctaatccctctattttaagatttctgaaaaaacactccatgttatattctggggaaagcaaaaacaaaaaaaaaaaacaaaaaaaaaaaaacaaa

SEQ ID NO: 156785 - DNA, 7532 bp, Homo sapiens
  Payload ID: 10734
  Gene Symbol: MYO9B
  Gene Name: myosin IXB
  Uniprot ID: Q13459
  ENST ID: ENST00000397274
  CDS Start-End: 63-6131
ctagctccaggacacgcgcgccccgagcctgggaggcatgctgaagccaggcggccggcaggatgagtgtgaaagaggcaggcagctcgggccgccgggagcaggcggcctaccacctgcacatctacccccagctgtccaccaccgagagccaggcctcgtgccgcgtgactgccaccaaggacagcaccacctcggacgtcatcaaggacgccattgccagcctgcggctggacggcaccaaatgttatgtgctggtggaggtcaaagagtcgggaggcgaggaatgggtgctggacgccaacgactcgcctgtgcaccgggtgctgctatggccccggcgggcacaggacgagcaccctcaggaggatggctactacttcctgctgcaggagcgcaacgcagatggaaccatcaagtacgtgcatatgcagctggtggcgcaggccacagccacccggcgcctagtggagcgtggcctcctgccacggcagcaggcggactttgatgacctgtgtaacctccccgagctaaccgagggcaacctcctgaagaacctcaagcaccgcttcctgcaacaaaagatctacacgtacgcggggagcatcctggtggccatcaacccctttaagttcctgcccatctacaaccccaagtacgtgaagatgtatgagaaccagcagctgggcaagctggagccacacgtcttcgcgctggccgacgtggcctactacaccatgctcaggaagcgcgtgaaccagtgcatcgtgatctcgggtgagagcggctccggcaagacccagagcaccaacttcctcatccactgcctcaccgccctcagccagaagggctacgccagcggcgtcgagaggaccatcctgggtgctggccctgtgctggaggcttttggaaatgccaagacagcccacaacaacaactccagccggtttgggaaattcatccaagtcagctacctagagagtggcatcgtgagaggagctgtcgtcgagaaatatctgcttgaaaagtctcgcctggtgtctcaggagaaggatgagaggaactaccatgtgttttattatttgttacttggggtcagcgaggaagagcgccaagaatttcagctcaagcagcctgaagattatttctacctcaaccagcataacttgaagattgaagatggggaggacctgaagcatgactttgagaggctcaagcaggccatggagatggtgggcttcctccccgccaccaagaagcagatttttgccgtcctctcggccatcctgtacctgggcaacgtcacttataagaagagagctacaggccgagaggaagggttggaggtcgggccacccgaggtgctggacaccctgtcgcagcttctgaaggtgaagcgagaaatcttggtggaggttctgaccaaaagaaaaacggtgaccgtcaacgacaagcttatccttccctacagcctcagcgaggccatcactgcccgcgactccatggccaagtctctgtacagcgccctgttcgactggattgtgctgcggatcaaccacgcactcctcaacaagaaggacgtggaagaggcagtctcgtgcctgtccattggggtcctggacatcttcgggtttgaagacttcgagaggaacagctttgagcagttctgcatcaactacgccaatgagcagctgcagtattacttcaaccagcacatcttcaagctggagcaggaggaatatcagggcgaggggatcacgtggcacaacatcggctacacagacaatgtcggctgcatccatctcatcagcaagaaacccacgggcctcttctacctgctggacgaggagagcaacttcccccacgccacgagccagaccctgctggccaagttcaaacagcaacatgaggacaataagtacttcctgggcaccccggtcatggagccagctttcatcatccagcacttcgcagggaaggtgaaatatcagatcaaggacttccgggagaagaacatggactacatgcggccagacatcgtggccctgctgcggggcagtgacagctcctacgtgcgggagctcatcggcatggaccccgtggccgtgttccgctgggccgtgctccgggctgctatccgggccatggcagtgcttcgggaggccggacgcctgcgggccgagagggccgaaaaggctgcaggtatgagcagccctggtgcccaaagtcacccagaagagctgccaagaggagccagcaccccttcggaaaaactttaccgcgatttgcataaccaaatgatcaagagcatcaaaggattgccctggcagggcgaggacccccgtagccttctccagtccctcagtcggctccagaaaccccgcgccttcatcctgaaaagtaaaggtatcaaacaaaagcagatcattccaaagaacctactggactccaagtccctgaaactcatcatcagcatgactctgcacgaccgcaccaccaagtccctactgcacctgcacaagaagaaaaagccaccaagcatcagcgcccagttccagacatcccttaacaagctcttggaggcactggggaaggcggagcccttctttatccgctgcatccgttccaatgctgaaaagaaagagctgtgctttgacgacgagctggtcctgcagcagctgcgctacaccggcatgctggagaccgtgcgcatccggaggtcagggtacagcgccaagtacacgttccaggatttcaccgagcagttccaggtgctcctgcccaaggatgcccagccctgcagggaggtcatctccaccctcctggagaaaatgaagatagacaagaggaactaccagatcgggaagaccaaggtcttcctgaaggagacggagcggcaagccctgcaggagacgctgcaccgggaggtggtgcggaaaatcctgctgctgcagagctggttccggatggtgctggagcgtcggcacttcctgcagatgaagcgggccgccgtcaccatccaggcctgctggcggtcctaccgggtccggagggcgctggagaggacgcaggctgccgtgtacctccaggcctcatggaggggctactggcagcggaagctctaccggcaccagaaacagagcatcatccgcctgcagagcctgtgtcgggggcacctgcagcgcaagagcttcagccagatgatctcggagaagcagaaggcagaagagaaggagagggaagccctggaagccgcaagagcaggtgctgaggagggcggacagggtcaggcggctggagggcagcaggtagctgagcaggggccggagccagcggaggatggcgggcacctggcatcggagcctgaggtgcagccaagtgacaggtcccccctagagcactcctcacctgagaaggaggccccaagcccagagaagactctcccaccccagaaaaccgtggcggctgaaagtcacgagaaagtccccagcagccgggagaagcgtgagtcgcgtcggcaaagagggctggagcacgtcaagttccagaacaaacacatccagtcctgcaaggaggagagtgccctcagagaaccttccagaagggtcacccaggagcaaggggtgagtctcctggaagacaaaaaggagagcagagaagatgaaacccttctagtcgtagagacggaggctgagaacacatctcaaaagcagcccacagagcaaccccaggccatggcagttggcaaggtctctgaagaaactgagaagacgctgcccagtgggagccccaggcctggccagttggagcggccgaccagcctggccctggacagcagggtcagcccaccggcccctggcagcgcccccgagacccccgaggacaagagcaaaccatgtggcagcccaagggttcaggaaaagcccgacagccccggaggctccacgcagatccagcggtacctggacgccgagcggctggccagcgccgtggaactgtggcggggcaagaagctggtggccgccgccagccctagtgccatgctcagccagtccctggacctcagcgacagacaccgggccacaggggccgccctcacgcccacagaggagaggcgcacctccttctccacgagcgacgtctccaagctcctcccgtccctggccaaggctcagcctgcagcagaaaccacggacggagagcgaagtgcgaaaaagccagctgtccagaagaagaagccaggcgacgcatcctccctcccagacgcagggctgtccccgggctctcaggtcgactctaaatccacgtttaagaggctttttctgcataaaaccaaggataaaaaatacagcctggagggcgcagaggagctggagaatgcagtgtccgggcacgtggtgctggaagccaccaccatgaagaagggcctggaagccccctccggacagcagcatcgccacgctgcaggtgagaagcgcaccaaggaaccaggaggcaaagggaagaagaaccgaaatgtcaagattgggaagatcacagtgtcagagaagtggcgggaatcggtgttccgccagatcaccaacgccaatgagctcaagtacctggacgagttcctgctcaacaagataaatgacctccgttcccagaagacgcccattgagagcttgtttatcgaagccaccgagaagttcaggagcaacatcaaaacgatgtactctgtcccgaacgggaagatccacgtgggctacaaggatctgatggagaactaccagatcgtcgtcagcaacctggccactgagcgtggccagaaggacaccaacctggtcctcaacctcttccagtcactgctagatgagttcacccgtggctacaccaagaacgacttcgagccagtgaagcagagcaaagctcagaagaagaagcggaagcaggagcgtgctgtccaggagcacaacgggcacgtgttcgccagctaccaggttagcatcccgcagtcgtgcgagcagtgcctctcctatatctggctcatggacaaggccctgctctgcagcgtgtgcaagatgacctgccacaagaagtgcgtgcacaagattcagagccactgctcctacacctacgggaggaagggcgagccaggcgttgagcctggccacttcggcgtgtgcgtagacagcctgaccagcgacaaggcctcggtgcccatcgtgctggagaagctcctggaacacgtggagatgcacggcctgtacaccgagggcctctaccgcaagtcgggtgctgccaaccgcactcgggagctccggcaggcgctgcagacagaccccgcagcagtcaagctggagaacttccccatccacgccatcacaggggtgctgaagcagtggctgcgggagctgcccgagcccctcatgaccttcgcacagtacggcgacttcctccgagccgtcgagctgccggagaagcaggagcagctggctgccatctatgccgtcctggagcaccttccagaagccaaccacaactccctggagagactcatcttccaccttgtcaaggtggccctgctcgaggatgtcaaccgcatgtcacctggggcgctggccattatcttcgcaccctgcctcctgcgctgccctgacaactcggacccgctgaccagcatgaaggacgtcctcaagatcaccacgtgcgtggagatgctgatcaaggagcagatgaggaaatacaaagtgaagatggaggagatcagccaactggaggctgcagagagtatcgccttccgcaggctttcgctcctgcgacaaaatgctccatggcctctcaaactggggttttcgtctccctatgagggggtcctgaacaagagccccaagacccgggacatccaggaggaggagctggaggtgctgctggaggaggaggcagccggcggcgatgaggaccgggaaaaggagattctcattgaacggatccagtccatcaaggaggagaaggaggacatcacctaccggctgccggagctggacccaaggggctcggacgaggagaacctggactcggagacgtcggccagcaccgagagcctgctggaggagcgggccgggcggggggcctcggaaggtcagtattaagggccccctgcgcctgctctcccttgccccggcgcgcccaccccgagccccctccccaccgtggccgcccctccacgacgaaggccgtcgtccttcgtaacggtcagagtgaagaccccccggcggacccccatcatgcccacggccaacatcaagctcccaccaggcctgccctcccacctgcctcgctgggcaccgggtgcccgggaggcggctgccccagtgcggcgccgggagccacctgcccgccgcccggaccagatacattccgtgtacatcacgcccggggcagacctgccagtgcagggcgccctggagcccctagaagaggatggccagccacctggggccaagcggaggtactcggatcccccaacgtactgcctgccccccgcctcgggccagaccaatggctgagagccacagctgacaaagtctgcatgtccgaggacggcccctgcactggagctgggcgccagagctgcagagctagtgttcggccctcagagaaggatccagaatcaaaagctcaagagtgacgtgaggtgggcaccggccccaagtgcagagtcaaggcagggagaggccggctggagccaggccccctcgcacgcagcccccaaatcatggacgcacctgtggggagcaccacatctccacctgcggcctcacatctccccactcccctttttgtacgtttaactgtttctttgtacgtggtttacgtaactttaaactgtaacagccttaatggaagaccaaatggttttttatatgtgtatgtacaaagttttctattaacgctgcccgtctcccttataacctggacgtgagctgtcagagcagaagccactaggccactgcgcgtctgaggctcagaccctgctgtggttggcttggggtggccaatgggctgggaccctccatgagagttttggacacttgggtcacctgacccgtgcctctctgacacatgtctccggggggcagccacctggccaatgtgcatttttgcacatgctggaaccttccatgggggtctgggctattggctggagccaggacatgagtcaggggcaccatggacctcacgtgccagggagacttgaatgtggctgtcactcttccggacgccaagggctgcaggaggctgcttttggcactacccaccccgtgtgacagaataggagccagcgactcaggactgctcacgggtcaggagggcaacgcctgaagtcagacctccctataggtcaacagggacaacctggggatctctggagcagggccctcctctctcaggcttggcccactcccccagacacctggacacgtggccacaaatctgggacaaggggcccccgcacagcatgaaataaaaagtgcctgagaagtgtgtgc

SEQ ID NO: 156786 - DNA, 2087 bp, Homo sapiens
  Payload ID: 10734
  Gene Symbol: MYO9B
  Gene Name: myosin IXB
  ENST ID: ENST00000597073
  CDS Start-End: 1-588
caccttgtcaaggtggccctgctcgaggatgtcaaccgcatgtcacctggggcgctggccattatcttcgcaccctgcctcctgcgctgccctgacaactcggacccgctgaccagcatgaaggacgtcctcaagatcaccacgtgcgtggagatgctgatcaaggagcagatgaggaaatacaaagtgaagatggaggagatcagccaactggaggctgcagagagtatcgccttccgcaggctttcgctcctgcgacaaaatgctccatggcctctcaaactggggttttcgtctccctatgagggggtcctgaacaagagccccaagacccgggacatccaggaggaggagctggaggtgctgctggaggaggaggcagccggcggcgatgaggaccgggaaaaggagattctcattgaacggatccagtccatcaaggaggagaagcaagacatcacctaccggctgccggagctggacccaaggggctcggacgaggagaacctggactcggagacgtcggccagcaccgagagcctgctggaggagcgggccgggcggggggcctcggaaggtcagtattaaggtagcgtctgcttttctccttcccgtccatcccagcaggccccagggcgagggtcctccggctgccggccctgaagctgcagtaaccctgccatctgtctctcaaaagggccccctgcgcctgctctcccttgccccggcgcgcccaccccgagccccctccccaccgtggccgcccctccacgacgaaggccgtcgtccttcgtaacggtcagagtgaagaccccccggcggacccccatcatgcccacggccaacatcaagctcccaccaggcctgccctcccacctgcctcgctgggcaccgggtgcccgggaggcggctgccccagtgcggcgccgggagccacctgcccgccgcccggaccagatacattccgtgtacatcacgcccggggcagacctgccagtgcagggcgccctggagcccctagaagaggatggccagccacctggggccaagcggaggtactcggatcccccaacgtactgcctgccccccgcctcgggccagaccaatggctgagagccacagctgacaaagtctgcatgtccgaggacggcccctgcactggagctgggcgccagagctgcagagctagtgttcggccctcagagaaggatccagaatcaaaagctcaagagtgacgtgaggtgggcaccggccccaagtgcagagtcaaggcagggagaggccggctggagccaggccccctcgcacgcagcccccaaatcatggacgcacctgtggggagcaccacatctccacctgcggcctcacatctccccactcccctttttgtacgtttaactgtttctttgtacgtggtttacgtaactttaaactgtaacagccttaatggaagaccaaatggttttttatatgtgtatgtacaaagttttctattaacgctgcccgtctcccttataacctggacgtgagctgtcagagcagaagccactaggccactgcgcgtctgaggctcagaccctgctgtggttggcttggggtggccaatgggctgggaccctccatgagagttttggacacttgggtcacctgacccgtgcctctctgacacatgtctccggggggcagccacctggccaatgtgcatttttgcacatgctggaaccttccatgggggtctgggctattggctggagccaggacatgagtcaggggcaccatggacctcacgtgccagggagacttgaatgtggctgtcactcttccggacgccaagggctgcaggaggctgcttttggcactacccaccccgtgtgacagaataggagccagcgactcaggactgctcacgggtcaggagggcaacgcctgaagtcagacctccctataggtcaacagggacaacctggggatctctggagcagggccctcctctctcaggcttggcccactcccccagacacctggacacgtggccacaaatctgggacaaggggcccccgcacagcatgaaataaaaagtgcctgag

SEQ ID NO: 156787 - DNA, 495 bp, Homo sapiens
  Payload ID: 10734
  Gene Symbol: MYO9B
  Gene Name: myosin IXB
  ENST ID: ENST00000602158
  CDS Start-End: 1-179
agcaggagcgtgctgtgagtaggctgcacatagatgagagtccgagcaggcgaacattggcaggagcatgcacgtgtgtgtcagtgtcaatgtgcgcatgggcccgtctgcacgcgtatgtgtgcgtggacacgtgtccaggagcacaacgggcacgtgttcgccagctaccaggttagcatcccgcagtcgtgcgagcagtgcctctcctatatctggctcatggacaaggccctgctctgcagcgtgtgcaagatgacctgccacaagaagtgcgtgcacaagattcagagccactgctcctacacctacgggaggaagggcgagccaggcgttgagcctggccacttcggcgtgtgcgtagacagcctgaccagcgacaaggcctcggtgcccatcgtgctggagaagctcctggaacacgtggagatgcacggcctgtacaccgagggcctctaccgcaagtcgggtgctgccaaccgcactcgggagctc

SEQ ID NO: 156788 - DNA, 461 bp, Homo sapiens
  Payload ID: 10734
  Gene Symbol: MYO9B
  Gene Name: myosin IXB
  ENST ID: ENST00000594971
  CDS Start-End: 1-461
caaacagcaacatgaggacaataagtacttcctgggcaccccggtcatggagccagctttcatcatccagcacttcgcagggaaggtgaaatatcagatcaaggacttccgggagaagaacatggactacatgcggccagacatcgtggccctgctgcggggcagtgacagctcctacgtgcgggagctcatcggcatggaccccgtggccgtgttccgctgggccgtgctccgggctgctatccgggccatggcagtgcttcgggaggccggacgcctgcgggccgagagggccgaaaaggctgcaggtatgagcagccctggtgcccaaagtcacccagaagagctgccaagaggagccagcaccccttcggaaaaactttaccggaaaagtaaaggtatcaaacaaaagcagatcattccaaagaacctactggactccaagtccctgaaactcatca

SEQ ID NO: 156789 - DNA, 7595 bp, Homo sapiens
  Payload ID: 10734
  Gene Symbol: MYO9B
  Gene Name: myosin IXB
  ENST ID: ENST00000594824
  CDS Start-End: 148-6621
cggagcggctcgagcagcggcgggctggcaggcggtcgtccggccggggacccggcccgggaccggcggcgcgcggcggccgaggccagctccaggacacgcgcgccccgagcctgggaggcatgctgaagccaggcggccggcaggatgagtgtgaaagaggcaggcagctcgggccgccgggagcaggcggcctaccacctgcacatctacccccagctgtccaccaccgagagccaggcctcgtgccgcgtgactgccaccaaggacagcaccacctcggacgtcatcaaggacgccattgccagcctgcggctggacggcaccaaatgttatgtgctggtggaggtcaaagagtcgggaggcgaggaatgggtgctggacgccaacgactcgcctgtgcaccgggtgctgctatggccccggcgggcacaggacgagcaccctcaggaggatggctactacttcctgctgcaggagcgcaacgcagatggaaccatcaagtacgtgcatatgcagctggtggcgcaggccacagccacccggcgcctagtggagcgtggcctcctgccacggcagcaggcggactttgatgacctgtgtaacctccccgagctaaccgagggcaacctcctgaagaacctcaagcaccgcttcctgcaacaaaagatctacacgtacgcggggagcatcctggtggccatcaacccctttaagttcctgcccatctacaaccccaagtacgtgaagatgtatgagaaccagcagctgggcaagctggagccacacgtcttcgcgctggccgacgtggcctactacaccatgctcaggaagcgcgtgaaccagtgcatcgtgatctcgggtgagagcggctccggcaagacccagagcaccaacttcctcatccactgcctcaccgccctcagccagaagggctacgccagcggcgtcgagaggaccatcctgggtgctggccctgtgctggaggcttttggaaatgccaagacagcccacaacaacaactccagccggtttgggaaattcatccaagtcagctacctagagagtggcatcgtgagaggagctgtcgtcgagaaatatctgcttgaaaagtctcgcctggtgtctcaggagaaggatgagaggaactaccatgtgttttattatttgttacttggggtcagcgaggaagagcgccaagaatttcagctcaagcagcctgaagattatttctacctcaaccagcataacttgaagattgaagatggggaggacctgaagcatgactttgagaggctcaagcaggccatggagatggtgggcttcctccccgccaccaagaagcagatttttgccgtcctctcggccatcctgtacctgggcaacgtcacttataagaagagagctacaggccgagaggaagggttggaggtcgggccacccgaggtgctggacaccctgtcgcagcttctgaaggtgaagcgagaaatcttggtggaggttctgaccaaaagaaaaacggtgaccgtcaacgacaagcttatccttccctacagcctcagcgaggccatcactgcccgcgactccatggccaagtctctgtacagcgccctgttcgactggattgtgctgcggatcaaccacgcactcctcaacaagaaggacgtggaagaggcagtctcgtgcctgtccattggggtcctggacatcttcgggtttgaagacttcgagaggaacagctttgagcagttctgcatcaactacgccaatgagcagctgcagtattacttcaaccagcacatcttcaagctggagcaggaggaatatcagggcgaggggatcacgtggcacaacatcggctacacagacaatgtcggctgcatccatctcatcagcaagaaacccacgggcctcttctacctgctggacgaggagagcaacttcccccacgccacgagccagaccctgctggccaagttcaaacagcaacatgaggacaataagtacttcctgggcaccccggtcatggagccagctttcatcatccagcacttcgcagggaaggtgaaatatcagatcaaggacttccgggagaagaacatggactacatgcggccagacatcgtggccctgctgcggggcagtgacagctcctacgtgcgggagctcatcggcatggaccccgtggccgtgttccgctgggccgtgctccgggctgctatccgggccatggcagtgcttcgggaggccggacgcctgcgggccgagagggccgaaaaggctgcaggtatgagcagccctggtgcccaaagtcacccagaagagctgccaagaggagccagcaccccttcggaaaaactttaccgcgatttgcataaccaaatgatcaagagcatcaaaggattgccctggcagggcgaggacccccgtagccttctccagtccctcagtcggctccagaaaccccgcgccttcatcctgaaaagtaaaggtatcaaacaaaagcagatcattccaaagaacctactggactccaagtccctgaaactcatcatcagcatgactctgcacgaccgcaccaccaagtccctactgcacctgcacaagaagaaaaagccaccaagcatcagcgcccagttccagacatcccttaacaagctcttggaggcactggggaaggcggagcccttctttatccgctgcatccgttccaatgctgaaaagaaagagctgtgctttgacgacgagctggtcctgcagcagctgcgctacaccggcatgctggagaccgtgcgcatccggaggtcagggtacagcgccaagtacacgttccaggatttcaccgagcagttccaggtgctcctgcccaaggatgcccagccctgcagggaggtcatctccaccctcctggagaaaatgaagatagacaagaggaactaccagatcgggaagaccaaggtcttcctgaaggagacggagcggcaagccctgcaggagacgctgcaccgggaggtggtgcggaaaatcctgctgctgcagagctggttccggatggtgctggagcgtcggcacttcctgcagatgaagcgggccgccgtcaccatccaggcctgctggcggtcctaccgggtccggagggcgctggagaggacgcaggctgccgtgtacctccaggcctcatggaggggctactggcagcggaagctctaccggcaccagaaacagagcatcatccgcctgcagagcctgtgtcgggggcacctgcagcgcaagagcttcagccagatgatctcggagaagcagaaggcagaagagaaggagagggaagccctggaagccgcaagagcaggtgctgaggagggcggacagggtcaggcggctggagggcagcaggtagctgagcaggggccggagccagcggaggatggcgggcacctggcatcggagcctgaggtgcagccaagtgacaggtcccccctagagcactcctcacctgagaaggaggccccaagcccagagaagactctcccaccccagaaaaccgtggcggctgaaagtcacgagaaagtccccagcagccgggagaagcgtgagtcgcgtcggcaaagagggctggagcacgtcaagttccagaacaaacacatccagtcctgcaaggaggagagtgccctcagagaaccttccagaagggtcacccaggagcaaggggtgagtctcctggaagacaaaaaggagagcagagaagatgaaacccttctagtcgtagagacggaggctgagaacacatctcaaaagcagcccacagagcaaccccaggccatggcagttggcaaggtctctgaagaaactgagaagacgctgcccagtgggagccccaggcctggccagttggagcggccgaccagcctggccctggacagcagggtcagcccaccggcccctggcagcgcccccgagacccccgaggacaagagcaaaccatgtggcagcccaagggttcaggaaaagcccgacagccccggaggctccacgcagatccagcggtacctggacgccgagcggctggccagcgccgtggaactgtggcggggcaagaagctggtggccgccgccagccctagtgccatgctcagccagtccctggacctcagcgacagacaccgggccacaggggccgccctcacgcccacagaggagaggcgcacctccttctccacgagcgacgtctccaagctcctcccgtccctggccaaggctcagcctgcagcagaaaccacggacggagagcgaagtgcgaaaaagccagctgtccagaagaagaagccaggcgacgcatcctccctcccagacgcagggctgtccccgggctctcaggtcgactctaaatccacgtttaagaggctttttctgcataaaaccaaggataaaaaatacagcctggagggcgcagaggagctggagaatgcagtgtccgggcacgtggtgctggaagccaccaccatgaagaagggcctggaagccccctccggacagcagcatcgccacgctgcaggtgagaagcgcaccaaggaaccaggaggcaaagggaagaagaaccgaaatgtcaagattgggaagatcacagtgtcagagaagtggcgggaatcggtgttccgccagatcaccaacgccaatgagctcaagtacctggacgagttcctgctcaacaagataaatgacctccgttcccagaagacgcccattgagagcttgtttatcgaagccaccgagaagttcaggagcaacatcaaaacgatgtactctgtcccgaacgggaagatccacgtgggctacaaggatctgatggagaactaccagatcgtcgtcagcaacctggccactgagcgtggccagaaggacaccaacctggtcctcaacctcttccagtcactgctagatgagttcacccgtggctacaccaagaacgacttcgagccagtgaagcagagcaaagctcagaagaagaagcggaagcaggagcgtgctgtccaggagcacaacgggcacgtgttcgccagctaccaggttagcatcccgcagtcgtgcgagcagtgcctctcctatatctggctcatggacaaggccctgctctgcagcgtgtgcaagatgacctgccacaagaagtgcgtgcacaagattcagagccactgctcctacacctacgggaggaagggcgagccaggcgttgagcctggccacttcggcgtgtgcgtagacagcctgaccagcgacaaggcctcggtgcccatcgtgctggagaagctcctggaacacgtggagatgcacggcctgtacaccgagggcctctaccgcaagtcgggtgctgccaaccgcactcgggagctccggcaggcgctgcagacagaccccgcagcagtcaagctggagaacttccccatccacgccatcacaggggtgctgaagcagtggctgcgggagctgcccgagcccctcatgaccttcgcacagtacggcgacttcctccgagccgtcgagctgccggagaagcaggagcagctggctgccatctatgccgtcctggagcaccttccagaagccaaccacaactccctggagagactcatcttccaccttgtcaaggtggccctgctcgaggatgtcaaccgcatgtcacctggggcgctggccattatcttcgcaccctgcctcctgcgctgccctgacaactcggacccgctgaccagcatgaaggacgtcctcaagatcaccacgtgcgtggagatgctgatcaaggagcagatgaggaaatacaaagtgaagatggaggagatcagccaactggaggctgcagagagtatcgccttccgcaggctttcgctcctgcgacaaaatgctccatggcctctcaaactggggttttcgtctccctatgagggggtcctgaacaagagccccaagacccgggacatccaggaggaggagctggaggtgctgctggaggaggaggcagccggcggcgatgaggaccgggaaaaggagattctcattgaacggatccagtccatcaaggaggagaagcaagacatcacctaccggctgccggagctggacccaaggggctcggacgaggagaacctggactcggagacgtcggccagcaccgagagcctgctggaggagcgggccgggcggggggcctcggaagggccccctgcgcctgctctcccttgccccggcgcgcccaccccgagccccctccccaccgtggccgcccctccacgacgaaggccgtcgtccttcgtaacggtcagagtgaagaccccccggcggacccccatcatgcccacggccaacatcaagctcccaccaggcctgccctcccacctgcctcgctgggcaccgggtgcccgggaggcggctgccccagtgcggcgccgggagccacctgcccgccgcccggaccagatacattccgtgtacatcacgcccggggcagacctgccagtgcagggcgccctggagcccctagaagaggatggccagccacctggggccaagcggaggtactcggatcccccaacgtactgcctgccccccgcctcgggccagaccaatggctgagagccacagctgacaaagtctgcatgtccgaggacggcccctgcactggagctgggcgccagagctgcagagctagtgttcggccctcagagaaggatccagaatcaaaagctcaagagtgacgtgaggtgggcaccggccccaagtgcagagtcaaggcagggagaggccggctggagccaggccccctcgcacgcagcccccaaatcatggacgcacctgtggggagcaccacatctccacctgcggcctcacatctccccactcccctttttgtacgtttaactgtttctttgtacgtggtttacgtaactttaaactgtaacagccttaatggaagaccaaatggttttttatatgtgtatgtacaaagttttctattaacgctgcccgtctcccttataacctggacgtgagctgtcagagcagaagccactaggccactgcgcgtctgaggctcagaccctgctgtggttggcttggggtggccaatgggctgggaccctccatgagagttttggacacttgggtcacctgacccgtgcctctctgacacatgtctccggggggcagccacctggccaatgtgcatttttgcacatgctggaaccttccatgggggtctgggctattggctggagccaggacatgagtcaggggcaccatggacctcacgtgccagggagacttgaatgtggctgtcactcttccggacgccaagggctgcaggaggctgcttttggcactacccaccccgtgtgacagaataggagccagcgactcaggactgctcacgggtcaggagggcaacgcctgaagtcagacctccctataggtcaacagggacaacctggggatctctggagcagggccctcctctctcaggcttggcccactcccccagacacctggacacgtggccacaaatctgggacaaggggcccccgcacagcatgaaataaaaagtgcctgag

SEQ ID NO: 156790 - DNA, 7623 bp, Homo sapiens
  Payload ID: 10734
  Gene Symbol: MYO9B
  Gene Name: myosin IXB
  Uniprot ID: Q13459
  ENST ID: ENST00000595618
  CDS Start-End: 153-6221
cggggcggagcggctcgagcagcggcgggctggcaggcggtcgtccggccggggacccggcccgggaccggcggcgcgcggcggccgaggccagctccaggacacgcgcgccccgagcctgggaggcatgctgaagccaggcggccggcaggatgagtgtgaaagaggcaggcagctcgggccgccgggagcaggcggcctaccacctgcacatctacccccagctgtccaccaccgagagccaggcctcgtgccgcgtgactgccaccaaggacagcaccacctcggacgtcatcaaggacgccattgccagcctgcggctggacggcaccaaatgttatgtgctggtggaggtcaaagagtcgggaggcgaggaatgggtgctggacgccaacgactcgcctgtgcaccgggtgctgctatggccccggcgggcacaggacgagcaccctcaggaggatggctactacttcctgctgcaggagcgcaacgcagatggaaccatcaagtacgtgcatatgcagctggtggcgcaggccacagccacccggcgcctagtggagcgtggcctcctgccacggcagcaggcggactttgatgacctgtgtaacctccccgagctaaccgagggcaacctcctgaagaacctcaagcaccgcttcctgcaacaaaagatctacacgtacgcggggagcatcctggtggccatcaacccctttaagttcctgcccatctacaaccccaagtacgtgaagatgtatgagaaccagcagctgggcaagctggagccacacgtcttcgcgctggccgacgtggcctactacaccatgctcaggaagcgcgtgaaccagtgcatcgtgatctcgggtgagagcggctccggcaagacccagagcaccaacttcctcatccactgcctcaccgccctcagccagaagggctacgccagcggcgtcgagaggaccatcctgggtgctggccctgtgctggaggcttttggaaatgccaagacagcccacaacaacaactccagccggtttgggaaattcatccaagtcagctacctagagagtggcatcgtgagaggagctgtcgtcgagaaatatctgcttgaaaagtctcgcctggtgtctcaggagaaggatgagaggaactaccatgtgttttattatttgttacttggggtcagcgaggaagagcgccaagaatttcagctcaagcagcctgaagattatttctacctcaaccagcataacttgaagattgaagatggggaggacctgaagcatgactttgagaggctcaagcaggccatggagatggtgggcttcctccccgccaccaagaagcagatttttgccgtcctctcggccatcctgtacctgggcaacgtcacttataagaagagagctacaggccgagaggaagggttggaggtcgggccacccgaggtgctggacaccctgtcgcagcttctgaaggtgaagcgagaaatcttggtggaggttctgaccaaaagaaaaacggtgaccgtcaacgacaagcttatccttccctacagcctcagcgaggccatcactgcccgcgactccatggccaagtctctgtacagcgccctgttcgactggattgtgctgcggatcaaccacgcactcctcaacaagaaggacgtggaagaggcagtctcgtgcctgtccattggggtcctggacatcttcgggtttgaagacttcgagaggaacagctttgagcagttctgcatcaactacgccaatgagcagctgcagtattacttcaaccagcacatcttcaagctggagcaggaggaatatcagggcgaggggatcacgtggcacaacatcggctacacagacaatgtcggctgcatccatctcatcagcaagaaacccacgggcctcttctacctgctggacgaggagagcaacttcccccacgccacgagccagaccctgctggccaagttcaaacagcaacatgaggacaataagtacttcctgggcaccccggtcatggagccagctttcatcatccagcacttcgcagggaaggtgaaatatcagatcaaggacttccgggagaagaacatggactacatgcggccagacatcgtggccctgctgcggggcagtgacagctcctacgtgcgggagctcatcggcatggaccccgtggccgtgttccgctgggccgtgctccgggctgctatccgggccatggcagtgcttcgggaggccggacgcctgcgggccgagagggccgaaaaggctgcaggtatgagcagccctggtgcccaaagtcacccagaagagctgccaagaggagccagcaccccttcggaaaaactttaccgcgatttgcataaccaaatgatcaagagcatcaaaggattgccctggcagggcgaggacccccgtagccttctccagtccctcagtcggctccagaaaccccgcgccttcatcctgaaaagtaaaggtatcaaacaaaagcagatcattccaaagaacctactggactccaagtccctgaaactcatcatcagcatgactctgcacgaccgcaccaccaagtccctactgcacctgcacaagaagaaaaagccaccaagcatcagcgcccagttccagacatcccttaacaagctcttggaggcactggggaaggcggagcccttctttatccgctgcatccgttccaatgctgaaaagaaagagctgtgctttgacgacgagctggtcctgcagcagctgcgctacaccggcatgctggagaccgtgcgcatccggaggtcagggtacagcgccaagtacacgttccaggatttcaccgagcagttccaggtgctcctgcccaaggatgcccagccctgcagggaggtcatctccaccctcctggagaaaatgaagatagacaagaggaactaccagatcgggaagaccaaggtcttcctgaaggagacggagcggcaagccctgcaggagacgctgcaccgggaggtggtgcggaaaatcctgctgctgcagagctggttccggatggtgctggagcgtcggcacttcctgcagatgaagcgggccgccgtcaccatccaggcctgctggcggtcctaccgggtccggagggcgctggagaggacgcaggctgccgtgtacctccaggcctcatggaggggctactggcagcggaagctctaccggcaccagaaacagagcatcatccgcctgcagagcctgtgtcgggggcacctgcagcgcaagagcttcagccagatgatctcggagaagcagaaggcagaagagaaggagagggaagccctggaagccgcaagagcaggtgctgaggagggcggacagggtcaggcggctggagggcagcaggtagctgagcaggggccggagccagcggaggatggcgggcacctggcatcggagcctgaggtgcagccaagtgacaggtcccccctagagcactcctcacctgagaaggaggccccaagcccagagaagactctcccaccccagaaaaccgtggcggctgaaagtcacgagaaagtccccagcagccgggagaagcgtgagtcgcgtcggcaaagagggctggagcacgtcaagttccagaacaaacacatccagtcctgcaaggaggagagtgccctcagagaaccttccagaagggtcacccaggagcaaggggtgagtctcctggaagacaaaaaggagagcagagaagatgaaacccttctagtcgtagagacggaggctgagaacacatctcaaaagcagcccacagagcaaccccaggccatggcagttggcaaggtctctgaagaaactgagaagacgctgcccagtgggagccccaggcctggccagttggagcggccgaccagcctggccctggacagcagggtcagcccaccggcccctggcagcgcccccgagacccccgaggacaagagcaaaccatgtggcagcccaagggttcaggaaaagcccgacagccccggaggctccacgcagatccagcggtacctggacgccgagcggctggccagcgccgtggaactgtggcggggcaagaagctggtggccgccgccagccctagtgccatgctcagccagtccctggacctcagcgacagacaccgggccacaggggccgccctcacgcccacagaggagaggcgcacctccttctccacgagcgacgtctccaagctcctcccgtccctggccaaggctcagcctgcagcagaaaccacggacggagagcgaagtgcgaaaaagccagctgtccagaagaagaagccaggcgacgcatcctccctcccagacgcagggctgtccccgggctctcaggtcgactctaaatccacgtttaagaggctttttctgcataaaaccaaggataaaaaatacagcctggagggcgcagaggagctggagaatgcagtgtccgggcacgtggtgctggaagccaccaccatgaagaagggcctggaagccccctccggacagcagcatcgccacgctgcaggtgagaagcgcaccaaggaaccaggaggcaaagggaagaagaaccgaaatgtcaagattgggaagatcacagtgtcagagaagtggcgggaatcggtgttccgccagatcaccaacgccaatgagctcaagtacctggacgagttcctgctcaacaagataaatgacctccgttcccagaagacgcccattgagagcttgtttatcgaagccaccgagaagttcaggagcaacatcaaaacgatgtactctgtcccgaacgggaagatccacgtgggctacaaggatctgatggagaactaccagatcgtcgtcagcaacctggccactgagcgtggccagaaggacaccaacctggtcctcaacctcttccagtcactgctagatgagttcacccgtggctacaccaagaacgacttcgagccagtgaagcagagcaaagctcagaagaagaagcggaagcaggagcgtgctgtccaggagcacaacgggcacgtgttcgccagctaccaggttagcatcccgcagtcgtgcgagcagtgcctctcctatatctggctcatggacaaggccctgctctgcagcgtgtgcaagatgacctgccacaagaagtgcgtgcacaagattcagagccactgctcctacacctacgggaggaagggcgagccaggcgttgagcctggccacttcggcgtgtgcgtagacagcctgaccagcgacaaggcctcggtgcccatcgtgctggagaagctcctggaacacgtggagatgcacggcctgtacaccgagggcctctaccgcaagtcgggtgctgccaaccgcactcgggagctccggcaggcgctgcagacagaccccgcagcagtcaagctggagaacttccccatccacgccatcacaggggtgctgaagcagtggctgcgggagctgcccgagcccctcatgaccttcgcacagtacggcgacttcctccgagccgtcgagctgccggagaagcaggagcagctggctgccatctatgccgtcctggagcaccttccagaagccaaccacaactccctggagagactcatcttccaccttgtcaaggtggccctgctcgaggatgtcaaccgcatgtcacctggggcgctggccattatcttcgcaccctgcctcctgcgctgccctgacaactcggacccgctgaccagcatgaaggacgtcctcaagatcaccacgtgcgtggagatgctgatcaaggagcagatgaggaaatacaaagtgaagatggaggagatcagccaactggaggctgcagagagtatcgccttccgcaggctttcgctcctgcgacaaaatgctccatggcctctcaaactggggttttcgtctccctatgagggggtcctgaacaagagccccaagacccgggacatccaggaggaggagctggaggtgctgctggaggaggaggcagccggcggcgatgaggaccgggaaaaggagattctcattgaacggatccagtccatcaaggaggagaaggaggacatcacctaccggctgccggagctggacccaaggggctcggacgaggagaacctggactcggagacgtcggccagcaccgagagcctgctggaggagcgggccgggcggggggcctcggaaggtcagtattaagggccccctgcgcctgctctcccttgccccggcgcgcccaccccgagccccctccccaccgtggccgcccctccacgacgaaggccgtcgtccttcgtaacggtcagagtgaagaccccccggcggacccccatcatgcccacggccaacatcaagctcccaccaggcctgccctcccacctgcctcgctgggcaccgggtgcccgggaggcggctgccccagtgcggcgccgggagccacctgcccgccgcccggaccagatacattccgtgtacatcacgcccggggcagacctgccagtgcagggcgccctggagcccctagaagaggatggccagccacctggggccaagcggaggtactcggatcccccaacgtactgcctgccccccgcctcgggccagaccaatggctgagagccacagctgacaaagtctgcatgtccgaggacggcccctgcactggagctgggcgccagagctgcagagctagtgttcggccctcagagaaggatccagaatcaaaagctcaagagtgacgtgaggtgggcaccggccccaagtgcagagtcaaggcagggagaggccggctggagccaggccccctcgcacgcagcccccaaatcatggacgcacctgtggggagcaccacatctccacctgcggcctcacatctccccactcccctttttgtacgtttaactgtttctttgtacgtggtttacgtaactttaaactgtaacagccttaatggaagaccaaatggttttttatatgtgtatgtacaaagttttctattaacgctgcccgtctcccttataacctggacgtgagctgtcagagcagaagccactaggccactgcgcgtctgaggctcagaccctgctgtggttggcttggggtggccaatgggctgggaccctccatgagagttttggacacttgggtcacctgacccgtgcctctctgacacatgtctccggggggcagccacctggccaatgtgcatttttgcacatgctggaaccttccatgggggtctgggctattggctggagccaggacatgagtcaggggcaccatggacctcacgtgccagggagacttgaatgtggctgtcactcttccggacgccaagggctgcaggaggctgcttttggcactacccaccccgtgtgacagaataggagccagcgactcaggactgctcacgggtcaggagggcaacgcctgaagtcagacctccctataggtcaacagggacaacctggggatctctggagcagggccctcctctctcaggcttggcccactcccccagacacctggacacgtggccacaaatctgggacaaggggcccccgcacagcatgaaataaaaagtgcctgagaagtgtgtgca

SEQ ID NO: 156791 - DNA, 544 bp, Homo sapiens
  Payload ID: 10734
  Gene Symbol: MYO9B
  Gene Name: myosin IXB
  ENST ID: ENST00000598419
  CDS Start-End: 1-525
accagcatgaaggacgtcctcaagatcaccacgtgcgtggagatgctgatcaaggagcagatgaggaaatacaaagtgaagatggaggagatcagccaactggaggctgcagagagtatcgccttccgcaggctttcgctcctgcgacaaaatgctccatggcctctcaaactggggttttcgtctccctatgagggggtcctgaacaagagccccaagacccgggacatccaggaggaggagctggaggtgctgctggaggaggaggcagccggcggcgatgaggaccgggaaaaggagattctcattgaacggatccagtccatcaaggaggagaagcaagacatcacctaccggctgccggagctggacccaaggggctcggacgaggagaacctggactcggagacgtcggccagcaccgagagcctgctggaggagcgggccgggcggggggcctcggaaggacatcaggcccactggtgtaaccaaggtgcagatgacctaaggtgtgggaaaacatgaaggctgcatgccaggccct

SEQ ID NO: 156792 - DNA, 524 bp, Homo sapiens
  Payload ID: 10734
  Gene Symbol: MYO9B
  Gene Name: myosin IXB
  ENST ID: ENST00000602177
  CDS Start-End: 1-524
gccggacgcctgcgggccgagagggccgaaaaggctgcaggtatgagcagccctggtgcccaaagtcacccagaagagctgccaagaggagccagcaccccttcggaaaaactttaccgctgctcaatgctagatttctcatttgacggctctgaggagttcgatattaacgcttttgaggacatcattgctttctatgaaagcaagaagaaaagtaaaggtatcaaacaaaagcagatcattccaaagaacctactggactccaagtccctgaaactcatcatcagcatgactctgcacgaccgcaccaccaagtccctactgcacctgcacaagaagaaaaagccaccaagcatcagcgcccagttccagacatcccttaacaagctcttggaggcactggggaaggcggagcccttctttatccgctgcatccgttccaatgctgaaaagaaagagctgtgctttgacgacgagctggtcctgcagcagctgcgctacaccggcatgctggagaccgtgcg

SEQ ID NO: 156793 - DNA, 6215 bp, Homo sapiens
  Payload ID: 10734
  Gene Symbol: MYO9B
  Gene Name: myosin IXB
  ENST ID: ENST00000595641
  CDS Start-End: 1-6215
atgagtgtgaaagaggcaggcagctcgggccgccgggagcaggcggcctaccacctgcacatctacccccagctgtccaccaccgagagccaggcctcgtgccgcgtgactgccaccaaggacagcaccacctcggacgtcatcaaggacgccattgccagcctgcggctggacggcaccaaatgttatgtgctggtggaggtcaaagagtcgggaggcgaggaatgggtgctggacgccaacgactcgcctgtgcaccgggtgctgctatggccccggcgggcacaggacgagcaccctcaggaggatggctactacttcctgctgcaggagcgcaacgcagatggaaccatcaagtacgtgcatatgcagctggtggcgcaggccacagccacccggcgcctagtggagcgtggcctcctgccacggcagcaggcggactttgatgacctgtgtaacctccccgagctaaccgagggcaacctcctgaagaacctcaagcaccgcttcctgcaacaaaagatctacacgtacgcggggagcatcctggtggccatcaacccctttaagttcctgcccatctacaaccccaagtacgtgaagatgtatgagaaccagcagctgggcaagctggagccacacgtcttcgcgctggccgacgtggcctactacaccatgctcaggaagcgcgtgaaccagtgcatcgtgatctcgggtgagagcggctccggcaagacccagagcaccaacttcctcatccactgcctcaccgccctcagccagaagggctacgccagcggcgtcgagaggaccatcctgggtgctggccctgtgctggaggcttttggaaatgccaagacagcccacaacaacaactccagccggtttgggaaattcatccaagtcagctacctagagagtggcatcgtgagaggagctgtcgtcgagaaatatctgcttgaaaagtctcgcctggtgtctcaggagaaggatgagaggaactaccatgtgttttattatttgttacttggggtcagcgaggaagagcgccaagaatttcagctcaagcagcctgaagattatttctacctcaaccagcataacttgaagattgaagatggggaggacctgaagcatgactttgagaggctcaagcaggccatggagatggtgggcttcctccccgccaccaagaagcagatttttgccgtcctctcggccatcctgtacctgggcaacgtcacttataagaagagagctacaggccgagaggaagggttggaggtcgggccacccgaggtgctggacaccctgtcgcagcttctgaaggtgaagcgagaaatcttggtggaggttctgaccaaaagaaaaacggtgaccgtcaacgacaagcttatccttccctacagcctcagcgaggccatcactgcccgcgactccatggccaagtctctgtacagcgccctgttcgactggattgtgctgcggatcaaccacgcactcctcaacaagaaggacgtggaagaggcagtctcgtgcctgtccattggggtcctggacatcttcgggtttgaagacttcgagaggaacagctttgagcagttctgcatcaactacgccaatgagcagctgcagtattacttcaaccagcacatcttcaagctggagcaggaggaatatcagggcgaggggatcacgtggcacaacatcggctacacagacaatgtcggctgcatccatctcatcagcaagaaacccacgggcctcttctacctgctggacgaggagagcaacttcccccacgccacgagccagaccctgctggccaagttcaaacagcaacatgaggacaataagtacttcctgggcaccccggtcatggagccagctttcatcatccagcacttcgcagggaaggtgaaatatcagatcaaggacttccgggagaagaacatggactacatgcggccagacatcgtggccctgctgcggggcagtgacagctcctacgtgcgggagctcatcggcatggaccccgtggccgtgttccgctgggccgtgctccgggctgctatccgggccatggcagtgcttcgggaggccggacgcctgcgggccgagagggccgaaaaggctgcaggtatgagcagccctggtgcccaaagtcacccagaagagctgccaagaggagccagcaccccttcggaaaaactttaccgcgatttgcataaccaaatgatcaagagcatcaaaggattgccctggcagggcgaggacccccgtagccttctccagtccctcagtcggctccagaaaccccgcgccttcatcctgaaaagtaaaggtatcaaacaaaagcagatcattccaaagaacctactggactccaagtccctgaaactcatcatcagcatgactctgcacgaccgcaccaccaagtccctactgcacctgcacaagaagaaaaagccaccaagcatcagcgcccagttccagacatcccttaacaagctcttggaggcactggggaaggcggagcccttctttatccgctgcatccgttccaatgctgaaaagaaagagctgtgctttgacgacgagctggtcctgcagcagctgcgctacaccggcatgctggagaccgtgcgcatccggaggtcagggtacagcgccaagtacacgttccaggatttcaccgagcagttccaggtgctcctgcccaaggatgcccagccctgcagggaggtcatctccaccctcctggagaaaatgaagatagacaagaggaactaccagatcgggaagaccaaggtcttcctgaaggagacggagcggcaagccctgcaggagacgctgcaccgggaggtggtgcggaaaatcctgctgctgcagagctggttccggatggtgctggagcgtcggcacttcctgcagatgaagcgggccgccgtcaccatccaggcctgctggcggtcctaccgggtccggagggcgctggagaggacgcaggctgccgtgtacctccaggcctcatggaggggctactggcagcggaagctctaccggcaccagaaacagagcatcatccgcctgcagagcctgtgtcgggggcacctgcagcgcaagagcttcagccagatgatctcggagaagcagaaggcagaagagaaggagagggaagccctggaagccgcaagagcaggtgctgaggagggcggacagggtcaggcggctggagggcagcaggtagctgagcaggggccggagccagcggaggatggcgggcacctggcatcggagcctgaggtgcagccaagtgacaggtcccccctagagcactcctcacctgagaaggaggccccaagcccagagaagactctcccaccccagaaaaccgtggcggctgaaagtcacgagaaagtccccagcagccgggagaagcgtgagtcgcgtcggcaaagagggctggagcacgtcaagttccagaacaaacacatccagtcctgcaaggaggagagtgccctcagagaaccttccagaagggtcacccaggagcaaggggtgagtctcctggaagacaaaaaggagagcagagaagatgaaacccttctagtcgtagagacggaggctgagaacacatctcaaaagcagcccacagagcaaccccaggccatggcagttggcaaggtctctgaagaaactgagaagacgctgcccagtgggagccccaggcctggccagttggagcggccgaccagcctggccctggacagcagggtcagcccaccggcccctggcagcgcccccgagacccccgaggacaagagcaaaccatgtggcagcccaagggttcaggaaaagcccgacagccccggaggctccacgcagatccagcggtacctggacgccgagcggctggccagcgccgtggaactgtggcggggcaagaagctggtggccgccgccagccctagtgccatgctcagccagtccctggacctcagcgacagacaccgggccacaggggccgccctcacgcccacagaggagaggcgcacctccttctccacgagcgacgtctccaagctcctcccgtccctggccaaggctcagcctgcagcagaaaccacggacggagagcgaagtgcgaaaaagccagctgtccagaagaagaagccaggcgacgcatcctccctcccagacgcagggctgtccccgggctctcaggtcgactctaaatccacgtttaagaggctttttctgcataaaaccaaggataaaaaatacagcctggagggcgcagaggagctggagaatgcagtgtccgggcacgtggtgctggaagccaccaccatgaagaagggcctggaagccccctccggacagcagcatcgccacgctgcaggtgagaagcgcaccaaggaaccaggaggcaaagggaagaagaaccgaaatgtcaagattgggaagatcacagtgtcagagaagtggcgggaatcggtgttccgccagatcaccaacgccaatgagctcaagtacctggacgagttcctgctcaacaagataaatgacctccgttcccagaagacgcccattgagagcttgtttatcgaagccaccgagaagttcaggagcaacatcaaaacgatgtactctgtcccgaacgggaagatccacgtgggctacaaggatctgatggagaactaccagatcgtcgtcagcaacctggccactgagcgtggccagaaggacaccaacctggtcctcaacctcttccagtcactgctagatgagttcacccgtggctacaccaagaacgacttcgagccagtgaagcagagcaaagctcagaagaagaagcggaagcaggagcgtgctgtccaggagcacaacgggcacgtgttcgccagctaccaggttagcatcccgcagtcgtgcgagcagtgcctctcctatatctggctcatggacaaggccctgctctgcagcgtgtgcaagatgacctgccacaagaagtgcgtgcacaagattcagagccactgctcctacacctacgggaggaagggcgagccaggcgttgagcctggccacttcggcgtgtgcgtagacagcctgaccagcgacaaggcctcggtgcccatcgtgctggagaagctcctggaacacgtggagatgcacggcctgtacaccgagggcctctaccgcaagtcgggtgctgccaaccgcactcgggagctccggcaggcgctgcagacagaccccgcagcagtcaagctggagaacttccccatccacgccatcacaggggtgctgaagcagtggctgcgggagctgcccgagcccctcatgaccttcgcacagtacggcgacttcctccgagccgtcgagctgccggagaagcaggagcagctggctgccatctatgccgtcctggagcaccttccagaagccaaccacaactccctggagagactcatcttccaccttgtcaaggtggccctgctcgaggatgtcaaccgcatgtcacctggggcgctggccattatcttcgcaccctgcctcctgcgctgccctgacaactcggacccgctgaccagcatgaaggacgtcctcaagatcaccacgtgcgtggagatgctgatcaaggagcagatgaggaaatacaaagtgaagatggaggagatcagccaactggaggctgcagagagtatcgccttccgcaggctttcgctcctgcgacaaaatgctaacaagagccccaagacccgggacatccaggaggaggagctggaggtgctgctggaggaggaggcagccggcggcgatgaggaccgggaaaaggagattctcattgaacggatccagtccatcaaggaggagaaggaggacatcacctaccggctgccggagctggacccaaggggctcggacgaggagaacctggactcggagacgtcggccagcaccgagagcctgctggaggagcgggccgggcggggggcctcggaagggccccctgcgcctgctctcccttgccccggcgcgcccaccccgagccccctccccaccgtggccgcccctccacgacgaaggccgtcgtccttcgtaacggtcagagtgaagaccccccggcggacccccatcatgcccacggccaacatcaagctcccaccaggcctgccctcccacctgcctcgctgggcaccgggtgcccg

SEQ ID NO: 156794 - DNA, 584 bp, Homo sapiens
  Payload ID: 10734
  Gene Symbol: MYO9B
  Gene Name: myosin IXB
  ENST ID: ENST00000596942
  CDS Start-End: 1-584
gaagcaggagcagctggctgccatctatgccgtcctggagcaccttccagaagccaaccacaactccctggagagactcatcttccaccttgtcaaggtggccctgctcgaggatgtcaaccgcatgtcacctggggcgctggccattatcttcgcaccctgcctcctgcgctgccctgacaactcggacccgctgaccagcatgaaggacgtcctcaagatcaccacgtgcgtggagatgctgatcaaggagcagatgaggaaatacaaagtgaagatggaggagatcagccaactggaggctgcagagagtatcgccttccgcaggctttcgctcctgcgacaaaatgctaacaagagccccaagacccgggacatccaggaggaggagctggaggtgctgctggaggaggaggcagccggcggcgatgaggaccgggaaaaggagattctcattgaacggatccagtccatcaaggaggagaagcaagacatcacctaccggctgccggagctggacccaaggggctcggacgaggagaacctggactcggagacgtcggccagcaccgagagcctgctgg

SEQ ID NO: 156795 - DNA, 5892 bp, Homo sapiens
  Payload ID: 10735
  Gene Symbol: MYLK
  Gene Name: myosin light chain kinase
  Uniprot ID: Q15746
  ENST ID: ENST00000346322
  CDS Start-End: 295-5832
ggtcggcagcagggcgctgagcgagctcggagcccgcgctgtgcgcctgcggccggggcgccccgccgagcgccggtgccccggctcccgggccgccttcgccgcgcgggaaggattcttcaaaattaacagaaaccaattcgggccagctgaagagaaaaaataaaggtggctcccggctgcctctgctgcagttcagagcaacttcaggagcttcccagccgagagcttcaggacgcctttcctgtcccactggcccagttgccacaacaaacaacagagaagacggtgaccatgggggatgtgaagctggttgcctcgtcacacatttccaaaacctccctcagtgtggatccctcaagagttgactccatgcccctgacagaggcccctgctttcattttgccccctcggaacctctgcatcaaagaaggagccaccgccaagttcgaagggcgggtccggggttacccagagccccaggtgacatggcacagaaacgggcaacccatcaccagcgggggccgcttcctgctggattgcggcatccgggggactttcagccttgtgattcatgctgtccatgaggaggacaggggaaagtatacctgtgaagccaccaatggcagtggtgctcgccaggtgacagtggagttgacagtagaaggaagttttgcgaagcagcttggtcagcctgttgtttccaaaaccttaggggatagattttcagctccagcagtggagacccgtcctagcatctggggggagtgcccaccaaagtttgctaccaagctgggccgagttgtggtcaaagaaggacagatgggacgattctcctgcaagatcactggccggccccaaccgcaggtcacctggctcaagggaaatgttccactgcagccgagtgcccgtgtgtctgtgtctgagaagaacggcatgcaggttctggaaatccatggagtcaaccaagatgacgtgggagtgtacacgtgcctggtggtgaacgggtcggggaaggcctcgatgtcagctgaactttccatccaaggtttggacagtgccaataggtcatttgtgagagaaacaaaagccaccaattcagatgtcaggaaagaggtgaccaatgtaatctcaaaggagtcgaagctggacagtctggaggctgcagccaaaagcaagaactgctccagcccccagagaggtggctccccaccctgggctgcaaacagccagcctcagcccccaagggagtccaagctggagtcatgcaaggactcgcccagaacggccccgcagaccccggtccttcagaagacttccagctccatcaccctgcaggccgcaagagttcagccggaaccaagagcaccaggcctgggggtcctatcaccttctggagaagagaggaagaggccagctcctccccgtccagccaccttccccaccaggcagcctggcctggggagccaagatgttgtgagcaaggctgctaacaggagaatccccatggagggccagagggattcagcattccccaaatttgagagcaagccccaaagccaggaggtcaaggaaaatcaaactgtcaagttcagatgtgaagggcttgccgtgatggaggtggccccctccttctccagtgtcctgaaggactgcgctgttattgagggccaggattttgtgctgcagtgctccgtacgggggaccccagtgccccggatcacttggctgctgaatgggcagcccatccagtacgctcgctccacctgcgaggccggcgtggctgagctccacatccaggatgccctgccggaggaccatggcacctacacctgcctagctgagaatgccttggggcaggtgtcctgcagcgcctgggtcaccgtccatgaaaagaagagtagcaggaagagtgagtaccttctgcctgtggctcccagcaagcccactgcacccatcttcctgcagggcctctctgatctcaaagtcatggatggaagccaggtcactatgactgtccaagtgtcagggaatccaccccctgaagtcatctggctgcacaatgggaatgagatccaagagtcagaggacttccactttgaacagagaggaactcagcacagcctttgtatccaggaagtgttcccggaggacacgggcacgtacacctgcgaggcctggaacagcgctggagaggtccgcacccaggccgtgctcacggtacaagagcctcacgatggcacccagccctggttcatcagtaagcctcgctcagtgacagcctccctgggccagagtgtcctcatctcctgcgccatagctggtgacccctttcctaccgtgcactggctcagagatggcaaagccctctgcaaagacactggccacttcgaggtgcttcagaatgaggacgtgttcaccctggttctaaagaaggtgcagccctggcatgccggccagtatgagatcctgctcaagaaccgggttggcgaatgcagttgccaggtgtcactgatgctacagaacagctctgccagagcccttccacgggggagggagcctgccagctgcgaggacctctgtggtggaggagttggtgctgatggtggtggtagtgaccgctatgggtccctgaggcctggctggccagcaagagggcagggttggctagaggaggaagacggcgaggacgtgcgaggggtgctgaagaggcgcgtggagacgaggcagcacactgaggaggcgatccgccagcaggaggtggagcagctggacttccgagacctcctggggaagaaggtgagtacaaagaccctatcggaagacgacctgaaggagatcccagccgagcagatggatttccgtgccaacctgcagcggcaagtgaagccaaagactgtgtctgaggaagagaggaaggtgcacagcccccagcaggtcgattttcgctctgtcctggccaagaaggggacttccaagacccccgtgcctgagaaggtgccaccgccaaaacctgccaccccggattttcgctcagtgctgggtggcaagaagaaattaccagcagagaatggcagcagcagtgccgagaccctgaatgccaaggcagtggagagttccaagcccctgagcaatgcacagccttcagggcccttgaaacccgtgggcaacgccaagcctgctgagaccctgaagccaatgggcaacgccaagcctgccgagaccctgaagcccatgggcaatgccaagcctgatgagaacctgaaatccgctagcaaagaagaactcaagaaagacgttaagaatgatgtgaactgcaagagaggccatgcagggaccacagataatgaaaagagatcagagagccaggggacagccccagccttcaagcagaagctgcaagatgttcatgtggcagagggcaagaagctgctgctccagtgccaggtgtcttctgaccccccagccaccatcatctggacgctgaacggaaagaccctcaagaccaccaagttcatcatcctctcccaggaaggctcactctgctccgtctccatcgagaaggcactgcctgaggacagaggcttatacaagtgtgtagccaagaatgacgctggccaggcggagtgctcctgccaagtcaccgtggatgatgctccagccagtgagaacaccaaggccccagagatgaaatcccggaggcccaagagctctcttcctcccgtgctaggaactgagagtgatgcgactgtgaaaaagaaacctgcccccaagacacctccgaaggcagcaatgccccctcagatcatccagttccctgaggaccagaaggtacgcgcaggagagtcagtggagctgtttggcaaagtgacaggcactcagcccatcacctgtacctggatgaagttccgaaagcagatccaggaaagcgagcacatgaaggtggagaacagcgagaatggcagcaagctcaccatcctggccgcgcgccaggagcactgcggctgctacacactgctggtggagaacaagctgggcagcaggcaggcccaggtcaacctcactgtcgtggataagccagaccccccagctggcacaccttgtgcctctgacattcggagctcctcactgaccctgtcctggtatggctcctcatatgatgggggcagtgctgtacagtcctacagcatcgagatctgggactcagccaacaagacgtggaaggaactagccacatgccgcagcacctctttcaacgtccaggacctgctgcctgaccacgaatataagttccgtgtacgtgcaatcaacgtgtatggaaccagtgagccaagccaggagtctgaactcacaacggtaggagagaaacctgaagagccgaaggatgaagtggaggtgtcagatgatgatgagaaggagcccgaggttgattaccggacagtgacaatcaatactgaacaaaaagtatctgacttctacgacattgaggagagattaggatctgggaaatttggacaggtctttcgacttgtagaaaagaaaactcgaaaagtctgggcagggaagttcttcaaggcatattcagcaaaagagaaagagaatatccggcaggagattagcatcatgaactgcctccaccaccctaagctggtccagtgtgtggatgcctttgaagaaaaggccaacatcgtcatggtcctggagatcgtgtcaggaggggagctgtttgagcgcatcattgacgaggactttgagctgacggagcgtgagtgcatcaagtacatgcggcagatctcggagggagtggagtacatccacaagcagggcatcgtgcacctggacctcaagccggagaacatcatgtgtgtcaacaagacgggcaccaggatcaagctcatcgactttggtctggccaggaggctggagaatgcggggtctctgaaggtcctctttggcaccccagaatttgtggctcctgaagtgatcaactatgagcccatcggctacgccacagacatgtggagcatcggggtcatctgctacatcctagtcagtggcctttcccccttcatgggagacaacgataacgaaaccttggccaacgttacctcagccacctgggacttcgacgacgaggcattcgatgagatctccgacgatgccaaggatttcatcagcaatctgctgaagaaagatatgaaaaaccgcctggactgcacgcagtgccttcagcatccatggctaatgaaagataccaagaacatggaggccaagaaactctccaaggaccggatgaagaagtacatggcaagaaggaaatggcagaaaacgggcaatgctgtgagagccattggaagactgtcctctatggcaatgatctcagggctcagtggcaggaaatcctcaacagggtcaccaaccagcccgctcaatgcagaaaaactagaatctgaagaagatgtgtcccaagctttccttgaggctgttgctgaggaaaagcctcatgtaaaaccctatttctctaagaccattcgcgatttagaagttgtggagggaagtgctgctagatttgactgcaagattgaaggatacccagaccccgaggttgtctggttcaaagatgaccagtcaatcagggagtcccgccacttccagatagactacgatgaggacgggaactgctctttaattattagtgatgtttgcggggatgacgatgccaagtacacctgcaaggctgtcaacagtcttggagaagccacctgcacagcagagctcattgtggaaacgatggaggaaggtgaaggggaaggggaagaggaagaagagtgaaacaaagccagagaaaagcagtttctaagtcatattaaaaggactatttctctaaaactc

SEQ ID NO: 156796 - DNA, 7531 bp, Homo sapiens
  Payload ID: 10735
  Gene Symbol: MYLK
  Gene Name: myosin light chain kinase
  Uniprot ID: Q15746
  ENST ID: ENST00000354792
  CDS Start-End: 187-5724
ggaaggattcttcaaaattaacagaaaccaattcgggccagctgaagagaaaaaataaaggtggctcccggctgcctctgctgcagttcagagcaacttcaggagcttcccagccgagagcttcaggacgcctttcctgtcccactggcccagttgccacaacaaacaacagagaagacggtgaccatgggggatgtgaagctggttgcctcgtcacacatttccaaaacctccctcagtgtggatccctcaagagttgactccatgcccctgacagaggcccctgctttcattttgccccctcggaacctctgcatcaaagaaggagccaccgccaagttcgaagggcgggtccggggttacccagagccccaggtgacatggcacagaaacgggcaacccatcaccagcgggggccgcttcctgctggattgcggcatccgggggactttcagccttgtgattcatgctgtccatgaggaggacaggggaaagtatacctgtgaagccaccaatggcagtggtgctcgccaggtgacagtggagttgacagtagaaggaagttttgcgaagcagcttggtcagcctgttgtttccaaaaccttaggggatagattttcagctccagcagtggagacccgtcctagcatctggggggagtgcccaccaaagtttgctaccaagctgggccgagttgtggtcaaagaaggacagatgggacgattctcctgcaagatcactggccggccccaaccgcaggtcacctggctcaagggaaatgttccactgcagccgagtgcccgtgtgtctgtgtctgagaagaacggcatgcaggttctggaaatccatggagtcaaccaagatgacgtgggagtgtacacgtgcctggtggtgaacgggtcggggaaggcctcgatgtcagctgaactttccatccaaggtttggacagtgccaataggtcatttgtgagagaaacaaaagccaccaattcagatgtcaggaaagaggtgaccaatgtaatctcaaaggagtcgaagctggacagtctggaggctgcagccaaaagcaagaactgctccagcccccagagaggtggctccccaccctgggctgcaaacagccagcctcagcccccaagggagtccaagctggagtcatgcaaggactcgcccagaacggccccgcagaccccggtccttcagaagacttccagctccatcaccctgcaggccgcaagagttcagccggaaccaagagcaccaggcctgggggtcctatcaccttctggagaagagaggaagaggccagctcctccccgtccagccaccttccccaccaggcagcctggcctggggagccaagatgttgtgagcaaggctgctaacaggagaatccccatggagggccagagggattcagcattccccaaatttgagagcaagccccaaagccaggaggtcaaggaaaatcaaactgtcaagttcagatgtgaagggcttgccgtgatggaggtggccccctccttctccagtgtcctgaaggactgcgctgttattgagggccaggattttgtgctgcagtgctccgtacgggggaccccagtgccccggatcacttggctgctgaatgggcagcccatccagtacgctcgctccacctgcgaggccggcgtggctgagctccacatccaggatgccctgccggaggaccatggcacctacacctgcctagctgagaatgccttggggcaggtgtcctgcagcgcctgggtcaccgtccatgaaaagaagagtagcaggaagagtgagtaccttctgcctgtggctcccagcaagcccactgcacccatcttcctgcagggcctctctgatctcaaagtcatggatggaagccaggtcactatgactgtccaagtgtcagggaatccaccccctgaagtcatctggctgcacaatgggaatgagatccaagagtcagaggacttccactttgaacagagaggaactcagcacagcctttgtatccaggaagtgttcccggaggacacgggcacgtacacctgcgaggcctggaacagcgctggagaggtccgcacccaggccgtgctcacggtacaagagcctcacgatggcacccagccctggttcatcagtaagcctcgctcagtgacagcctccctgggccagagtgtcctcatctcctgcgccatagctggtgacccctttcctaccgtgcactggctcagagatggcaaagccctctgcaaagacactggccacttcgaggtgcttcagaatgaggacgtgttcaccctggttctaaagaaggtgcagccctggcatgccggccagtatgagatcctgctcaagaaccgggttggcgaatgcagttgccaggtgtcactgatgctacagaacagctctgccagagcccttccacgggggagggagcctgccagctgcgaggacctctgtggtggaggagttggtgctgatggtggtggtagtgaccgctatgggtccctgaggcctggctggccagcaagagggcagggttggctagaggaggaagacggcgaggacgtgcgaggggtgctgaagaggcgcgtggagacgaggcagcacactgaggaggcgatccgccagcaggaggtggagcagctggacttccgagacctcctggggaagaaggtgagtacaaagaccctatcggaagacgacctgaaggagatcccagccgagcagatggatttccgtgccaacctgcagcggcaagtgaagccaaagactgtgtctgaggaagagaggaaggtgcacagcccccagcaggtcgattttcgctctgtcctggccaagaaggggacttccaagacccccgtgcctgagaaggtgccaccgccaaaacctgccaccccggattttcgctcagtgctgggtggcaagaagaaattaccagcagagaatggcagcagcagtgccgagaccctgaatgccaaggcagtggagagttccaagcccctgagcaatgcacagccttcagggcccttgaaacccgtgggcaacgccaagcctgctgagaccctgaagccaatgggcaacgccaagcctgccgagaccctgaagcccatgggcaatgccaagcctgatgagaacctgaaatccgctagcaaagaagaactcaagaaagacgttaagaatgatgtgaactgcaagagaggccatgcagggaccacagataatgaaaagagatcagagagccaggggacagccccagccttcaagcagaagctgcaagatgttcatgtggcagagggcaagaagctgctgctccagtgccaggtgtcttctgaccccccagccaccatcatctggacgctgaacggaaagaccctcaagaccaccaagttcatcatcctctcccaggaaggctcactctgctccgtctccatcgagaaggcactgcctgaggacagaggcttatacaagtgtgtagccaagaatgacgctggccaggcggagtgctcctgccaagtcaccgtggatgatgctccagccagtgagaacaccaaggccccagagatgaaatcccggaggcccaagagctctcttcctcccgtgctaggaactgagagtgatgcgactgtgaaaaagaaacctgcccccaagacacctccgaaggcagcaatgccccctcagatcatccagttccctgaggaccagaaggtacgcgcaggagagtcagtggagctgtttggcaaagtgacaggcactcagcccatcacctgtacctggatgaagttccgaaagcagatccaggaaagcgagcacatgaaggtggagaacagcgagaatggcagcaagctcaccatcctggccgcgcgccaggagcactgcggctgctacacactgctggtggagaacaagctgggcagcaggcaggcccaggtcaacctcactgtcgtggataagccagaccccccagctggcacaccttgtgcctctgacattcggagctcctcactgaccctgtcctggtatggctcctcatatgatgggggcagtgctgtacagtcctacagcatcgagatctgggactcagccaacaagacgtggaaggaactagccacatgccgcagcacctctttcaacgtccaggacctgctgcctgaccacgaatataagttccgtgtacgtgcaatcaacgtgtatggaaccagtgagccaagccaggagtctgaactcacaacggtaggagagaaacctgaagagccgaaggatgaagtggaggtgtcagatgatgatgagaaggagcccgaggttgattaccggacagtgacaatcaatactgaacaaaaagtatctgacttctacgacattgaggagagattaggatctgggaaatttggacaggtctttcgacttgtagaaaagaaaactcgaaaagtctgggcagggaagttcttcaaggcatattcagcaaaagagaaagagaatatccggcaggagattagcatcatgaactgcctccaccaccctaagctggtccagtgtgtggatgcctttgaagaaaaggccaacatcgtcatggtcctggagatcgtgtcaggaggggagctgtttgagcgcatcattgacgaggactttgagctgacggagcgtgagtgcatcaagtacatgcggcagatctcggagggagtggagtacatccacaagcagggcatcgtgcacctggacctcaagccggagaacatcatgtgtgtcaacaagacgggcaccaggatcaagctcatcgactttggtctggccaggaggctggagaatgcggggtctctgaaggtcctctttggcaccccagaatttgtggctcctgaagtgatcaactatgagcccatcggctacgccacagacatgtggagcatcggggtcatctgctacatcctagtcagtggcctttcccccttcatgggagacaacgataacgaaaccttggccaacgttacctcagccacctgggacttcgacgacgaggcattcgatgagatctccgacgatgccaaggatttcatcagcaatctgctgaagaaagatatgaaaaaccgcctggactgcacgcagtgccttcagcatccatggctaatgaaagataccaagaacatggaggccaagaaactctccaaggaccggatgaagaagtacatggcaagaaggaaatggcagaaaacgggcaatgctgtgagagccattggaagactgtcctctatggcaatgatctcagggctcagtggcaggaaatcctcaacagggtcaccaaccagcccgctcaatgcagaaaaactagaatctgaagaagatgtgtcccaagctttccttgaggctgttgctgaggaaaagcctcatgtaaaaccctatttctctaagaccattcgcgatttagaagttgtggagggaagtgctgctagatttgactgcaagattgaaggatacccagaccccgaggttgtctggttcaaagatgaccagtcaatcagggagtcccgccacttccagatagactacgatgaggacgggaactgctctttaattattagtgatgtttgcggggatgacgatgccaagtacacctgcaaggctgtcaacagtcttggagaagccacctgcacagcagagctcattgtggaaacgatggaggaaggtgaaggggaaggggaagaggaagaagagtgaaacaaagccagagaaaagcagtttctaagtcatattaaaaggactatttctctaaaactcaaaaaaaaaaaaaaaactcaagatagtaaaagcacctagtgtgatagattatcggttaggtcatttgtgggttgattcttcagaaacagcagttgatacctagcagcgttattgatgggcattaatctatgttagttggcaccttaagatactagtgcagctagatttcatttagggaaatcaccagtaacttgactgaccaattgattttagagagaaagtaaccaaaccaaatatttatctgggcaaagtcataaattctccacttgaatgcgctcatgaaaaataaggccaaaacaagagttctgggccacagctcagcccagagggttcctggggatgggaggcctctctctccccaccccctgactctagagaactgggttttctcccagtactccagcaattcatttctgaaagcagttgagccactttattccaaagtacactgcagatgttcaaactctccatttctctttccccttccacctgccagttttgctgactctcaacttgtcatgagtgtaagcattaaggacattatgcttcttcgattctgaagacaggtccctgctcatggatgactctggcttccttaggaaaatatttttcttccaaaatcagtaggaaatctaaacttatcccctctttgcagatgtctagcagcttcagacatttggttaagaacccatgggaaaaaaaaaatccttgctaatgtggtttcctttgtaaaccaggattcttatttgtgctgttatagaatatcagctctgaacgtgtggtaaagatttttgtgtttgaatataggagaaatcagtttgctgaaaagttagtcttaattatctattggccacgatgaaacagatttcaactgataaagagctggagaactccatgtactttggaatctcctccaagatagccagagtttaatacatcttcattctcaacactctccaaagaacttgacctaccttatgggttccatatttttcttcttaaatgtgcatcaatcatgccttgcccccaacctttaaatatattcttagacctggtaaatgcactcagacttgcgtctttaggaatttttaactttctttcactacattggcacttaaattttttctttataaagctttttgaaggtcataaacaaagaccataattgatgatagacctaatacatttcctctgtgtgtgtgtgtaacattccaaatactttttttttcttttccactgtttgtaaggtgcaacaatttaatatttttaagggactttttaagagttccttaagaaccaatttaaaattacttcagtgcaatcctacacagtatcaacattagaattttgatattagtcttatgttatcttccattctatttttatctgctttttgctgctagtttcaaactgccagtatttttccttttgcttttaaaatagttacaatatttttcatgatagccacagtattgccacagtttattataataaagggtttttatttgatttagcgcattcaaagcttttttctatcacttttgtgttcagaatataacctttgtgtgcgtgtatgttgtgtgtgtgcatgtgtggcgtatatgtgtgttacaggttaatgccttcttggaattgtgttaatgttctcttggtttattatgccatcagaatggtaaatgagaacactacaactgtagtcagctcacaatttttaaataaaggataccacagtgcatgctgtttgttc

SEQ ID NO: 156797 - DNA, 7585 bp, Homo sapiens
  Payload ID: 10735
  Gene Symbol: MYLK
  Gene Name: myosin light chain kinase
  Uniprot ID: Q15746
  ENST ID: ENST00000359169
  CDS Start-End: 187-5778
ggaaggattcttcaaaattaacagaaaccaattcgggccagctgaagagaaaaaataaaggtggctcccggctgcctctgctgcagttcagagcaacttcaggagcttcccagccgagagcttcaggacgcctttcctgtcccactggcccagttgccacaacaaacaacagagaagacggtgaccatgggggatgtgaagctggttgcctcgtcacacatttccaaaacctccctcagtgtggatccctcaagagttgactccatgcccctgacagaggcccctgctttcattttgccccctcggaacctctgcatcaaagaaggagccaccgccaagttcgaagggcgggtccggggttacccagagccccaggtgacatggcacagaaacgggcaacccatcaccagcgggggccgcttcctgctggattgcggcatccgggggactttcagccttgtgattcatgctgtccatgaggaggacaggggaaagtatacctgtgaagccaccaatggcagtggtgctcgccaggtgacagtggagttgacagtagaaggaagttttgcgaagcagcttggtcagcctgttgtttccaaaaccttaggggatagattttcagctccagcagtggagacccgtcctagcatctggggggagtgcccaccaaagtttgctaccaagctgggccgagttgtggtcaaagaaggacagatgggacgattctcctgcaagatcactggccggccccaaccgcaggtcacctggctcaagggaaatgttccactgcagccgagtgcccgtgtgtctgtgtctgagaagaacggcatgcaggttctggaaatccatggagtcaaccaagatgacgtgggagtgtacacgtgcctggtggtgaacgggtcggggaaggcctcgatgtcagctgaactttccatccaaggtttggacagtgccaataggtcatttgtgagagaaacaaaagccaccaattcagatgtcaggaaagaggtgaccaatgtaatctcaaaggagtcgaagctggacagtctggaggctgcagccaaaagcaagaactgctccagcccccagagaggtggctccccaccctgggctgcaaacagccagcctcagcccccaagggagtccaagctggagtcatgcaaggactcgcccagaacggccccgcagaccccggtccttcagaagacttccagctccatcaccctgcaggccgcaagagttcagccggaaccaagagcaccaggcctgggggtcctatcaccttctggagaagagaggaagaggccagctcctccccgtccagccaccttccccaccaggcagcctggcctggggagccaagatgttgtgagcaaggctgctaacaggagaatccccatggagggccagagggattcagcattccccaaatttgagagcaagccccaaagccaggaggtcaaggaaaatcaaactgtcaagttcagatgtgaagtttccgggattccaaagcctgaagtggcctggttcctggaaggcacccccgtgaggagacaggaaggcagcattgaggtttatgaagatgctggctcccattacctctgcctgctgaaagcccggaccagggacagtgggacatacagctgcactgcttccaacgcccaaggccagctgtcctgtagctggaccctccaagtggaaaggcttgccgtgatggaggtggccccctccttctccagtgtcctgaaggactgcgctgttattgagggccaggattttgtgctgcagtgctccgtacgggggaccccagtgccccggatcacttggctgctgaatgggcagcccatccagtacgctcgctccacctgcgaggccggcgtggctgagctccacatccaggatgccctgccggaggaccatggcacctacacctgcctagctgagaatgccttggggcaggtgtcctgcagcgcctgggtcaccgtccatgaaaagaagagtagcaggaagagtgagtaccttctgcctgtggctcccagcaagcccactgcacccatcttcctgcagggcctctctgatctcaaagtcatggatggaagccaggtcactatgactgtccaagtgtcagggaatccaccccctgaagtcatctggctgcacaatgggaatgagatccaagagtcagaggacttccactttgaacagagaggaactcagcacagcctttgtatccaggaagtgttcccggaggacacgggcacgtacacctgcgaggcctggaacagcgctggagaggtccgcacccaggccgtgctcacggtacaagagcctcacgatggcacccagccctggttcatcagtaagcctcgctcagtgacagcctccctgggccagagtgtcctcatctcctgcgccatagctggtgacccctttcctaccgtgcactggctcagagatggcaaagccctctgcaaagacactggccacttcgaggtgcttcagaatgaggacgtgttcaccctggttctaaagaaggtgcagccctggcatgccggccagtatgagatcctgctcaagaaccgggttggcgaatgcagttgccaggtgtcactgatgctacagaacagctctgccagagcccttccacgggggagggagcctgccagctgcgaggacctctgtggtggaggagttggtgctgatggtggtggtagtgaccgctatgggtccctgaggcctggctggccagcaagagggcagggttggctagaggaggaagacggcgaggacgtgcgaggggtgctgaagaggcgcgtggagacgaggcagcacactgaggaggcgatccgccagcaggaggtggagcagctggacttccgagacctcctggggaagaaggtgagtacaaagaccctatcggaagacgacctgaaggagatcccagccgagcagatggatttccgtgccaacctgcagcggcaagtgaagccaaagactgtgtctgaggaagagaggaaggtgcacagcccccagcaggtcgattttcgctctgtcctggccaagaaggggacttccaagacccccgtgcctgagaaggtgccaccgccaaaacctgccaccccggattttcgctcagtgctgggtggcaagaagaaattaccagcagagaatggcagcagcagtgccgagaccctgaatgccaaggcagtggagagttccaagcccctgagcaatgcacagccttcagggcccttgaaacccgtgggcaacgccaagcctgctgagaccctgaagccaatgggcaacgccaagcctgccgagaccctgaagcccatgggcaatgccaagcctgatgagaacctgaaatccgctagcaaagaagaactcaagaaagacgttaagaatgatgtgaactgcaagagaggccatgcagggaccacagataatgaaaagagatcagagagccaggggacagccccagccttcaagcagaagctgcaagatgttcatgtggcagagggcaagaagctgctgctccagtgccaggtgtcttctgaccccccagccaccatcatctggacgctgaacggaaagaccctcaagaccaccaagttcatcatcctctcccaggaaggctcactctgctccgtctccatcgagaaggcactgcctgaggacagaggcttatacaagtgtgtagccaagaatgacgctggccaggcggagtgctcctgccaagtcaccgtggatgatgctccagccagtgagaacaccaaggccccagagatgaaatcccggaggcccaagagctctcttcctcccgtgctaggaactgagagtgatgcgactgtgaaaaagaaacctgcccccaagacacctccgaaggcagcaatgccccctcagatcatccagttccctgaggaccagaaggtacgcgcaggagagtcagtggagctgtttggcaaagtgacaggcactcagcccatcacctgtacctggatgaagttccgaaagcagatccaggaaagcgagcacatgaaggtggagaacagcgagaatggcagcaagctcaccatcctggccgcgcgccaggagcactgcggctgctacacactgctggtggagaacaagctgggcagcaggcaggcccaggtcaacctcactgtcgtggataagccagaccccccagctggcacaccttgtgcctctgacattcggagctcctcactgaccctgtcctggtatggctcctcatatgatgggggcagtgctgtacagtcctacagcatcgagatctgggactcagccaacaagacgtggaaggaactagccacatgccgcagcacctctttcaacgtccaggacctgctgcctgaccacgaatataagttccgtgtacgtgcaatcaacgtgtatggaaccagtgagccaagccaggagtctgaactcacaacggtaggagagaaacctgaagagccgaaggatgaagtggaggtgtcagatgatgatgagaaggagcccgaggttgattaccggacagtgacaatcaatactgaacaaaaagtatctgacttctacgacattgaggagagattaggatctgggaaatttggacaggtctttcgacttgtagaaaagaaaactcgaaaagtctgggcagggaagttcttcaaggcatattcagcaaaagagaaagagaatatccggcaggagattagcatcatgaactgcctccaccaccctaagctggtccagtgtgtggatgcctttgaagaaaaggccaacatcgtcatggtcctggagatcgtgtcaggaggggagctgtttgagcgcatcattgacgaggactttgagctgacggagcgtgagtgcatcaagtacatgcggcagatctcggagggagtggagtacatccacaagcagggcatcgtgcacctggacctcaagccggagaacatcatgtgtgtcaacaagacgggcaccaggatcaagctcatcgactttggtctggccaggaggctggagaatgcggggtctctgaaggtcctctttggcaccccagaatttgtggctcctgaagtgatcaactatgagcccatcggctacgccacagacatgtggagcatcggggtcatctgctacatcctaaaccgcctggactgcacgcagtgccttcagcatccatggctaatgaaagataccaagaacatggaggccaagaaactctccaaggaccggatgaagaagtacatggcaagaaggaaatggcagaaaacgggcaatgctgtgagagccattggaagactgtcctctatggcaatgatctcagggctcagtggcaggaaatcctcaacagggtcaccaaccagcccgctcaatgcagaaaaactagaatctgaagaagatgtgtcccaagctttccttgaggctgttgctgaggaaaagcctcatgtaaaaccctatttctctaagaccattcgcgatttagaagttgtggagggaagtgctgctagatttgactgcaagattgaaggatacccagaccccgaggttgtctggttcaaagatgaccagtcaatcagggagtcccgccacttccagatagactacgatgaggacgggaactgctctttaattattagtgatgtttgcggggatgacgatgccaagtacacctgcaaggctgtcaacagtcttggagaagccacctgcacagcagagctcattgtggaaacgatggaggaaggtgaaggggaaggggaagaggaagaagagtgaaacaaagccagagaaaagcagtttctaagtcatattaaaaggactatttctctaaaactcaaaaaaaaaaaaaaaactcaagatagtaaaagcacctagtgtgatagattatcggttaggtcatttgtgggttgattcttcagaaacagcagttgatacctagcagcgttattgatgggcattaatctatgttagttggcaccttaagatactagtgcagctagatttcatttagggaaatcaccagtaacttgactgaccaattgattttagagagaaagtaaccaaaccaaatatttatctgggcaaagtcataaattctccacttgaatgcgctcatgaaaaataaggccaaaacaagagttctgggccacagctcagcccagagggttcctggggatgggaggcctctctctccccaccccctgactctagagaactgggttttctcccagtactccagcaattcatttctgaaagcagttgagccactttattccaaagtacactgcagatgttcaaactctccatttctctttccccttccacctgccagttttgctgactctcaacttgtcatgagtgtaagcattaaggacattatgcttcttcgattctgaagacaggtccctgctcatggatgactctggcttccttaggaaaatatttttcttccaaaatcagtaggaaatctaaacttatcccctctttgcagatgtctagcagcttcagacatttggttaagaacccatgggaaaaaaaaaatccttgctaatgtggtttcctttgtaaaccaggattcttatttgtgctgttatagaatatcagctctgaacgtgtggtaaagatttttgtgtttgaatataggagaaatcagtttgctgaaaagttagtcttaattatctattggccacgatgaaacagatttcaactgataaagagctggagaactccatgtactttggaatctcctccaagatagccagagtttaatacatcttcattctcaacactctccaaagaacttgacctaccttatgggttccatatttttcttcttaaatgtgcatcaatcatgccttgcccccaacctttaaatatattcttagacctggtaaatgcactcagacttgcgtctttaggaatttttaactttctttcactacattggcacttaaattttttctttataaagctttttgaaggtcataaacaaagaccataattgatgatagacctaatacatttcctctgtgtgtgtgtgtaacattccaaatactttttttttcttttccactgtttgtaaggtgcaacaatttaatatttttaagggactttttaagagttccttaagaaccaatttaaaattacttcagtgcaatcctacacagtatcaacattagaattttgatattagtcttatgttatcttccattctatttttatctgctttttgctgctagtttcaaactgccagtatttttccttttgcttttaaaatagttacaatatttttcatgatagccacagtattgccacagtttattataataaagggtttttatttgatttagcgcattcaaagcttttttctatcacttttgtgttcagaatataacctttgtgtgcgtgtatgttgtgtgtgtgcatgtgtggcgtatatgtgtgttacaggttaatgccttcttggaattgtgttaatgttctcttggtttattatgccatcagaatggtaaatgagaacactacaactgtagtcagctcacaatttttaaataaaggataccacagtgcatgctgtttgttc

SEQ ID NO: 156798 - DNA, 7738 bp, Homo sapiens
  Payload ID: 10735
  Gene Symbol: MYLK
  Gene Name: myosin light chain kinase
  Uniprot ID: Q15746
  ENST ID: ENST00000360304
  CDS Start-End: 187-5931
ggaaggattcttcaaaattaacagaaaccaattcgggccagctgaagagaaaaaataaaggtggctcccggctgcctctgctgcagttcagagcaacttcaggagcttcccagccgagagcttcaggacgcctttcctgtcccactggcccagttgccacaacaaacaacagagaagacggtgaccatgggggatgtgaagctggttgcctcgtcacacatttccaaaacctccctcagtgtggatccctcaagagttgactccatgcccctgacagaggcccctgctttcattttgccccctcggaacctctgcatcaaagaaggagccaccgccaagttcgaagggcgggtccggggttacccagagccccaggtgacatggcacagaaacgggcaacccatcaccagcgggggccgcttcctgctggattgcggcatccgggggactttcagccttgtgattcatgctgtccatgaggaggacaggggaaagtatacctgtgaagccaccaatggcagtggtgctcgccaggtgacagtggagttgacagtagaaggaagttttgcgaagcagcttggtcagcctgttgtttccaaaaccttaggggatagattttcagctccagcagtggagacccgtcctagcatctggggggagtgcccaccaaagtttgctaccaagctgggccgagttgtggtcaaagaaggacagatgggacgattctcctgcaagatcactggccggccccaaccgcaggtcacctggctcaagggaaatgttccactgcagccgagtgcccgtgtgtctgtgtctgagaagaacggcatgcaggttctggaaatccatggagtcaaccaagatgacgtgggagtgtacacgtgcctggtggtgaacgggtcggggaaggcctcgatgtcagctgaactttccatccaaggtttggacagtgccaataggtcatttgtgagagaaacaaaagccaccaattcagatgtcaggaaagaggtgaccaatgtaatctcaaaggagtcgaagctggacagtctggaggctgcagccaaaagcaagaactgctccagcccccagagaggtggctccccaccctgggctgcaaacagccagcctcagcccccaagggagtccaagctggagtcatgcaaggactcgcccagaacggccccgcagaccccggtccttcagaagacttccagctccatcaccctgcaggccgcaagagttcagccggaaccaagagcaccaggcctgggggtcctatcaccttctggagaagagaggaagaggccagctcctccccgtccagccaccttccccaccaggcagcctggcctggggagccaagatgttgtgagcaaggctgctaacaggagaatccccatggagggccagagggattcagcattccccaaatttgagagcaagccccaaagccaggaggtcaaggaaaatcaaactgtcaagttcagatgtgaagtttccgggattccaaagcctgaagtggcctggttcctggaaggcacccccgtgaggagacaggaaggcagcattgaggtttatgaagatgctggctcccattacctctgcctgctgaaagcccggaccagggacagtgggacatacagctgcactgcttccaacgcccaaggccagctgtcctgtagctggaccctccaagtggaaaggcttgccgtgatggaggtggccccctccttctccagtgtcctgaaggactgcgctgttattgagggccaggattttgtgctgcagtgctccgtacgggggaccccagtgccccggatcacttggctgctgaatgggcagcccatccagtacgctcgctccacctgcgaggccggcgtggctgagctccacatccaggatgccctgccggaggaccatggcacctacacctgcctagctgagaatgccttggggcaggtgtcctgcagcgcctgggtcaccgtccatgaaaagaagagtagcaggaagagtgagtaccttctgcctgtggctcccagcaagcccactgcacccatcttcctgcagggcctctctgatctcaaagtcatggatggaagccaggtcactatgactgtccaagtgtcagggaatccaccccctgaagtcatctggctgcacaatgggaatgagatccaagagtcagaggacttccactttgaacagagaggaactcagcacagcctttgtatccaggaagtgttcccggaggacacgggcacgtacacctgcgaggcctggaacagcgctggagaggtccgcacccaggccgtgctcacggtacaagagcctcacgatggcacccagccctggttcatcagtaagcctcgctcagtgacagcctccctgggccagagtgtcctcatctcctgcgccatagctggtgacccctttcctaccgtgcactggctcagagatggcaaagccctctgcaaagacactggccacttcgaggtgcttcagaatgaggacgtgttcaccctggttctaaagaaggtgcagccctggcatgccggccagtatgagatcctgctcaagaaccgggttggcgaatgcagttgccaggtgtcactgatgctacagaacagctctgccagagcccttccacgggggagggagcctgccagctgcgaggacctctgtggtggaggagttggtgctgatggtggtggtagtgaccgctatgggtccctgaggcctggctggccagcaagagggcagggttggctagaggaggaagacggcgaggacgtgcgaggggtgctgaagaggcgcgtggagacgaggcagcacactgaggaggcgatccgccagcaggaggtggagcagctggacttccgagacctcctggggaagaaggtgagtacaaagaccctatcggaagacgacctgaaggagatcccagccgagcagatggatttccgtgccaacctgcagcggcaagtgaagccaaagactgtgtctgaggaagagaggaaggtgcacagcccccagcaggtcgattttcgctctgtcctggccaagaaggggacttccaagacccccgtgcctgagaaggtgccaccgccaaaacctgccaccccggattttcgctcagtgctgggtggcaagaagaaattaccagcagagaatggcagcagcagtgccgagaccctgaatgccaaggcagtggagagttccaagcccctgagcaatgcacagccttcagggcccttgaaacccgtgggcaacgccaagcctgctgagaccctgaagccaatgggcaacgccaagcctgccgagaccctgaagcccatgggcaatgccaagcctgatgagaacctgaaatccgctagcaaagaagaactcaagaaagacgttaagaatgatgtgaactgcaagagaggccatgcagggaccacagataatgaaaagagatcagagagccaggggacagccccagccttcaagcagaagctgcaagatgttcatgtggcagagggcaagaagctgctgctccagtgccaggtgtcttctgaccccccagccaccatcatctggacgctgaacggaaagaccctcaagaccaccaagttcatcatcctctcccaggaaggctcactctgctccgtctccatcgagaaggcactgcctgaggacagaggcttatacaagtgtgtagccaagaatgacgctggccaggcggagtgctcctgccaagtcaccgtggatgatgctccagccagtgagaacaccaaggccccagagatgaaatcccggaggcccaagagctctcttcctcccgtgctaggaactgagagtgatgcgactgtgaaaaagaaacctgcccccaagacacctccgaaggcagcaatgccccctcagatcatccagttccctgaggaccagaaggtacgcgcaggagagtcagtggagctgtttggcaaagtgacaggcactcagcccatcacctgtacctggatgaagttccgaaagcagatccaggaaagcgagcacatgaaggtggagaacagcgagaatggcagcaagctcaccatcctggccgcgcgccaggagcactgcggctgctacacactgctggtggagaacaagctgggcagcaggcaggcccaggtcaacctcactgtcgtggataagccagaccccccagctggcacaccttgtgcctctgacattcggagctcctcactgaccctgtcctggtatggctcctcatatgatgggggcagtgctgtacagtcctacagcatcgagatctgggactcagccaacaagacgtggaaggaactagccacatgccgcagcacctctttcaacgtccaggacctgctgcctgaccacgaatataagttccgtgtacgtgcaatcaacgtgtatggaaccagtgagccaagccaggagtctgaactcacaacggtaggagagaaacctgaagagccgaaggatgaagtggaggtgtcagatgatgatgagaaggagcccgaggttgattaccggacagtgacaatcaatactgaacaaaaagtatctgacttctacgacattgaggagagattaggatctgggaaatttggacaggtctttcgacttgtagaaaagaaaactcgaaaagtctgggcagggaagttcttcaaggcatattcagcaaaagagaaagagaatatccggcaggagattagcatcatgaactgcctccaccaccctaagctggtccagtgtgtggatgcctttgaagaaaaggccaacatcgtcatggtcctggagatcgtgtcaggaggggagctgtttgagcgcatcattgacgaggactttgagctgacggagcgtgagtgcatcaagtacatgcggcagatctcggagggagtggagtacatccacaagcagggcatcgtgcacctggacctcaagccggagaacatcatgtgtgtcaacaagacgggcaccaggatcaagctcatcgactttggtctggccaggaggctggagaatgcggggtctctgaaggtcctctttggcaccccagaatttgtggctcctgaagtgatcaactatgagcccatcggctacgccacagacatgtggagcatcggggtcatctgctacatcctagtcagtggcctttcccccttcatgggagacaacgataacgaaaccttggccaacgttacctcagccacctgggacttcgacgacgaggcattcgatgagatctccgacgatgccaaggatttcatcagcaatctgctgaagaaagatatgaaaaaccgcctggactgcacgcagtgccttcagcatccatggctaatgaaagataccaagaacatggaggccaagaaactctccaaggaccggatgaagaagtacatggcaagaaggaaatggcagaaaacgggcaatgctgtgagagccattggaagactgtcctctatggcaatgatctcagggctcagtggcaggaaatcctcaacagggtcaccaaccagcccgctcaatgcagaaaaactagaatctgaagaagatgtgtcccaagctttccttgaggctgttgctgaggaaaagcctcatgtaaaaccctatttctctaagaccattcgcgatttagaagttgtggagggaagtgctgctagatttgactgcaagattgaaggatacccagaccccgaggttgtctggttcaaagatgaccagtcaatcagggagtcccgccacttccagatagactacgatgaggacgggaactgctctttaattattagtgatgtttgcggggatgacgatgccaagtacacctgcaaggctgtcaacagtcttggagaagccacctgcacagcagagctcattgtggaaacgatggaggaaggtgaaggggaaggggaagaggaagaagagtgaaacaaagccagagaaaagcagtttctaagtcatattaaaaggactatttctctaaaactcaaaaaaaaaaaaaaaactcaagatagtaaaagcacctagtgtgatagattatcggttaggtcatttgtgggttgattcttcagaaacagcagttgatacctagcagcgttattgatgggcattaatctatgttagttggcaccttaagatactagtgcagctagatttcatttagggaaatcaccagtaacttgactgaccaattgattttagagagaaagtaaccaaaccaaatatttatctgggcaaagtcataaattctccacttgaatgcgctcatgaaaaataaggccaaaacaagagttctgggccacagctcagcccagagggttcctggggatgggaggcctctctctccccaccccctgactctagagaactgggttttctcccagtactccagcaattcatttctgaaagcagttgagccactttattccaaagtacactgcagatgttcaaactctccatttctctttccccttccacctgccagttttgctgactctcaacttgtcatgagtgtaagcattaaggacattatgcttcttcgattctgaagacaggtccctgctcatggatgactctggcttccttaggaaaatatttttcttccaaaatcagtaggaaatctaaacttatcccctctttgcagatgtctagcagcttcagacatttggttaagaacccatgggaaaaaaaaaatccttgctaatgtggtttcctttgtaaaccaggattcttatttgtgctgttatagaatatcagctctgaacgtgtggtaaagatttttgtgtttgaatataggagaaatcagtttgctgaaaagttagtcttaattatctattggccacgatgaaacagatttcaactgataaagagctggagaactccatgtactttggaatctcctccaagatagccagagtttaatacatcttcattctcaacactctccaaagaacttgacctaccttatgggttccatatttttcttcttaaatgtgcatcaatcatgccttgcccccaacctttaaatatattcttagacctggtaaatgcactcagacttgcgtctttaggaatttttaactttctttcactacattggcacttaaattttttctttataaagctttttgaaggtcataaacaaagaccataattgatgatagacctaatacatttcctctgtgtgtgtgtgtaacattccaaatactttttttttcttttccactgtttgtaaggtgcaacaatttaatatttttaagggactttttaagagttccttaagaaccaatttaaaattacttcagtgcaatcctacacagtatcaacattagaattttgatattagtcttatgttatcttccattctatttttatctgctttttgctgctagtttcaaactgccagtatttttccttttgcttttaaaatagttacaatatttttcatgatagccacagtattgccacagtttattataataaagggtttttatttgatttagcgcattcaaagcttttttctatcacttttgtgttcagaatataacctttgtgtgcgtgtatgttgtgtgtgtgcatgtgtggcgtatatgtgtgttacaggttaatgccttcttggaattgtgttaatgttctcttggtttattatgccatcagaatggtaaatgagaacactacaactgtagtcagctcacaatttttaaataaaggataccacagtgcatgctgtttgttc

SEQ ID NO: 156799 - DNA, 10027 bp, Homo sapiens
  Payload ID: 10735
  Gene Symbol: MYLK
  Gene Name: myosin light chain kinase
  Uniprot ID: Q15746
  ENST ID: ENST00000360772
  CDS Start-End: 380-5971
ggctccccgcgccgcccggtcggcagcagggcgctgagcgagctcggagcccgcgctgtgcgcctgcggccggggcgccccgccgagcgccggtgccccggctcccgggccgccttcgccgcgcgggaaggattcttcaaaattaacagaaaccaattcgggccagctgaagagaaaaaataaagcatttcttccttctgatggggcaagactctctctggaatggggctcttatgacctacagtcaaacaaggtggctcccggctgcctctgctgcagttcagagcaacttcaggagcttcccagccgagagcttcaggacgcctttcctgtcccactggcccagttgccacaacaaacaacagagaagacggtgaccatgggggatgtgaagctggttgcctcgtcacacatttccaaaacctccctcagtgtggatccctcaagagttgactccatgcccctgacagaggcccctgctttcattttgccccctcggaacctctgcatcaaagaaggagccaccgccaagttcgaagggcgggtccggggttacccagagccccaggtgacatggcacagaaacgggcaacccatcaccagcgggggccgcttcctgctggattgcggcatccgggggactttcagccttgtgattcatgctgtccatgaggaggacaggggaaagtatacctgtgaagccaccaatggcagtggtgctcgccaggtgacagtggagttgacagtagaaggaagttttgcgaagcagcttggtcagcctgttgtttccaaaaccttaggggatagattttcagctccagcagtggagacccgtcctagcatctggggggagtgcccaccaaagtttgctaccaagctgggccgagttgtggtcaaagaaggacagatgggacgattctcctgcaagatcactggccggccccaaccgcaggtcacctggctcaagggaaatgttccactgcagccgagtgcccgtgtgtctgtgtctgagaagaacggcatgcaggttctggaaatccatggagtcaaccaagatgacgtgggagtgtacacgtgcctggtggtgaacgggtcggggaaggcctcgatgtcagctgaactttccatccaaggtttggacagtgccaataggtcatttgtgagagaaacaaaagccaccaattcagatgtcaggaaagaggtgaccaatgtaatctcaaaggagtcgaagctggacagtctggaggctgcagccaaaagcaagaactgctccagcccccagagaggtggctccccaccctgggctgcaaacagccagcctcagcccccaagggagtccaagctggagtcatgcaaggactcgcccagaacggccccgcagaccccggtccttcagaagacttccagctccatcaccctgcaggccgcaagagttcagccggaaccaagagcaccaggcctgggggtcctatcaccttctggagaagagaggaagaggccagctcctccccgtccagccaccttccccaccaggcagcctggcctggggagccaagatgttgtgagcaaggctgctaacaggagaatccccatggagggccagagggattcagcattccccaaatttgagagcaagccccaaagccaggaggtcaaggaaaatcaaactgtcaagttcagatgtgaagtttccgggattccaaagcctgaagtggcctggttcctggaaggcacccccgtgaggagacaggaaggcagcattgaggtttatgaagatgctggctcccattacctctgcctgctgaaagcccggaccagggacagtgggacatacagctgcactgcttccaacgcccaaggccagctgtcctgtagctggaccctccaagtggaaaggcttgccgtgatggaggtggccccctccttctccagtgtcctgaaggactgcgctgttattgagggccaggattttgtgctgcagtgctccgtacgggggaccccagtgccccggatcacttggctgctgaatgggcagcccatccagtacgctcgctccacctgcgaggccggcgtggctgagctccacatccaggatgccctgccggaggaccatggcacctacacctgcctagctgagaatgccttggggcaggtgtcctgcagcgcctgggtcaccgtccatgaaaagaagagtagcaggaagagtgagtaccttctgcctgtggctcccagcaagcccactgcacccatcttcctgcagggcctctctgatctcaaagtcatggatggaagccaggtcactatgactgtccaagtgtcagggaatccaccccctgaagtcatctggctgcacaatgggaatgagatccaagagtcagaggacttccactttgaacagagaggaactcagcacagcctttgtatccaggaagtgttcccggaggacacgggcacgtacacctgcgaggcctggaacagcgctggagaggtccgcacccaggccgtgctcacggtacaagagcctcacgatggcacccagccctggttcatcagtaagcctcgctcagtgacagcctccctgggccagagtgtcctcatctcctgcgccatagctggtgacccctttcctaccgtgcactggctcagagatggcaaagccctctgcaaagacactggccacttcgaggtgcttcagaatgaggacgtgttcaccctggttctaaagaaggtgcagccctggcatgccggccagtatgagatcctgctcaagaaccgggttggcgaatgcagttgccaggtgtcactgatgctacagaacagctctgccagagcccttccacgggggagggagcctgccagctgcgaggacctctgtggtggaggagttggtgctgatggtggtggtagtgaccgctatgggtccctgaggcctggctggccagcaagagggcagggttggctagaggaggaagacggcgaggacgtgcgaggggtgctgaagaggcgcgtggagacgaggcagcacactgaggaggcgatccgccagcaggaggtggagcagctggacttccgagacctcctggggaagaaggtgagtacaaagaccctatcggaagacgacctgaaggagatcccagccgagcagatggatttccgtgccaacctgcagcggcaagtgaagccaaagactgtgtctgaggaagagaggaaggtgcacagcccccagcaggtcgattttcgctctgtcctggccaagaaggggacttccaagacccccgtgcctgagaaggtgccaccgccaaaacctgccaccccggattttcgctcagtgctgggtggcaagaagaaattaccagcagagaatggcagcagcagtgccgagaccctgaatgccaaggcagtggagagttccaagcccctgagcaatgcacagccttcagggcccttgaaacccgtgggcaacgccaagcctgctgagaccctgaagccaatgggcaacgccaagcctgccgagaccctgaagcccatgggcaatgccaagcctgatgagaacctgaaatccgctagcaaagaagaactcaagaaagacgttaagaatgatgtgaactgcaagagaggccatgcagggaccacagataatgaaaagagatcagagagccaggggacagccccagccttcaagcagaagctgcaagatgttcatgtggcagagggcaagaagctgctgctccagtgccaggtgtcttctgaccccccagccaccatcatctggacgctgaacggaaagaccctcaagaccaccaagttcatcatcctctcccaggaaggctcactctgctccgtctccatcgagaaggcactgcctgaggacagaggcttatacaagtgtgtagccaagaatgacgctggccaggcggagtgctcctgccaagtcaccgtggatgatgctccagccagtgagaacaccaaggccccagagatgaaatcccggaggcccaagagctctcttcctcccgtgctaggaactgagagtgatgcgactgtgaaaaagaaacctgcccccaagacacctccgaaggcagcaatgccccctcagatcatccagttccctgaggaccagaaggtacgcgcaggagagtcagtggagctgtttggcaaagtgacaggcactcagcccatcacctgtacctggatgaagttccgaaagcagatccaggaaagcgagcacatgaaggtggagaacagcgagaatggcagcaagctcaccatcctggccgcgcgccaggagcactgcggctgctacacactgctggtggagaacaagctgggcagcaggcaggcccaggtcaacctcactgtcgtggataagccagaccccccagctggcacaccttgtgcctctgacattcggagctcctcactgaccctgtcctggtatggctcctcatatgatgggggcagtgctgtacagtcctacagcatcgagatctgggactcagccaacaagacgtggaaggaactagccacatgccgcagcacctctttcaacgtccaggacctgctgcctgaccacgaatataagttccgtgtacgtgcaatcaacgtgtatggaaccagtgagccaagccaggagtctgaactcacaacggtaggagagaaacctgaagagccgaaggatgaagtggaggtgtcagatgatgatgagaaggagcccgaggttgattaccggacagtgacaatcaatactgaacaaaaagtatctgacttctacgacattgaggagagattaggatctgggaaatttggacaggtctttcgacttgtagaaaagaaaactcgaaaagtctgggcagggaagttcttcaaggcatattcagcaaaagagaaagagaatatccggcaggagattagcatcatgaactgcctccaccaccctaagctggtccagtgtgtggatgcctttgaagaaaaggccaacatcgtcatggtcctggagatcgtgtcaggaggggagctgtttgagcgcatcattgacgaggactttgagctgacggagcgtgagtgcatcaagtacatgcggcagatctcggagggagtggagtacatccacaagcagggcatcgtgcacctggacctcaagccggagaacatcatgtgtgtcaacaagacgggcaccaggatcaagctcatcgactttggtctggccaggaggctggagaatgcggggtctctgaaggtcctctttggcaccccagaatttgtggctcctgaagtgatcaactatgagcccatcggctacgccacagacatgtggagcatcggggtcatctgctacatcctaaaccgcctggactgcacgcagtgccttcagcatccatggctaatgaaagataccaagaacatggaggccaagaaactctccaaggaccggatgaagaagtacatggcaagaaggaaatggcagaaaacgggcaatgctgtgagagccattggaagactgtcctctatggcaatgatctcagggctcagtggcaggaaatcctcaacagggtcaccaaccagcccgctcaatgcagaaaaactagaatctgaagaagatgtgtcccaagctttccttgaggctgttgctgaggaaaagcctcatgtaaaaccctatttctctaagaccattcgcgatttagaagttgtggagggaagtgctgctagatttgactgcaagattgaaggatacccagaccccgaggttgtctggttcaaagatgaccagtcaatcagggagtcccgccacttccagatagactacgatgaggacgggaactgctctttaattattagtgatgtttgcggggatgacgatgccaagtacacctgcaaggctgtcaacagtcttggagaagccacctgcacagcagagctcattgtggaaacgatggaggaaggtgaaggggaaggggaagaggaagaagagtgaaacaaagccagagaaaagcagtttctaagtcatattaaaaggactatttctctaaaactcaaaaaaaaaaaaaaaactcaagatagtaaaagcacctagtgtgatagattatcggttaggtcatttgtgggttgattcttcagaaacagcagttgatacctagcagcgttattgatgggcattaatctatgttagttggcaccttaagatactagtgcagctagatttcatttagggaaatcaccagtaacttgactgaccaattgattttagagagaaagtaaccaaaccaaatatttatctgggcaaagtcataaattctccacttgaatgcgctcatgaaaaataaggccaaaacaagagttctgggccacagctcagcccagagggttcctggggatgggaggcctctctctccccaccccctgactctagagaactgggttttctcccagtactccagcaattcatttctgaaagcagttgagccactttattccaaagtacactgcagatgttcaaactctccatttctctttccccttccacctgccagttttgctgactctcaacttgtcatgagtgtaagcattaaggacattatgcttcttcgattctgaagacaggtccctgctcatggatgactctggcttccttaggaaaatatttttcttccaaaatcagtaggaaatctaaacttatcccctctttgcagatgtctagcagcttcagacatttggttaagaacccatgggaaaaaaaaaatccttgctaatgtggtttcctttgtaaaccaggattcttatttgtgctgttatagaatatcagctctgaacgtgtggtaaagatttttgtgtttgaatataggagaaatcagtttgctgaaaagttagtcttaattatctattggccacgatgaaacagatttcaactgataaagagctggagaactccatgtactttggaatctcctccaagatagccagagtttaatacatcttcattctcaacactctccaaagaacttgacctaccttatgggttccatatttttcttcttaaatgtgcatcaatcatgccttgcccccaacctttaaatatattcttagacctggtaaatgcactcagacttgcgtctttaggaatttttaactttctttcactacattggcacttaaattttttctttataaagctttttgaaggtcataaacaaagaccataattgatgatagacctaatacatttcctctgtgtgtgtgtgtaacattccaaatactttttttttcttttccactgtttgtaaggtgcaacaatttaatatttttaagggactttttaagagttccttaagaaccaatttaaaattacttcagtgcaatcctacacagtatcaacattagaattttgatattagtcttatgttatcttccattctatttttatctgctttttgctgctagtttcaaactgccagtatttttccttttgcttttaaaatagttacaatatttttcatgatagccacagtattgccacagtttattataataaagggtttttatttgatttagcgcattcaaagcttttttctatcacttttgtgttcagaatataacctttgtgtgcgtgtatgttgtgtgtgtgcatgtgtggcgtatatgtgtgttacaggttaatgccttcttggaattgtgttaatgttctcttggtttattatgccatcagaatggtaaatgagaacactacaactgtagtcagctcacaatttttaaataaaggataccacagtgcatgctgtttgttcaatctttgcagacttctctttctttccatgctaccagttgtaaaggacacagctatatcctggaaatgaaaaacaaacactgtggtgcctagatgtgaagaactggcttatgtggttgtgttttgctatggaacagaatgatttaggaagttcttgtttatataggtagccgaatttacacatttagttcaaaatttctcttgagcatcagcttagtactatatcaatcattctagaaggatatcttatagagcaggtgtccccaacccccggtaagtagcctgttaggaaccaggtcacacataaggaggttagcagtgggcaagtgagcaaagcatcatctatatttacagccgatccccattgctcgcattaccgcctgagctctgcctcctgtcagatcagcggcagcatcaggttctctcaggaacgaactctattgtgaactgctcatgtgagggatctaggtttcacgctccttatgagaatctaacacctgatgatctgtcactgtctcccatcacccctagatgggacagtctagttgcaggaaaacaagctcagggcttccactgattctacattatgatgagttgtatacttattttatattataataaaatatattattacaatgtaataataatagaaataaaatgcacaatacatgtaatgtgcttgaataatcccaaaaccaccccctctcctggtccatggaaaaactgtcttccatgaaagtggtccctggtgccaaaaaggttagggaccactgttacagagtatcaggtcctcaagatgctaaaatctatatgacatttttaacatgtgacattatcatcatcatcatcatcatcatcactgatgatactatttaccagggcatggtttgaattggtgactttggtgcagttcattattggcagccaaatgctttatccataccttcatattgaagaatttgttatcaggaaactaccagtcctgctttacaggaagtctgttatcagatatcagatggcaagttccccatgtcttcagatgttcaaacaatattgtggatggtctagaaagagtttaagacatgctgttaaatgtagggctagataattctctgattctttgatgtagtctggaaagaaacaatccattgtccagttaataaatatttagtgttttcatttttaagacactcacaatccacaaatgtccctaacaatttattatttttaaagaaaatgactttttattccttgctagtgaaaaatgtacaatttatatgctgcactgagaaaaataacagatatactttcttccattcattttcatcccaaacatataaaaaataatccattgattgttccttgcattgcatatcttattaaaagatatttcctacatgcaactaataagacatgctgactgttgtcagctctaaatttatgtaaagattttttatttttgttaaaatgtttgaaatttgctttttgctccacacctcacctgtttttgataaatctgtgctaataagtacataggaggtaataaataattgagttgtgagaaacccaattctccatttttcaagaaaacacaagtagcactactctctttatcccttgggactccttcctgtaatttgaaagggggggctaatgttggtggcagttgttgctaaggatctctgcacagagttagggcttcactctcggcttcctggttagatggggccatgtgactagtcctagtcagtgagctgtgaccagaagtgatgtatgtaccctcgggaccagagcatttatgtgctggtacaagcctctccataatgacgggcaacacatgagatggtggctgctgcagccatctgggtctctagccaacccaaaatggggacataacacaagcaagaaataaacatttgttcttataaatcaccaagattttggggttctcagtggctgcaacataacctagactatcctgatacaggcttatcaccatgttctggatgtgtggtgaccaggatggtagccactactcacaagtggctatttaaatttaagttactttaaaaaataaaataaaaaattcagttcctcagttgtatgagttacatttcaaatgctcgacagtcacatgtacatcacttttcaaattatgtgaaattaaaactgaaaagcttgtgtgaaagtctagagagtatggtctatagtttcatcaattgtattggataatatagtctcgatactcaa

SEQ ID NO: 156800 - DNA, 5901 bp, Homo sapiens
  Payload ID: 10735
  Gene Symbol: MYLK
  Gene Name: myosin light chain kinase
  ENST ID: ENST00000464489
  CDS Start-End: 289-501
cagcagggcgctgagcgagctcggagcccgcgctgtgcgcctgcggccggggcgccccgccgagcgccggtgccccggctcccgggccgccttcgccgcgcgggaaggattcttcaaaattaacagaaaccaattcgggccagctgaagagaaaaaataaaggtggctcccggctgcctctgctgcagttcagagcaacttcaggagcttcccagccgagagcttcaggacgcctttcctgtcccactggcccagttgccacaacaaacaacagagaagacggtgaccatgggggatgtgaagctggttgcctcgtcacacatttccaaaacctccctcagtgtggatccctcaagagttgactccatgcccctgacagaggcccctgctttcattttgccccctcggaacctctgcatcaaagaaggagccaccgccaagttcgaagggcgggaagttttgcgaagcagcttggtcagcctgttgtttccaaaaccttaggggatagattttcagctccagcagtggagacccgtcctagcatctggggggagtgcccaccaaagtttgctaccaagctgggccgagttgtggtcaaagaaggacagatgggacgattctcctgcaagatcactggccggccccaaccgcaggtcacctggctcaagggaaatgttccactgcagccgagtgcccgtgtgtctgtgtctgagaagaacggcatgcaggttctggaaatccatggagtcaaccaagatgacgtgggagtgtacacgtgcctggtggtgaacgggtcggggaaggcctcgatgtcagctgaactttccatccaaggtttggacagtgccaataggtcatttgtgagagaaacaaaagccaccaattcagatgtcaggaaagaggtgaccaatgtaatctcaaaggagtcgaagctggacagtctggaggctgcagccaaaagcaagaactgctccagcccccagagaggtggctccccaccctgggctgcaaacagccagcctcagcccccaagggagtccaagctggagtcatgcaaggactcgcccagaacggccccgcagaccccggtccttcagaagacttccagctccatcaccctgcaggccgcaagagttcagccggaaccaagagcaccaggcctgggggtcctatcaccttctggagaagagaggaagaggccagctcctccccgtccagccaccttccccaccaggcagcctggcctggggagccaagatgttgtgagcaaggctgctaacaggagaatccccatggagggccagagggattcagcattccccaaatttgagagcaagccccaaagccaggaggtcaaggaaaatcaaactgtcaagttcagatgtgaagtttccgggattccaaagcctgaagtggcctggttcctggaaggcacccccgtgaggagacaggaaggcagcattgaggtttatgaagatgctggctcccattacctctgcctgctgaaagcccggaccagggacagtgggacatacagctgcactgcttccaacgcccaaggccagctgtcctgtagctggaccctccaagtggaaaggcttgccgtgatggaggtggccccctccttctccagtgtcctgaaggactgcgctgttattgagggccaggattttgtgctgcagtgctccgtacgggggaccccagtgccccggatcacttggctgctgaatgggcagcccatccagtacgctcgctccacctgcgaggccggcgtggctgagctccacatccaggatgccctgccggaggaccatggcacctacacctgcctagctgagaatgccttggggcaggtgtcctgcagcgcctgggtcaccgtccatgaaaagaagagtagcaggaagagtgagtaccttctgcctgtggctcccagcaagcccactgcacccatcttcctgcagggcctctctgatctcaaagtcatggatggaagccaggtcactatgactgtccaagtgtcagggaatccaccccctgaagtcatctggctgcacaatgggaatgagatccaagagtcagaggacttccactttgaacagagaggaactcagcacagcctttgtatccaggaagtgttcccggaggacacgggcacgtacacctgcgaggcctggaacagcgctggagaggtccgcacccaggccgtgctcacggtacaagagcctcacgatggcacccagccctggttcatcagtaagcctcgctcagtgacagcctccctgggccagagtgtcctcatctcctgcgccatagctggtgacccctttcctaccgtgcactggctcagagatggcaaagccctctgcaaagacactggccacttcgaggtgcttcagaatgaggacgtgttcaccctggttctaaagaaggtgcagccctggcatgccggccagtatgagatcctgctcaagaaccgggttggcgaatgcagttgccaggtgtcactgatgctacagaacagctctgccagagcccttccacgggggagggagcctgccagctgcgaggacctctgtggtggaggagttggtgctgatggtggtggtagtgaccgctatgggtccctgaggcctggctggccagcaagagggcagggttggctagaggaggaagacggcgaggacgtgcgaggggtgctgaagaggcgcgtggagacgaggcagcacactgaggaggcgatccgccagcaggaggtggagcagctggacttccgagacctcctggggaagaaggtgagtacaaagaccctatcggaagacgacctgaaggagatcccagccgagcagatggatttccgtgccaacctgcagcggcaagtgaagccaaagactgtgtctgaggaagagaggaaggtgcacagcccccagcaggtcgattttcgctctgtcctggccaagaaggggacttccaagacccccgtgcctgagaaggtgccaccgccaaaacctgccaccccggattttcgctcagtgctgggtggcaagaagaaattaccagcagagaatggcagcagcagtgccgagaccctgaatgccaaggcagtggagagttccaagcccctgagcaatgcacagccttcagggcccttgaaacccgtgggcaacgccaagcctgctgagaccctgaagccaatgggcaacgccaagcctgccgagaccctgaagcccatgggcaatgccaagcctgatgagaacctgaaatccgctagcaaagaagaactcaagaaagacgttaagaatgatgtgaactgcaagagaggccatgcagggaccacagataatgaaaagagatcagagagccaggggacagccccagccttcaagcagaagctgcaagatgttcatgtggcagagggcaagaagctgctgctccagtgccaggtgtcttctgaccccccagccaccatcatctggacgctgaacggaaagaccctcaagaccaccaagttcatcatcctctcccaggaaggctcactctgctccgtctccatcgagaaggcactgcctgaggacagaggcttatacaagtgtgtagccaagaatgacgctggccaggcggagtgctcctgccaagtcaccgtggatgatgctccagccagtgagaacaccaaggccccagagatgaaatcccggaggcccaagagctctcttcctcccgtgctaggaactgagagtgatgcgactgtgaaaaagaaacctgcccccaagacacctccgaaggcagcaatgccccctcagatcatccagttccctgaggaccagaaggtacgcgcaggagagtcagtggagctgtttggcaaagtgacaggcactcagcccatcacctgtacctggatgaagttccgaaagcagatccaggaaagcgagcacatgaaggtggagaacagcgagaatggcagcaagctcaccatcctggccgcgcgccaggagcactgcggctgctacacactgctggtggagaacaagctgggcagcaggcaggcccaggtcaacctcactgtcgtggataagccagaccccccagctggcacaccttgtgcctctgacattcggagctcctcactgaccctgtcctggtatggctcctcatatgatgggggcagtgctgtacagtcctacagcatcgagatctgggactcagccaacaagacgtggaaggaactagccacatgccgcagcacctctttcaacgtccaggacctgctgcctgaccacgaatataagttccgtgtacgtgcaatcaacgtgtatggaaccagtgagccaagccaggagtctgaactcacaacggtaggagagaaacctgaagagccgaaggatgaagtggaggtgtcagatgatgatgagaaggagcccgaggttgattaccggacagtgacaatcaatactgaacaaaaagtatctgacttctacgacattgaggagagattaggatctgggaaatttggacaggtctttcgacttgtagaaaagaaaactcgaaaagtctgggcagggaagttcttcaaggcatattcagcaaaagagaaagagaatatccggcaggagattagcatcatgaactgcctccaccaccctaagctggtccagtgtgtggatgcctttgaagaaaaggccaacatcgtcatggtcctggagatcgtgtcaggaggggagctgtttgagcgcatcattgacgaggactttgagctgacggagcgtgagtgcatcaagtacatgcggcagatctcggagggagtggagtacatccacaagcagggcatcgtgcacctggacctcaagccggagaacatcatgtgtgtcaacaagacgggcaccaggatcaagctcatcgactttggtctggccaggaggctggagaatgcggggtctctgaaggtcctctttggcaccccagaatttgtggctcctgaagtgatcaactatgagcccatcggctacgccacagacatgtggagcatcggggtcatctgctacatcctagtcagtggcctttcccccttcatgggagacaacgataacgaaaccttggccaacgttacctcagccacctgggacttcgacgacgaggcattcgatgagatctccgacgatgccaaggatttcatcagcaatctgctgaagaaagatatgaaaaaccgcctggactgcacgcagtgccttcagcatccatggctaatgaaagataccaagaacatggaggccaagaaactctccaaggaccggatgaagaagtacatggcaagaaggaaatggcagaaaacgggcaatgctgtgagagccattggaagactgtcctctatggcaatgatctcagggctcagtggcaggaaatcctcaacagggtcaccaaccagcccgctcaatgcagaaaaactagaatctgaagaagatgtgtcccaagctttccttgaggctgttgctgaggaaaagcctcatgtaaaaccctatttctctaagaccattcgcgatttagaagttgtggagggaagtgctgctagatttgactgcaagattgaaggatacccagaccccgaggttgtctggttcaaagatgaccagtcaatcagggagtcccgccacttccagatagactacgatgaggacgggaactgctctttaattattagtgatgtttgcggggatgacgatgccaagtacacctgcaaggctgtcaacagtcttggagaagccacctgcacagcagagctcattgtggaaacgatggaggaaggtgaaggggaaggggaagaggaagaagagtgaaacaaagccagagaaaagcagtttctaagtcatattaaaaggactatttctctaaaactcaaaaaaaaaaaaaaaa

SEQ ID NO: 156801 - DNA, 5745 bp, Homo sapiens
  Payload ID: 10735
  Gene Symbol: MYLK
  Gene Name: myosin light chain kinase
  Uniprot ID: Q15746
  ENST ID: ENST00000475616
  CDS Start-End: 1-5745
atgggggatgtgaagctggttgcctcgtcacacatttccaaaacctccctcagtgtggatccctcaagagttgactccatgcccctgacagaggcccctgctttcattttgccccctcggaacctctgcatcaaagaaggagccaccgccaagttcgaagggcgggtccggggttacccagagccccaggtgacatggcacagaaacgggcaacccatcaccagcgggggccgcttcctgctggattgcggcatccgggggactttcagccttgtgattcatgctgtccatgaggaggacaggggaaagtatacctgtgaagccaccaatggcagtggtgctcgccaggtgacagtggagttgacagtagaaggaagttttgcgaagcagcttggtcagcctgttgtttccaaaaccttaggggatagattttcagctccagcagtggagacccgtcctagcatctggggggagtgcccaccaaagtttgctaccaagctgggccgagttgtggtcaaagaaggacagatgggacgattctcctgcaagatcactggccggccccaaccgcaggtcacctggctcaagggaaatgttccactgcagccgagtgcccgtgtgtctgtgtctgagaagaacggcatgcaggttctggaaatccatggagtcaaccaagatgacgtgggagtgtacacgtgcctggtggtgaacgggtcggggaaggcctcgatgtcagctgaactttccatccaaggtttggacagtgccaataggtcatttgtgagagaaacaaaagccaccaattcagatgtcaggaaagaggtgaccaatgtaatctcaaaggagtcgaagctggacagtctggaggctgcagccaaaagcaagaactgctccagcccccagagaggtggctccccaccctgggctgcaaacagccagcctcagcccccaagggagtccaagctggagtcatgcaaggactcgcccagaacggccccgcagaccccggtccttcagaagacttccagctccatcaccctgcaggccgcaagagttcagccggaaccaagagcaccaggcctgggggtcctatcaccttctggagaagagaggaagaggccagctcctccccgtccagccaccttccccaccaggcagcctggcctggggagccaagatgttgtgagcaaggctgctaacaggagaatccccatggagggccagagggattcagcattccccaaatttgagagcaagccccaaagccaggaggtcaaggaaaatcaaactgtcaagttcagatgtgaagtttccgggattccaaagcctgaagtggcctggttcctggaaggcacccccgtgaggagacaggaaggcagcattgaggtttatgaagatgctggctcccattacctctgcctgctgaaagcccggaccagggacagtgggacatacagctgcactgcttccaacgcccaaggccagctgtcctgtagctggaccctccaagtggaaaggcttgccgtgatggaggtggccccctccttctccagtgtcctgaaggactgcgctgttattgagggccaggattttgtgctgcagtgctccgtacgggggaccccagtgccccggatcacttggctgctgaatgggcagcccatccagtacgctcgctccacctgcgaggccggcgtggctgagctccacatccaggatgccctgccggaggaccatggcacctacacctgcctagctgagaatgccttggggcaggtgtcctgcagcgcctgggtcaccgtccatgaaaagaagagtagcaggaagagtgagtaccttctgcctgtggctcccagcaagcccactgcacccatcttcctgcagggcctctctgatctcaaagtcatggatggaagccaggtcactatgactgtccaagtgtcagggaatccaccccctgaagtcatctggctgcacaatgggaatgagatccaagagtcagaggacttccactttgaacagagaggaactcagcacagcctttgtatccaggaagtgttcccggaggacacgggcacgtacacctgcgaggcctggaacagcgctggagaggtccgcacccaggccgtgctcacggtacaagagcctcacgatggcacccagccctggttcatcagtaagcctcgctcagtgacagcctccctgggccagagtgtcctcatctcctgcgccatagctggtgacccctttcctaccgtgcactggctcagagatggcaaagccctctgcaaagacactggccacttcgaggtgcttcagaatgaggacgtgttcaccctggttctaaagaaggtgcagccctggcatgccggccagtatgagatcctgctcaagaaccgggttggcgaatgcagttgccaggtgtcactgatgctacagaacagctctgccagagcccttccacgggggagggagcctgccagctgcgaggacctctgtggtggaggagttggtgctgatggtggtggtagtgaccgctatgggtccctgaggcctggctggccagcaagagggcagggttggctagaggaggaagacggcgaggacgtgcgaggggtgctgaagaggcgcgtggagacgaggcagcacactgaggaggcgatccgccagcaggaggtggagcagctggacttccgagacctcctggggaagaaggtgagtacaaagaccctatcggaagacgacctgaaggagatcccagccgagcagatggatttccgtgccaacctgcagcggcaagtgaagccaaagactgtgtctgaggaagagaggaaggtgcacagcccccagcaggtcgattttcgctctgtcctggccaagaaggggacttccaagacccccgtgcctgagaaggtgccaccgccaaaacctgccaccccggattttcgctcagtgctgggtggcaagaagaaattaccagcagagaatggcagcagcagtgccgagaccctgaatgccaaggcagtggagagttccaagcccctgagcaatgcacagccttcagggcccttgaaacccgtgggcaacgccaagcctgctgagaccctgaagccaatgggcaacgccaagcctgccgagaccctgaagcccatgggcaatgccaagcctgatgagaacctgaaatccgctagcaaagaagaactcaagaaagacgttaagaatgatgtgaactgcaagagaggccatgcagggaccacagataatgaaaagagatcagagagccaggggacagccccagccttcaagcagaagctgcaagatgttcatgtggcagagggcaagaagctgctgctccagtgccaggtgtcttctgaccccccagccaccatcatctggacgctgaacggaaagaccctcaagaccaccaagttcatcatcctctcccaggaaggctcactctgctccgtctccatcgagaaggcactgcctgaggacagaggcttatacaagtgtgtagccaagaatgacgctggccaggcggagtgctcctgccaagtcaccgtggatgatgctccagccagtgagaacaccaaggccccagagatgaaatcccggaggcccaagagctctcttcctcccgtgctaggaactgagagtgatgcgactgtgaaaaagaaacctgcccccaagacacctccgaaggcagcaatgccccctcagatcatccagttccctgaggaccagaaggtacgcgcaggagagtcagtggagctgtttggcaaagtgacaggcactcagcccatcacctgtacctggatgaagttccgaaagcagatccaggaaagcgagcacatgaaggtggagaacagcgagaatggcagcaagctcaccatcctggccgcgcgccaggagcactgcggctgctacacactgctggtggagaacaagctgggcagcaggcaggcccaggtcaacctcactgtcgtggataagccagaccccccagctggcacaccttgtgcctctgacattcggagctcctcactgaccctgtcctggtatggctcctcatatgatgggggcagtgctgtacagtcctacagcatcgagatctgggactcagccaacaagacgtggaaggaactagccacatgccgcagcacctctttcaacgtccaggacctgctgcctgaccacgaatataagttccgtgtacgtgcaatcaacgtgtatggaaccagtgagccaagccaggagtctgaactcacaacggtaggagagaaacctgaagagccgaaggatgaagtggaggtgtcagatgatgatgagaaggagcccgaggttgattaccggacagtgacaatcaatactgaacaaaaagtatctgacttctacgacattgaggagagattaggatctgggaaatttggacaggtctttcgacttgtagaaaagaaaactcgaaaagtctgggcagggaagttcttcaaggcatattcagcaaaagagaaagagaatatccggcaggagattagcatcatgaactgcctccaccaccctaagctggtccagtgtgtggatgcctttgaagaaaaggccaacatcgtcatggtcctggagatcgtgtcaggaggggagctgtttgagcgcatcattgacgaggactttgagctgacggagcgtgagtgcatcaagtacatgcggcagatctcggagggagtggagtacatccacaagcagggcatcgtgcacctggacctcaagccggagaacatcatgtgtgtcaacaagacgggcaccaggatcaagctcatcgactttggtctggccaggaggctggagaatgcggggtctctgaaggtcctctttggcaccccagaatttgtggctcctgaagtgatcaactatgagcccatcggctacgccacagacatgtggagcatcggggtcatctgctacatcctagtcagtggcctttcccccttcatgggagacaacgataacgaaaccttggccaacgttacctcagccacctgggacttcgacgacgaggcattcgatgagatctccgacgatgccaaggatttcatcagcaatctgctgaagaaagatatgaaaaaccgcctggactgcacgcagtgccttcagcatccatggctaatgaaagataccaagaacatggaggccaagaaactctccaaggaccggatgaagaagtacatggcaagaaggaaatggcagaaaacgggcaatgctgtgagagccattggaagactgtcctctatggcaatgatctcagggctcagtggcaggaaatcctcaacagggtcaccaaccagcccgctcaatgcagaaaaactagaatctgaagaagatgtgtcccaagctttccttgaggctgttgctgaggaaaagcctcatgtaaaaccctatttctctaagaccattcgcgatttagaagttgtggagggaagtgctgctagatttgactgcaagattgaaggatacccagaccccgaggttgtctggttcaaagatgaccagtcaatcagggagtcccgccacttccagatagactacgatgaggacgggaactgctctttaattattagtgatgtttgcggggatgacgatgccaagtacacctgcaaggctgtcaacagtcttggagaagccacctgcacagcagagctcattgtggaaacgatggaggaaggtgaaggggaaggggaagaggaagaagagtga

SEQ ID NO: 156802 - DNA, 820 bp, Homo sapiens
  Payload ID: 10735
  Gene Symbol: MYLK
  Gene Name: myosin light chain kinase
  ENST ID: ENST00000508240
  CDS Start-End: 133-820
aacaaacaagtgtccgagctggcaggacgacccagcagggtcagccgtgaggaggagggagcagagcgaggtccgtgtgggagacttcctagaggagatgctccagccagtgagaacaccaaggccccagagatgaaatcccggaggcccaagagctctcttcctcccgtgctaggaactgagagtgatgcgactgtgaaaaagaaacctgcccccaagacacctccgaaggcagcaatgccccctcagatcatccagttccctgaggaccagaaggtacgcgcaggagagtcagtggagctgtttggcaaagtgacaggcactcagcccatcacctgtacctggatgaagttccgaaagcagatccaggaaagcgagcacatgaaggtggagaacagcgagaatggcagcaagctcaccatcctggccgcgcgccaggagcactgcggctgctacacactgctggtggagaacaagctgggcagcaggcaggcccaggtcaacctcactgtcgtggataagccagaccccccagctggcacaccttgtgcctctgacattcggagctcctcactgaccctgtcctggtatggctcctcatatgatgggggcagtgctgtacagtcctacagcatcgagatctgggactcagccaacaagacgtggaaggaactagccacatgccgcagcacctctttcaacgtccaggacctgctgcctgaccacgaatataagttccgtgtacgtgcaatcaacgtgtatggaaccagtgagccaagccaggagtctgaactcacaacggtaggagagaaacctgaag

SEQ ID NO: 156803 - DNA, 7282 bp, Homo sapiens
  Payload ID: 10735
  Gene Symbol: MYLK
  Gene Name: myosin light chain kinase
  Uniprot ID: Q15746
  ENST ID: ENST00000418370
  CDS Start-End: 5023-5487
catgaaaggatgtaacacgcaccaagatgtataaactatccggatagttctccatagccatgggtgtgtatggatagaacggacctggtcgcaaccagagttggatgtgattatgaggaaatgctcccaggtgcaggagtttgaattaggtgtggaacctcagtcagaatacagagaagaggactgcacaggtggaggagaaggcacagaggtgggagccggacccattccggctgggcttggctggacaggagcagagtcttttagctggatactcaagggacccaggggcattgagactttgcctgggtggcaaagaaaagggaaatcactgtgttggaggcaactggaacactggtcatttaccacaccaggtgactaaatcacagttgcctcagaaagtagagtgtcactcagaggttgaaagagggagcaaaggcgaatgggggccacaagtgtggagtttaagtgaccaccatcctgagcacatatcagctgtgctcctccaccatggaagtcagttcctggctacacccctcatgggaaggtgggtctccaggcctccctcaagtgcaaggtgagttgaaacatctgtagctgcttaccttttggtgccactaggatctgagtagcaaatattctttttaaaaatgtgggggaggatctacaaagtcaaagtcagctgtattaataatcctgtagccagcaggtctcaaagaaatatttctggaaaggatagggaagctgatgtcagggcggggcagtcctcagagcagtgagtctaagtggatattgcttggctgaggctataggttaaggggcagccttatcacctgggaacatctgcagatgaactaaagccaggaggatgcctaaacccaggggctaggagcagagaagagatgaggaaacaggagaggaggcaaagggaatttttcagttaaatcagtcagggaatcatagtggtgctgatttttttttttttttttaaagagacagggtctcatgctgtcacccaggctggagggcaatggtacaatcatagcttactgcagtctcaacctcgtgggctcaagcaatcttctcgactcggcctcctgagtagctgggactacaggcatatgccaccagaccggctaatatttttttttctcctttggtagaaacagggtctcactatgttgcctagactagtcttgaactcctggcctcaagcgatgctgctgcgttggctgcccgaagtgttgagtgcccagcctatgctgatattttaatcaatttttttttcttcttgtttacggcattattagccatagggttttctggaagggcgggggaagaaaagggtagaattcagagaatgaaccttaattttatattttagtatagatggcgacatttggaaatgatttttccacaaaattgcacacaaaagttgtccacaaaaattccattcaacaagtagtttccctgaagagtagcttccctggtaacagctctaaccatttcatgttacgttgctccctcaggaaaacgttttctgcattttaactgcaatcaccagggccttagctccccttggaatatgagggttccctcttgcagcagccaaggttctgtgcagtggggtggagtgggctgtgggcgggggcagagggagaggggaagatcaggctcaggtggcccagaactctctgcagctgtgccagagaaggcaccttcttgttattctggtgtggttttcataaaaagccctagaaggaatgaagtgacatgggaacaaatccctacaagcaaagctaggctgggtatagatgactaatcatattactcatcttggaatcaagttattccgaaagaaggtatattttaaatttatattaaaagaattttacaaagatatgttggaaaggtgtagcaatgggggcaggtaggttgagcagattaacagggtttccgcatgcacactggaagcaaaagactagacatcagaggcccttaggtagccatctttattttctgggaaccataaagaccccagcagtatggaccaagggcattaggggagaaaacactggactcagtatagcacggagtattcttggccatcccatttggatggtatgcactgctcaggggaaactgtagtcttggggctactggtatatatggggggctttgatgggtaaccagcttgctgtatgtatgtcagggaatgtcttagtattggtgccaaaagaccctaatcctgggaaactccacaagcctgcctgggcaagccaggatggctggccccacaagctctccaaggggcagggaatttgtgctgcatgaaggaggctggtgcagatactgctcaccagcgacacaggaacccagcctgggcaattgccctcaagcaagaaaaagggagaaattacaaaatcaaaacttggcgatcttgatgttccaaaaatttccaaaggtctttggtcagtaaagcaacaaccaattgtcagctcaaaggcataaaactggaagactagaacatactgatatattcatttctagttctgacaaataacttcctcggcaattttttttcacaaatcaattcccaaatatttttctatgttttagaaattatatgctggatatctccatcttttagaaaagttctccctatgtgagacatatttatttgttaatatatttactacttcctctgaaatactataactcttttgtttcctcattctgatagcttcattttagtcattttgttatgaaataaaatctggaagaaaaaagacatcgtctcgccacaccacacaggtgaagacagtcctcatcagtcccaatcctgatgtctggaattggggagcccatgggctcaaggcgggtgttccttgctacacatttatggatataaaccagagtcgttctgtagaggtctggaactgcaggaagattagaatcttctgctcccaggctactgaggcccagagaggggaactgacttgcacaaggtctcccagcaattagggttagagaactaacctgtcccttgttgggaatgaaccctctgggtttagaggctcctagcccaggacaaaccaatctgtgttggataaagggaatggagagcagagaagggccgagtctgagaatcgggttgattaggaagcaggctggtctgacattgactacgtagggagggctgccatggctggtaccacctcttacctgttcctgagggcagggtaacctcccatgggaagagctgggtctctctctctctacactttgtctagcacaacaaacaggttgaaccagtaacatctcccagaagagcatgaaaggttgccacgtggcctgagcctgcagaggcattctccgcagggccacacggtggttctgcgcacagttaagttgttcagttttcatctctcaccatcttcccctcctcatcacctccacctggggctgcgtggattctgttcagcgacccagcctcactgtggtggcagaggccagaaacatacccacaccatacagtgtgatgtgtgtgagaagggatggccaggggacagagcaaggtgaaatgtctgtccaaagtgcatgagagcagtctgcagcaaggatggcaggaggcatgacagtaaggtcatcccgctcactgcagtaggtctcctctttaaccatacacacacgcacacaattttctgtatgtttccttagcacccagaagttattcactttcaaaatgatcagtctttttactgaagcttactggctttccaactagtcctaaattgtgaggctttactgaagtacttgagcatgtgaagtgaactgaggaggaaaatggctttgccggcagagtttgagatgcaacgagtacaagccatttgcctatgaagaggctgtttcctccctctctcagggaggacaagtagccagtctgtggtgacatctgttgtctagatgcacagcttttcgatgcctaaaaaagatgctttgggtgcaggggtggaaagacttggttgtgccttagttttcttatcttagtcattcctgttaaccttagaaaaaaggtgaaaaacttactgaaagataagaaacaataagacacaattgtacattattagggatcctatgcttggtagaattttcgcaatgtaaataaattacatctcaagttctgatccttttcagcagaaattctttcctctcccaagtctagtcactgagaagcaaagtgccgttgccttttatttcttcaatgcttctttttggtgcctgaatgcacaccaaggaagagctcctctccagagcttcactgcatcatagacttgtgcaggggccagccagagtgtttctcaaaatcttttaagtctctgaattataaacagagctaaatgggaccttggagatcatcttgtccagccccctcctagagaaggagactgaagctcagagtggttaagtgacttgcccaaggtcaacaggatgctgtgttattattattatgattatttttgcatcaggacttgtgggatctgtagtaactattctcttggccaattataatcacatcactggcattgttttacgagaaatagccccgctaggcccagtcagcaataagtctttggagctgtctcagcctgcagttgctttatataaaccatcccttttatgggagttgaagcactgtatgaaaagggtttttgtctcatgttgaccttgtttagtcacattaacgcacacatcagttccaggccccattccattctctgaacatcttctgacacactgacagtgctgagcagagcaaggttgggttcgctcctctggcagaacctcggctctcaggaggtccttgttccagggaacagctgcttctctggggctgggctctactccctgcagcccctcgcactacccagctggaaccagggacaacgcctgagtccaaccctcgtgtctattttccagaaaacgggcaatgctgtgagagccattggaagactgtcctctatggcaatgatctcagggctcagtggcaggaaatcctcaacagggtcaccaaccagcccgctcaatgcagaaaaactagaatctgaagaagatgtgtcccaagctttccttgaggctgttgctgaggaaaagcctcatgtaaaaccctatttctctaagaccattcgcgatttagaagttgtggagggaagtgctgctagatttgactgcaagattgaaggatacccagaccccgaggttgtctggttcaaagatgaccagtcaatcagggagtcccgccacttccagatagactacgatgaggacgggaactgctctttaattattagtgatgtttgcggggatgacgatgccaagtacacctgcaaggctgtcaacagtcttggagaagccacctgcacagcagagctcattgtggaaacgatggaggaaggtgaaggggaaggggaagaggaagaagagtgaaacaaagccagagaaaagcagtttctaagtcatattaaaaggactatttctctaaaactcaaaaaaaaaaaaaaaactcaagatagtaaaagcacctagtgtgatagattatcggttaggtcatttgtgggttgattcttcagaaacagcagttgatacctagcagcgttattgatgggcattaatctatgttagttggcaccttaagatactagtgcagctagatttcatttagggaaatcaccagtaacttgactgaccaattgattttagagagaaagtaaccaaaccaaatatttatctgggcaaagtcataaattctccacttgaatgcgctcatgaaaaataaggccaaaacaagagttctgggccacagctcagcccagagggttcctggggatgggaggcctctctctccccaccccctgactctagagaactgggttttctcccagtactccagcaattcatttctgaaagcagttgagccactttattccaaagtacactgcagatgttcaaactctccatttctctttccccttccacctgccagttttgctgactctcaacttgtcatgagtgtaagcattaaggacattatgcttcttcgattctgaagacaggtccctgctcatggatgactctggcttccttaggaaaatatttttcttccaaaatcagtaggaaatctaaacttatcccctctttgcagatgtctagcagcttcagacatttggttaagaacccatgggaaaaaaaaaatccttgctaatgtggtttcctttgtaaaccaggattcttatttgtgctgttatagaatatcagctctgaacgtgtggtaaagatttttgtgtttgaatataggagaaatcagtttgctgaaaagttagtcttaattatctattggccacgatgaaacagatttcaactgataaagagctggagaactccatgtactttggaatctcctccaagatagccagagtttaatacatcttcattctcaacactctccaaagaacttgacctaccttatgggttccatatttttcttcttaaatgtgcatcaatcatgccttgcccccaacctttaaatatattcttagacctggtaaatgcactcagacttgcgtctttaggaatttttaactttctttcactacattggcacttaaattttttctttataaagctttttgaaggtcataaacaaagaccataattgatgatagacctaatacatttcctctgtgtgtgtgtgtaacattccaaatactttttttttcttttccactgtttgtaaggtgcaacaatttaatatttttaagggactttttaagagttccttaagaaccaatttaaaattacttcagtgcaatcctacacagtatcaacattagaattttgatattagtcttatgttatcttccattctatttttatctgctttttgctgctagtttcaaactgccagtatttttccttttgcttttaaaatagttacaatatttttcatgatagccacagtattgccacagtttattataataaagggtttttatttgatttagcgcattcaaagcttttttctatcacttttgtgttcagaatataacctttgtgtgcgtgtatgttgtgtgtgtgcatgtgtggcgtatatgtgtgttacaggttaatgccttcttggaattgtgttaatgttctcttggtttattatgccatcagaatggtaaatgagaacactacaactgtagtcagctcacaatttttaaataaaggataccacagtgca

SEQ ID NO: 156804 - DNA, 678 bp, Homo sapiens
  Payload ID: 10735
  Gene Symbol: MYLK
  Gene Name: myosin light chain kinase
  Uniprot ID: Q15746
  ENST ID: ENST00000583087
  CDS Start-End: 173-637
aagcactgtatgaaaagggtttttgtctcatgttgaccttgtttagtcacattaacgcacacatcagttccaggccccattccattctctgaacatcttctgacacactgacagtgctgagcagagcaagaaaacgggcaatgctgtgagagccattggaagactgtcctctatggcaatgatctcagggctcagtggcaggaaatcctcaacagggtcaccaaccagcccgctcaatgcagaaaaactagaatctgaagaagatgtgtcccaagctttccttgaggctgttgctgaggaaaagcctcatgtaaaaccctatttctctaagaccattcgcgatttagaagttgtggagggaagtgctgctagatttgactgcaagattgaaggatacccagaccccgaggttgtctggttcaaagatgaccagtcaatcagggagtcccgccacttccagatagactacgatgaggacgggaactgctctttaattattagtgatgtttgcggggatgacgatgccaagtacacctgcaaggctgtcaacagtcttggagaagccacctgcacagcagagctcattgtggaaacgatggaggaaggtgaaggggaaggggaagaggaagaagagtgaaacaaagccagagaaaagcagtttctaagtcatattaaaag

SEQ ID NO: 156805 - DNA, 1447 bp, Homo sapiens
  Payload ID: 10735
  Gene Symbol: MYLK
  Gene Name: myosin light chain kinase
  Uniprot ID: Q15746
  ENST ID: ENST00000578202
  CDS Start-End: 221-682
agtgctgagcagagcaaggttgggttcgctcctctggcagaacctcggctctcaggaggtccttgttccagggaacagctgcttctctggggctgggctctactccctgcagcccctcgcactacccagctggaaccagggacaacgcctgagtccaaccctcgtgtctattttccagaaaacgggcaatgctgtgagagccattggaagactgtcctctatggcaatgatctcagggctcagtggcaggaaatcctcaacagggtcaccaaccagcccgctcaatgcagaaaaactagaatctgaagatgtgtcccaagctttccttgaggctgttgctgaggaaaagcctcatgtaaaaccctatttctctaagaccattcgcgatttagaagttgtggagggaagtgctgctagatttgactgcaagattgaaggatacccagaccccgaggttgtctggttcaaagatgaccagtcaatcagggagtcccgccacttccagatagactacgatgaggacgggaactgctctttaattattagtgatgtttgcggggatgacgatgccaagtacacctgcaaggctgtcaacagtcttggagaagccacctgcacagcagagctcattgtggaaacgatggaggaaggtgaaggggaaggggaagaggaagaagagtgaaacaaagccagagaaaagcagtttctaagtcatattaaaaggactatttctctaaaactcaaaaaaaaaaaaaaaactcaagatagtaaaagcacctagtgtgatagattatcggttaggtcatttgtgggttgattcttcagaaacagcagttgatacctagcagcgttattgatgggcattaatctatgttagttggcaccttaagatactagtgcagctagatttcatttagggaaatcaccagtaacttgactgaccaattgattttagagagaaagtaaccaaaccaaatatttatctgggcaaagtcataaattctccacttgaatgcgctcatgaaaaataaggccaaaacaagagttctgggccacagctcagcccagagggttcctggggatgggaggcctctctctccccaccccctgactctagagaactgggttttctcccagtactccagcaattcatttctgaaagcagttgagccactttattccaaagtacactgcagatgttcaaactctccatttctctttccccttccacctgccagttttgctgactctcaacttgtcatgagtgtaagcattaaggacattatgcttcttcgattctgaagacaggtccctgctcatggatgactctggcttccttaggaaaatatttttcttccaaaatcagtaggaaatctaaacttatcccctctttgcagatgtctagcagcttcagacatttggttaagaacccatgggaaaaaaaaaa

SEQ ID NO: 156806 - DNA, 2787 bp, Homo sapiens
  Payload ID: 10736
  Gene Symbol: MYLK2
  Gene Name: myosin light chain kinase 2
  Uniprot ID: Q9H1R3
  ENST ID: ENST00000375985
  CDS Start-End: 105-1895
ctcctgagcagccgctgggagacagacggcaaccaggttgcccctctttgctccagctagaaagacttgagttagacaagcagcagcacacgcctccctacctcatggcgacagaaaatggagcagttgagctgggaattcagaacccatcaacagacaaggcacctaaaggtcccacaggtgaaagacccctggctgcagggaaagaccctggccccccagacccaaagaaagctccggatccacccaccctgaagaaagatgccaaagcccctgcctcagagaaaggggatggtaccctggcccaaccctcaactagcagccaaggccccaaaggagagggtgacaggggcggggggcccgcggagggcagtgctgggcccccggcagccctgccccagcagactgcgacacctgagaccagcgtcaagaagcccaaggctgagcagggagcctcaggcagccaggatcctggaaagcccagggtgggcaagaaggcagcagagggccaagcagcagccaggaggggctcacctgcctttctgcatagccccagctgtcctgccatcatctccagttctgagaagctgctggccaagaagcccccaagcgaggcatcagagctcacctttgaaggggtgcccatgacccacagccccacggatcccaggccagccaaggcagaagaaggaaagaacatcctggcagagagccagaaggaagtgggagagaaaaccccaggccaggctggccaggctaagatgcaaggggacacctcgagggggattgagttccaggctgttccctcagagaaatccgaggtggggcaggccctctgtctcacagccagggaggaggactgcttccagattttggatgattgcccgccacctccggcccccttccctcaccgcatggtggagctgaggaccgggaatgtcagcagtgaattcagtatgaactccaaggaggcgctcggaggtggcaagtttggggcagtctgtacctgcatggagaaagccacaggcctcaagctggcagccaaggtcatcaagaaacagactcccaaagacaaggaaatggtgttgctggagattgaggtcatgaaccagctgaaccaccgcaatctgatccagctgtatgcagccatcgagactccgcatgagatcgtcctgttcatggagtacatcgagggcggagagctcttcgagaggattgtggatgaggactaccatctgaccgaggtggacaccatggtgtttgtcaggcagatctgtgacgggatcctcttcatgcacaagatgagggttttgcacctggacctcaagccagagaacatcctgtgtgtcaacaccaccgggcatttggtgaagatcattgactttggcctggcacggaggtataaccccaacgagaagctgaaggtgaactttgggaccccagagttcctgtcacctgaggtggtgaattatgaccaaatctccgataagacagacatgtggagtatgggggtgatcacctacatgctgctgagcggcctctcccccttcctgggagatgatgacacagagaccctaaacaacgttctatctggcaactggtactttgatgaagagacctttgaggccgtatcagacgaggccaaagactttgtctccaacctcatcgtcaaggaccagagggcccggatgaacgctgcccagtgtctcgcccatccctggctcaacaacctggcggagaaagccaaacgctgtaaccgacgccttaagtcccagatcttgcttaagaaatacctcatgaagaggcgctggaagaaaaacttcattgctgtcagcgctgccaaccgcttcaagaagatcagcagctcgggggcactgatggctctgggggtctgagccctgggcgcagctgaagcctggacgcagccacacagtggccggggctgaagccacacagcccagaaggccagaaaaggcagccagatccccagggcagcctcgttaggacaaggctgtgccaggctgggaggctcggggctccccacgcccccatgcagtgaccgcttccccgatgtgagccgcctcggagtgtggcctggatccatcctgctagcacctccccagacagggctccagcctgtcggccacaccccagactccaggcccccgttgaagccgctcccggttccctccccagctcctcgtctttgaactgccgccgccgtggtgacccctgctttgccccactgggagagtccttagcctgggcctcctcctagctggagtgccatggctggggggtctcagcatgtagggcttctgtggttgtggatgggaggctcctggtggggcagaaaggctgcaacgctgattcctaaggcccagctgccagggaagacagagcaggctttgtgagagaggacctccatgcccccgccacctccccactccagcagataaggccgagcccacaccatctggcccaggctggcccccacccaccttccttgcgaccaccaacacacaggaactctgtgtgagagagagggcgcccagcccaggcctggtggagggggaggggagaagccaagggacacaggagaccacccccgagcttgcctcagggccaagccggcccaacccaaccactcggggcccccatcttgggggtcacccatggcctcagatgatggggtcagcaggcccaggagaattaggaaggccatggggcagcctccagtctgctctcagcttgtgccttgtaaataaatgtacaggttggatgtgg

SEQ ID NO: 156807 - DNA, 2956 bp, Homo sapiens
  Payload ID: 10736
  Gene Symbol: MYLK2
  Gene Name: myosin light chain kinase 2
  Uniprot ID: Q9H1R3
  ENST ID: ENST00000375994
  CDS Start-End: 274-2064
actgcccacacccctgcctccgcctctgcccacccggcccaatcccttacaactgcccaggactgctcctgagcagccgctgggagacagacggcaaccaggttgcccctctttgctccaggtacctctctcccctcagttagcaggcctcggcttcctgtctcactgcagccagacgagaggggaaattggacagcctgacacactccactcttgtttctgcagctagaaagacttgagttagacaagcagcagcacacgcctccctacctcatggcgacagaaaatggagcagttgagctgggaattcagaacccatcaacagacaaggcacctaaaggtcccacaggtgaaagacccctggctgcagggaaagaccctggccccccagacccaaagaaagctccggatccacccaccctgaagaaagatgccaaagcccctgcctcagagaaaggggatggtaccctggcccaaccctcaactagcagccaaggccccaaaggagagggtgacaggggcggggggcccgcggagggcagtgctgggcccccggcagccctgccccagcagactgcgacacctgagaccagcgtcaagaagcccaaggctgagcagggagcctcaggcagccaggatcctggaaagcccagggtgggcaagaaggcagcagagggccaagcagcagccaggaggggctcacctgcctttctgcatagccccagctgtcctgccatcatctccagttctgagaagctgctggccaagaagcccccaagcgaggcatcagagctcacctttgaaggggtgcccatgacccacagccccacggatcccaggccagccaaggcagaagaaggaaagaacatcctggcagagagccagaaggaagtgggagagaaaaccccaggccaggctggccaggctaagatgcaaggggacacctcgagggggattgagttccaggctgttccctcagagaaatccgaggtggggcaggccctctgtctcacagccagggaggaggactgcttccagattttggatgattgcccgccacctccggcccccttccctcaccgcatggtggagctgaggaccgggaatgtcagcagtgaattcagtatgaactccaaggaggcgctcggaggtggcaagtttggggcagtctgtacctgcatggagaaagccacaggcctcaagctggcagccaaggtcatcaagaaacagactcccaaagacaaggaaatggtgttgctggagattgaggtcatgaaccagctgaaccaccgcaatctgatccagctgtatgcagccatcgagactccgcatgagatcgtcctgttcatggagtacatcgagggcggagagctcttcgagaggattgtggatgaggactaccatctgaccgaggtggacaccatggtgtttgtcaggcagatctgtgacgggatcctcttcatgcacaagatgagggttttgcacctggacctcaagccagagaacatcctgtgtgtcaacaccaccgggcatttggtgaagatcattgactttggcctggcacggaggtataaccccaacgagaagctgaaggtgaactttgggaccccagagttcctgtcacctgaggtggtgaattatgaccaaatctccgataagacagacatgtggagtatgggggtgatcacctacatgctgctgagcggcctctcccccttcctgggagatgatgacacagagaccctaaacaacgttctatctggcaactggtactttgatgaagagacctttgaggccgtatcagacgaggccaaagactttgtctccaacctcatcgtcaaggaccagagggcccggatgaacgctgcccagtgtctcgcccatccctggctcaacaacctggcggagaaagccaaacgctgtaaccgacgccttaagtcccagatcttgcttaagaaatacctcatgaagaggcgctggaagaaaaacttcattgctgtcagcgctgccaaccgcttcaagaagatcagcagctcgggggcactgatggctctgggggtctgagccctgggcgcagctgaagcctggacgcagccacacagtggccggggctgaagccacacagcccagaaggccagaaaaggcagccagatccccagggcagcctcgttaggacaaggctgtgccaggctgggaggctcggggctccccacgcccccatgcagtgaccgcttccccgatgtgagccgcctcggagtgtggcctggatccatcctgctagcacctccccagacagggctccagcctgtcggccacaccccagactccaggcccccgttgaagccgctcccggttccctccccagctcctcgtctttgaactgccgccgccgtggtgacccctgctttgccccactgggagagtccttagcctgggcctcctcctagctggagtgccatggctggggggtctcagcatgtagggcttctgtggttgtggatgggaggctcctggtggggcagaaaggctgcaacgctgattcctaaggcccagctgccagggaagacagagcaggctttgtgagagaggacctccatgcccccgccacctccccactccagcagataaggccgagcccacaccatctggcccaggctggcccccacccaccttccttgcgaccaccaacacacaggaactctgtgtgagagagagggcgcccagcccaggcctggtggagggggaggggagaagccaagggacacaggagaccacccccgagcttgcctcagggccaagccggcccaacccaaccactcggggcccccatcttgggggtcacccatggcctcagatgatggggtcagcaggcccaggagaattaggaaggccatggggcagcctccagtctgctctcagcttgtgccttgtaaataaatgtacaggttggatgtgg

SEQ ID NO: 156808 - DNA, 6911 bp, Homo sapiens
  Payload ID: 10737
  Gene Symbol: MYLK3
  Gene Name: myosin light chain kinase 3
  Uniprot ID: Q32MK0
  ENST ID: ENST00000394809
  CDS Start-End: 117-2576
aggagtctgtcagctacggaggacaatgaccttgcagacaccaccgcctgagtgagaaccaggggtctgtgcctctcctcattccccgctcttgcccttgtcaagcctgcaccagcatgtcaggaacctccaaggagagtctggggcatggggggctgccagggttgggcaagacctgcttaacaaccatggacacaaagctgaacatgctgaacgagaaggtggaccagctcctgcacttccaagaagatgtcacagagaagttgcagagcatgtgccgagacatgggccacctggagcggggcctgcacaggctggaggcctcccgggcaccgggcccgggcggggctgatggggttccccacattgacacccaggctgggtggcccgaggtcctggagctggtgagggccatgcagcaggatgcggcccagcacggtgccaggctggaggccctcttcaggatggtggctgcggtggacagggccatcgctttggtgggggccacgttccagaaatcaaaggtggcggatttcctcatgcaggggcgtgtgccctggaggagaggcagcccaggtgacagccctgaggagaataaagagcgagtggaagaagagggaggaaaaccaaagcatgtgctgagcaccagtggggtgcagtctgatgccagggagcctggggaagagagccagaaggcggacgtgctggaggggacagcggagaggctgccccccatcagagcgtcagggctgggagctgaccccgcccaggcagtggtctcaccgggccagggagatggtgttcctggcccagcccaggcattccctggccacctgcccctgcccacaaaggtggaagccaaggctcctgagacacccagcgagaacctcaggactggcctggaattggctccagcacccggcagggtcaatgtggtctccccgagcctggaggttgcaccaggtgcaggacaaggagcatcgtccagcaggcctgaccctgagcccttagaggaaggcacgaggctgactccagggcctggccctcagtgcccagggcctccagggctgccagcccaggccagggcaacccacagtggtggagaaacacctccaaggatctccatccacatacaagagatggatactcctggggagatgctgatgacaggcaggggcagccttggacccaccctcaccacagaggctccagcagctgcccagccaggcaagcagggcccacctgggaccgggcgctgcctccaagcccctgggactgagcccggagaacagacccctgaaggagccagagagctctccccgctgcaggagagcagcagccccgggggagtgaaggcagaggaggagcaaagggctggggccgagcctggcacgagaccaagcttggccaggagtgacgacaatgaccacgaggttggggccctgggcctgcagcagggcaaaagcccaggggcgggaaaccctgagcctgagcaggactgtgcagccagggctccggtgagagctgaagcagtaaggaggatgcccccaggcgccgaggctggcagcgtggttctggatgacagtccggccccaccagctccttttgaacaccgggtagtgagcgtcaaggagacctccatctctgcgggttacgaggtgtgccagcacgaagtcttgggagggggtcggtttggccaggtccacaggtgcacagagaagtccacaggcctcccactggctgccaagatcatcaaagtgaagagcgccaaggaccgggaggacgtgaagaacgagatcaacatcatgaaccagctcagccacgtgaacctgatccagctctatgacgccttcgagagcaagcacagctgcacccttgtcatggagtacgtggacgggggtgagctcttcgaccggatcacagatgagaagtaccacctgactgagctggatgtggtcctgttcaccaggcagatctgtgagggtgtgcattacctgcaccagcactacatcctgcacctggacctcaagccggagaacatattgtgcgtcaatcagacaggacatcaaattaagatcattgactttgggctggccagaaggtacaagcctcgagagaagctgaaggtgaacttcggcactcctgagttcctggccccagaagtcgtcaattatgagtttgtctcattccccacagacatgtggagtgtgggagtcatcacctacatgctactcagtggcttgtccccatttctaggggaaacagatgcagagaccatgaatttcattgtaaactgtagctgggattttgatgctgacacctttgaagggctctcggaggaggccaaggactttgtttcccggttgctggtcaaagagaagagctgcagaatgagtgccacacagtgcctgaaacacgagtggctgaataatttgcctgccaaagcttcaagatccaaaactcgtctcaaatcccaactactgctgcagaaatacatagctcaaagaaaatggaagaaacatttctatgtggtgactgctgccaacaggttaaggaaatttccaacttctccctaatcttcaactctgctgctccaatgggtccagaaattactgaggccagtggtgaagtgaagagatgactcaaacatttaaataatttggctttttggtattattgattccacttattttgtaaaaatggttatggctgctgccttccttgtggatgaaaagtggctgtaaagaagcttcctaagaacgtttttttctgccttgtaagatcactacgtgtgaaatgctctgagtacctttcaaatatacctacttttggtggtaagtgtagggatgctttaggtaggtactttgcatctgtcgaatttaaattctaaactcacactgattaaggaactcagtagactactttgcaggggccatgttattcagtgttatctcctccagtacaaagaattcctagaattttgatttgctcaggtgtgagctgacattttattgtactaccccattcttgtgttaagccatgtggatttaggacagtgatcttcaaacttgctttaacttatgctcccttttgagaatcagcatcacttgaaatgtcaaaatatgtcaactctcatagccaaatcaaagaagtgatcattttgactgtgctttttaaatctccacacacctccacctctctcctaattctgcctgtcttaacccctctgtcttagttataaatttctggtcttgtaagtctggaagctgataggcaatttatgaaagagataagaatgtaatgaggttccgctttctgagaaacacagaaatgatacatcctgagacataaaggaaagctgctcttctgctgcctcaggctgtagcactctcaatgttgtcactctacacatacactttctatatacatgtacagttgacccttgaacagggtttgaattgcagtcaacttaaatgtggattttctttcacctttgtcacccctgagacagcaacaccatgctctcctcttcatcccactctgcagcctactcaacaggaagatgatgaagatgaacacctttatgatgatccactttcacttaatgaatagtaaacatatgttttcctccttatgattttagtaacttttctctagcttactttattgtaagaatacagtatataagctgggtgtggtggctcatgcccataatcccagcactttgggaggctgaggcaggcagatcacttgaggtcaggagttcaagaccagcctggccaacacagtgaaaccccatctctactaaaaatacaaaaattagtggggcgtggtggcggatgcctgtaatgtcagctactctggaggctgaggcaggagaactgcttgaacctgggaggtggagtttgcagtgagccaagattgcaccactgcactccagcctaggcaacagagcaagactccgtctcaaaaaaaaaaaaaaaaaagaatacagtatatgtatatatacacacacacaaacacacacacacacgaacacatatgtgtgtatgggtattaactgactgtttatattattgatagggcttccagtcaacattaggctattagtagttaagtttttggggagacaaaagttatactcagattttctactgcaagggggtaggcactcctaaccctcacattgttcaagggtccactgtacatttaaacacttttctatatgcattagagtagccctgtcatcccttcactgaaatcatactgttctcaacatggcaagcaactaacacttttttttttttttgagacagggtctcactctgttgcccaggctgcagtgcagtggtgtgatcttggctcactgtagcctccgcctcctgggctcaggcgatcatgagtacctgggaccataggtgcccgctactacacccagctaatttttgtatttttagtggagatagggttttgccatgttgcccaacctggtcttgagctcaagcgatccacctgccccagcctcccaaagtgctgggattataggtgtgagccaccacacccagcttcaactaacacatttacgaacttgtatacatgtatatttagatactttaccaacttgtaaaatggttaaaggagtactttattatgaaaaaatatacaatctttaaaatttccttacttctacatgatttttgtgctattcccatttttttcctcaggtgagcagctttagttttttattttttttgagagagtcttcctctgtcacccaggctggagtgcactggtgtgttcttggctcactgcaacctctgcctcccgggttcaagtgatcttgtgcctcagcctcccaggtagctgggattacaggcgtgtgctgccacgcccagctaatttttgtatttttggtagagatggggttttgccatgttggccaggctggtctcgaactcctgacctcagatgatccacctgtcttggcctcccaaagagctgggaatataggcatgagccactgtgcttggcctcaggtgagcagctttagtcaatgttgtgaattttagattttaattagacatgcaacagtttcactacctttcaggatttttgtcctgtaacagaggctcttgctttttgacagagaggtaggcaggtggagaggttatcctgctgctgcagttctcaagttgttaagtttcctctggaaggctaacccttgttgggaactaacagtttcaataccagcaagtctaggcctgctccaagttggtcagctgaagaatgaacatcagaagacacagctgctgaaagttgtcctttgatgagacagtgatagtgatttggtaaaatgtcttattttttaaatgtcagttatctttctttaaaaggttttttgagggcagcctccagaaggagctagagagtatattttatagttctattgtggttcataccctgttttcgacttaagattctggagaatgctatgaaacatctccccagaaaaagacagttaattaccatatctagagcagcactgcccaacaaaaatatagtacaggctatacacataattaaaacatttctagtagcttctctaacaaaacccattgaaagccaattttaataatttatataacttagtgtatcaaaaatatttcaatatgtaatcaacataaaattgagatactttaccagctactagggaggctgaggccagagaatcacttgaacccagggggtggaggttgcagtgagccaagatcacaccattgaactccagcctgggcaacaagagcaaaactccgtctcaaaaaaaaagagatattttatattctttttctcatactaagtctcaaaaatctggtatattttacacttaaaaacacatgtcaaggctaggcatggtggctcacatctgtaatcccagcactttgggaggccaaggtgggcagattgctggccaacatggtaaaaccccatctctaaaaatataaaaattagctgggcgtggtggcgcatacctgtaatcccagctacttgggaggctaaggcacaagaatcacttaaacaggaggcaggggttgcagtgagctgagatcacaccactgcactccagcctgggtggcagagcaaaactttgtccccacccctgacaaaaaacaaacaaacaaacaaaacaaaaaaaaacctgtcaattcagatgctaggttttcatcagacgtacttaatctgtatttagatttcttaaaacttactgtggaaaatgtatttacatactcaagttgtttgaaacataactcactgttttccaataactgaagtatccacttttacatgtattaaaattaaataaaattagaaattcagttctgcagttgcactagccacattttaagtgtttaatagccacacgtggttagtggcatctatattggacagggcagatctagagagaatcctgtatctaacaattttaatttttttccctttatgctgttattccttacctagagaaacaatttccctccaaagttcctttgaggggtctgtttaggccaggccaacacaagtgacctatgtggattttagcatcctttttttgaaatttgaggttttatgaagcttgagtttttctggatatttttagtaatttgctggtgtgtacttagctcaaatacttgattgcaactgtgttgggtcaactatttctaatgggacttttccatttgcatgtacagtcactggaaactgctgggcagagaaactctaaaaggtagttggggcacactttttccacctgtcagattggtgaagaattggtgaggctgtggggaaaatggcattctcccacttttgatggatatgtatccaaataaaagtcattcccatgctttctttcatcc

SEQ ID NO: 156809 - DNA, 1795 bp, Homo sapiens
  Payload ID: 10737
  Gene Symbol: MYLK3
  Gene Name: myosin light chain kinase 3
  Uniprot ID: Q32MK0
  ENST ID: ENST00000536476
  CDS Start-End: 321-1757
agagggccgaccagcagaggaagggagaccagagggcagcttgcacagatcttgtcttgggttataactgttgacaagccacttaactgcctccaggtttaagtttgtctgtgtataagatggaggtaacaatatttatacatctcactggagacttatgaaaacaagattttggacagatcccttgggacccatggatggaaagtgaataaagagcgagtggaagaagagggaggaaaaccaaagcatgtgctgagcaccagtggggtgcagtctgatgccagggagcctggggaaggatctccatccacatacaagagatggatactcctggggagatgctgatgacaggcaggggcagccttggacccaccctcaccacagaggctccagcagctgcccagccaggcaagcagggcccacctgggaccgggcgctgcctccaagcccctgggactgagcccggagaacagacccctgaaggagccagagagctctccccgctgcaggagagcagcagccccgggggagtgaaggcagaggaggagcaaagggctggggccgagcctggcacgagaccaagcttggccaggagtgacgacaatgaccacgaggttggggccctgggcctgcagcagggcaaaagcccaggggcgggaaaccctgagcctgagcaggactgtgcagccagggctccggtgagagctgaagcagtaaggaggatgcccccaggcgccgaggctggcagcgtggttctggatgacagtccggccccaccagctccttttgaacaccgggtagtgagcgtcaaggagacctccatctctgcgggttacgaggtgtgccagcacgaagtcttgggagggggtcggtttggccaggtccacaggtgcacagagaagtccacaggcctcccactggctgccaagatcatcaaagtgaagagcgccaaggaccgggaggacgtgaagaacgagatcaacatcatgaaccagctcagccacgtgaacctgatccagctctatgacgccttcgagagcaagcacagctgcacccttgtcatggagtacgtggacgggggtgagctcttcgaccggatcacagatgagaagtaccacctgactgagctggatgtggtcctgttcaccaggcagatctgtgagggtgtgcattacctgcaccagcactacatcctgcacctggacctcaagccggagaacatattgtgcgtcaatcagacaggacatcaaattaagatcattgactttgggctggccagaaggtacaagcctcgagagaagctgaaggtgaacttcggcactcctgagttcctggccccagaagtcgtcaattatgagtttgtctcattccccacagacatgtggagtgtgggagtcatcacctacatgctactcagtggcttgtccccatttctaggggaaacagatgcagagaccatgaatttcattgtaaactgtagctgggattttgatgctgacacctttgaagggctctcggaggaggccaaggactttgtttcccggttgctggtcaaagagaagagctgcagaatgagtgccacacagtgcctgaaacacgagtggctgaataatttgcctgccaaagcttcaagatccaaaactcgtctcaaatcccaactactgctgcagaaatacatagctcaaagaaaatggaagaaacatttctatgtggtgactgctgccaacaggttaaggaaatttccaacttctccctaatcttcaactctgctgctccaatgggtccagaaattact

SEQ ID NO: 156810 - DNA, 5806 bp, Homo sapiens
  Payload ID: 10738
  Gene Symbol: MYLK4
  Gene Name: myosin light chain kinase family, member 4
  Uniprot ID: Q86YV6
  ENST ID: ENST00000274643
  CDS Start-End: 344-1510
gatcaagagccatattaatttaaacaggggctgaaagtggcatttgagagagaagatacttcctctcgtagtggacacttgtcttttcagaagatttatacgactgagagtcaaaacttttaccagagactttcatagtcagtttgaattctgcaaaatttctctttatcttctggaatgtatgctctagacttggagtggctcaagctcttcgatgtgatcctatcaatgtcaagagaaagaagcactgaagagtcataattgtgtcctgatttataaatcggagacagagggagacgaaaaccacactccagaaagtagcttaatcggactcactactaagatgttaaaagtgaagaggctggaagaattcaacacgtgttataacagcaaccagctggagaaaatggccttttttcagtgcagggaagaggtggagaaagtgaagtgttttctggaaaaaaattctggggaccaggattcaagatctggacataatgaggcgaaggaggtgtggtcaaacgccgacctgacggaaaggatgcccgtcaaaagcaaaaggacatcagccctcgcagttgacatcccggctcctccggccccatttgatcatcgtattgtgacagccaagcaaggagcggtcaacagcttctatactgtgagcaagacagaaatcctaggaggagggcgtttcggccaggttcacaagtgtgaggagacggccacaggtctgaagctggcagccaaaatcatcaagaccagaggcatgaaggacaaggaggaggtgaagaacgagatcagcgtcatgaaccagctggaccacgcgaacctcatccagctgtacgatgccttcgagtctaagaacgacattgtcctggtcatggagtatgtggatggtggggagctgtttgaccgcatcatcgatgagagctacaatttgacggagcttgataccatcctgttcatgaagcagatatgtgaggggataaggcacatgcatcagatgtacattctccacttggacctgaagcctgagaatatcctgtgtgtgaatcgggatgctaagcaaataaaaattattgattttggattggccagaagatacaaacccagagagaagctgaaggtgaactttggaaccccagaatttctcgcccctgaagttgtgaactatgattttgtttcatttcccactgacatgtggagtgtgggggtcatcgcctatatgctacttagcggtttgtcgcctttcctgggtgacaatgatgctgagacgctgaacaacatcctggcctgcaggtgggacttagaggatgaagaatttcaggacatctcggaggaggccaaggagttcatctctaagcttctgattaaggagaagagttggcgaataagtgcaagcgaagctctcaagcacccctggttgtcagaccacaagctccactccagactcaatgcccagaagaagaagaatcgtggctctgatgcccaggactttgtgaccaaatagtctacaggaggcagccatttggaaggaaaactgctgtggttgctgctgcttcgagaaaattttttgaaaaatcagcagttctgatgccttgacccctgtgatgacctggtagtcttagcagggggagccctcgaccctgaatgtgaacttgaactggagtgcctctgctgcgctcagaggaacacccagcgctgcggtctggtctcagggcgcaaacacatccctgcacccggtggtggtgatgttgggaagatgtttccctgccatcttgagattttttacttttttaaaaaaattttttgatcttagtcactggggcagggggtgcattatgtctgccatttctcaaatgactacagctgtgacacttaagattgattggagattttaaaactggaggatgcatttagagggagaaagctacttccagccattagactatgcctttggaaggggcaattagatggccagaaagaattctgactcccatgcacccttggagacttagtttcacagactctgtcattttgatttggtctgtggtcacgtgactacaatggataaataatttgtttgctggaacagaagccgtctttgaattctccaacaagaggcatcagccactgtgtctttcatttattctgaattgtccccagcgtgcgttttcttccatgtagctgattctgtttttcacatctatactccctgcacccttctgactgacagttcatccccacaaaacacattggttttgagaggtgatgcaaaaagtatctgtttatggttggactttgaaattctgacctttgaaataatgtcaacagtcacaacaggtttcctcaagccccatttgtcaactaaaagagacggatctgcacctcctggagcaagatagcactgagctttcaacattgaagtgacttgggaaataacattcaagcttctgggtaaacacatacaaacagtggcaaagaccaagtacagtctctcgcctgtgctgtctcatgggactcaatggtggtgaagaaatctcaatcggacaccagaggtgggggcaactctgcaagctcacctgctggacgtgagaatgttggaacgttccagttggaaggttcctatgcctagcctgtgtgccatttcatggcagatatgtaagaaaggaaatggccctactgtagacagcttatggggcccagaaaggcactgggctttaaagagcgaaatgagtgtgtcatttccacatgaaggagaggcaaggaaaagccccacaaaattcctgttacccgctgaactccaagctcaccaaccagattcatgagctttctcacattttccatttccaaataactgttgtgttgaatcagctgtgttaatgcctttattctttgttttttttttttagacggagtctcgctctgtcacgaggctggagtgcagtggccccatctcggctcactgcaacctccgcctcccaggttcaagcgattctcctgcagcctcccgagtagctgggattacaggcgcacgccaccacgcacggctgatttttgcatttttagtagagatggggtttctccatgttggccagaatggtctcaattactgttgtcgcaatagcaatgaaaggcataagaattacttggtggcctcatgagggatggcagtttcactttgcatcagctttcccccattatctctcagatccacttaaggaatccttacagcatgccgtgaatgtgtgcaacatccttattctcatctttaaggtaaggaggaagtagagatagaaggaaatacgtgatttggtgaaggccacatgcgaattttgtggtcgtgttagttataaaactgactcctttccagcctttgctcttacattatgatgcgtttctttttctcctttggccttgcatttatccgaggttggtttcttatgttcctgtgatgtgactatgcttaagtgtttaatttagtttgcttaaaacacacacaccacacacacacacacacacaaaaccctgtgactggagtgttatattactatgctatctttagctgatgatattcattgagcctggaaaaatacaagccagtgcatgcattaatacttagttagaccgcagagagctggcattcactcaaatgctaaacaggacacaggggtctgatttgaagcccctcgtggcagggcgttttctgtcctgtggtgtgcattctctaccaaatcaagcaggagatcttttgcacgacgtgcaatttgcatccaccttcccttctgactcaggttggcagataaactgtccccagaccctgccacacatggaagagacagctcaggccaaatacaggcatgatttctttgccaagttaatgcactgatgaccctgcagtgagtgggtgtgatttttgttttgttttgaggtttagaaaggagactgtactttgaaaatggatcttgtttgattctgtagttaaatttccacatttggaatgggaaggcatctccatgccagcagggtgccttttatatgagtgctgagggtagtttgcattgcagagttcatgattacagtctagagttacttgaaatgggagattatcagtctagtgttcatcccgcccctgctccatgtccttgtgtggctgctccagcgagagctggtaactaggtagactgctgctctaatggggaaagggggctttgcaaagccgaggaatcaagccagatgcgagcatggactcagaaaagctgagtctggctagaccagggctatggagatcaatttttccaacaggtcattaggatttgggaggctgtatttctcctccaccctcttaatggatggtatggctttgctcactcactaggcagttcccactttctttagcaaatggaggaaattaagcaccgatgtagcacttcccactgcctggagagaaataaacctcgcaagttattaaggagaaggcatgcctcattggtaatttggaagacaccaacacttacccagaatctgttgctatttaaaaatcagggagaggagggcacatgtccccatttgctacattacaaactttggacgagactctcatctgaactaacttggggaaacaatttctaggttgaagctggtaacactcatgtctgttgagtgccataagtttgttttcagttatttcctctaacttgatattaatttgctttctttcctcaaaaatgtaagtaggcatgttgccattgttgtggcttgctttgatgtatgtttggaaagatgtgtgaatacttaatttttatccattttatggaaattagcttagcaatttttttttctcttttaagaatcaaaatatggatttgatactaggaacagaatctgctctttatttcattccttttttgtctcttctgcttcctctgcccctcccccagccacgcagcacgggtgccagtgtgcatgcgtgtgctgggggccaaatgacagaaccccggttgaaagtccgcttgtaaaagcacaagtgagaggcagcatcaggcccctggagggctgtggtcctcggactcggttctttcctgtcccctggccgtcctgtcatccctgtgtgctgcagcatcaccacggcctacttcccaatatccacaaagcttcgcctttgcttttgcactctcttttacatttttttacttctttcctttttcttaagttcggatccaagtttgtcttcttatccatcaccatgctccctgaaagcctttttgagattaagaaattttcttaccaggaggcaactttccgtctgtcctaaagggaagtgggtgctggatttattagatattgggttcctggattaagatgacttcctcacatagcttggagtctgcagtttctcagttagaagtgttctatatttctttttgctccattttagtgcgctgtgctttgtataagtggtctttctatgggcagtttcaccttccatgaaggcttataactcaaccactactacccattcagaagagcagaaagcatctgctgtgtgagcgttcatatgttacctaatgtgtattttgctgtcgtctcagctgatagatgtcagtgagtctttctgactaggtttattggtgttgataagaaattaaaaaaaggattcataacgtggtgattgtgtctatcatgtatattttaaatttctgaacgtactttcatttagctgtttttctttgctttctaaagatgtataacaatcatgtatatgtattatattgaagaataaacatggaccttatttatcttttga

SEQ ID NO: 156811 - DNA, 682 bp, Homo sapiens
  Payload ID: 10739
  Gene Symbol: MYLPF
  Gene Name: myosin light chain, phosphorylatable, fast skeletal muscle
  Uniprot ID: Q96A32
  ENST ID: ENST00000322861
  CDS Start-End: 82-591
aaccccagagggactgccccatgctgactccttgcttctttccagccggagccgctgccttgccccccggagactgaagacatggcacccaagagggccaagagaaggacagtagagggcggaagctccagcgtcttctccatgttcgaccagactcagatccaggagttcaaagaggccttcactgtgatcgaccagaaccgtgatggtattatagacaaggaggaccttcgggacaccttcgcagccatgggccgcctcaatgtgaagaatgaggagttggatgccatgatgaaggaagccagcggtcccatcaacttcaccgtcttcctgaccatgttcggggagaagctcaagggtgccgaccctgaggatgtgatcaccggagccttcaaggtcttggaccctgagggaaagggcaccatcaagaagaagttcctggaggagctgctgaccacgcagtgtgaccgcttctcccaggaggagatcaagaacatgtgggcggccttcccccccgacgtgggcggcaacgtcgactacaaaaacatctgctacgtcatcacgcacggcgacgccaaggaccaggagtaggggcacccgcgggcctccgctgcccgacgcttctgttcggcccgacctccaccccggctcccaataaaatttaactgatctttgtttctta

SEQ ID NO: 156812 - DNA, 602 bp, Homo sapiens
  Payload ID: 10739
  Gene Symbol: MYLPF
  Gene Name: myosin light chain, phosphorylatable, fast skeletal muscle
  ENST ID: ENST00000563718
  CDS Start-End: 247-602
atttaggcggtgacagacagcatccgcagtcaataggaagagctgaagaattctttaggtctcccaaaatggcctttgctcaggccatgccctccgcccagcacatctgctcctccacctgcacctgactccctggccctcgtgaagccactcccatactcctagacagggctgctgcgccctccacttctgggctcctgaccagctctgccggagccgctgccttgccccccggagactgaagacatggcacccaagagggccaagagaaggacagtagagggcggaagctccagcgtcttctccatgttcgaccagactcagatccaggagttcaaagaggccttcactgtgatcgaccagaaccgtgatggtattatagacaaggaggaccttcgggacaccttcgcagccatgggccgcctcaatgtgaagaatgaggagttggatgccatgatgaaggaagccagcggtcccatcaacttcaccgtcttcctgaccatgttcggggagaagctcaagggtgccgaccctgaggatgtgatcaccggagccttcaaggtcttggaccctgagggaaagggcaccatcaagaagaagtt

SEQ ID NO: 156813 - DNA, 623 bp, Homo sapiens
  Payload ID: 10739
  Gene Symbol: MYLPF
  Gene Name: myosin light chain, phosphorylatable, fast skeletal muscle
  ENST ID: ENST00000568749
  CDS Start-End: 219-623
ggtggctggggcctcagtgcccagaaaagaaaatgtcttagaggcctttgctcaggccatgccctccgcccagcacatctgctcctccacctgcacctgactccctggccctcgtgaagccactcccatactcctagacagggctgctgcgccctccacttctgggctcctgaccagctctgccggagccgctgccttgccccccggagactgaagacatggcacccaagagggccaagagaaggacagtagagggcggaagctccagcgtcttctccatgttcgaccagactcagatccaggagttcaaagaggccttcactgtgatcgaccagaaccgtgatggtattatagacaaggaggaccttcgggacaccttcgcagccatgggccgcctcaatgtgaagaatgaggagttggatgccatgatgaaggaagccagcggtcccatcaacttcaccgtcttcctgaccatgttcggggagaagctcaagggtgccgaccctgaggatgtgatcaccggagccttcaaggtcttggaccctgagggaaagggcaccatcaagaagaagttcctggaggagctgctgaccacgcagtgtgaccgcttctcccaggaggag

SEQ ID NO: 156814 - DNA, 604 bp, Homo sapiens
  Payload ID: 10739
  Gene Symbol: MYLPF
  Gene Name: myosin light chain, phosphorylatable, fast skeletal muscle
  ENST ID: ENST00000566955
  CDS Start-End: 1-600
gcacccaagagggccaagagaaggacagtagagggcggaagctccagcgtcttctccatgttcgaccagactcagatccaggagttcaaagaggccttcactgtgatcgaccagaaccgtgatggtattatagacaaggaggaccttcgggacaccttcgcagccatgggccgcctcaatgtgaagaatgaggagttggatgccatgatgaaggaagccagcggtcccatcaacttcaccgtcttcctgaccatgttcggggagaagctcaagggtgccgaccctgaggatgtgatcaccggagccttcaaggtcttggaccctgagggaaagggcaccatcaagaagaagttcctggaggagctgctgaccacgcagtgtgaccgcttctcccaggaggaggtgagtggggaccggggcggggccggagcagcaaaggggctggggccggggagactaagggcctgtgcgagacgcccctacgtctttccccagatcaagaacatgtgggcggccttcccccccgacgtgggcggcaacgtcgactacaaaaacatctgctacgtcatcacgcacggcgacgccaaggaccaggagtaggggc

SEQ ID NO: 156815 - DNA, 6050 bp, Homo sapiens
  Payload ID: 10740
  Gene Symbol: MPRIP
  Gene Name: myosin phosphatase Rho interacting protein
  ENST ID: ENST00000313485
  CDS Start-End: 1-5384
agcaagaggcagagctgggggagccggaccctgagcagaagaggagccgcgcacgggagcggaggcgagagggccgctccaagacctttgactgggctgagttccgtcccatccagcaggccctggctcaggagcgggtgggcggcgtggggcctgctgacacccacgagcccctgcgccctgaggcggagcctggggagctggagcgggagcgtgcacggaggcgggaggagcgccgcaagcgcttcgggatgctcgacgccacagacgggccaggcactgaggatgcagccctgcgcatggaggtggaccggagcccagggctgcctatgagcgacctcaaaacgcataacgtccacgtggagattgagcagcggtggcatcaggtggagaccacacctctccgggaagagaagcaggtgcccatcgcccccgtccacctgtcttctgaagatgggggtgaccggctctccacacacgagctgacctctctgctcgagaaggagctggagcagagccagaaggaggcctcagaccttctggagcagaaccggctcctgcaggaccagctgagggtggccctgggccgggagcagagcgcccgtgagggctacgtgctgcagactgaagtggccgcctccccatcgggtgcctggcagaggctccatagagtcaaccaagaccttcaaagtgagcttgaagcccagtgccagcgccaggagctgattacacaccagattcagaccctgaagcgtagctatggggaggccaaggacacgatccggcaccacgaggctgagatccggagccttcaggcacggctcagcaatgcggccgctgagctagccatcaaggagcaggcgctggccaagctcaagggcgacctgaagcgggagcagggccgggtccgcgagcagctggaggagcggcaacacagcgaggcggcgctgagcagccagctgagggctagcgagcagaagctcaagagtgctgaggccctgctgctggagaagacgcaggagctacggggcctggagacacagcaggcgctgcagcgggaccggcagaaggaggtccagaggctgcaggagcgcattgccgacctcagccagcaactgggcgccagtgagcaggcgcagcggctgatggaggagaagctgcagagaaactatgagctgctgctggagagctgtgagaaggagaagcaggcattgctgcagaacctaaaggaagtggaagacaaggccagcgcctatgaggaccagctgcagggtcaggcacagcaggtggagaccctgcagaaggagaagctgagcgccactttcgagggcagtgagcaggtgcaccagctggaggagcagctggaggcacgagaggccagcgtgcgcaggctcgcagagcacgtgcagagcctctgtgacgagcgggacctcctcagacagcggttccaggagctgacagagcgcgtggccacgtccgacgaggatgtggctgagctccgggaaaagctgaggagaagagaggctgacaaccagagcctggagcactcctaccagagggtctccagccagctgcagagcatgcacactctgctgagagagaaggaggaagagctggagcgcattaaggaagcacatgagaaggttctggagaagaaggagcaggacctcaatgaggctttggttaaaatggttgccttggggagcagcttagaggaaacagaaattaagctccaggcaaaagaagagattttaaggaaatttgcaagtgaatctccaaaggacatggaagagccacggagtacccctgaagagacagaaagggatggcactttgctcccaggccaaccagtccaagccactagggcacctctaggcctcccacacacaaggctcgaggatgaggacgaggacctgggggctcctccgggggaagagtacggtgatggcagccccagtagggaagacagcatggtgcccccaaagtcagtggaagtgcttgacagggagggccatcagcagggcacagccaaactcgaccaaggggcacctggtgttaaaaggcaaagaatccggttctccacaatccagtgccaaagatacattcaccccgaagggtctgagaagacctggaccagcagcacatcttccgacaccagccaggaccggtcaccctcggaagaaagcatgtcctcagagcctgcacccagtgtactgcctgcaactggcgactctgacacgtacctctccatcatccactccctggagaccaagctctacgtcacagaggaaaagctcaaagacgtgaccgtgaggctggagagccagcagggtcagagccgtgaggcactgctcgcactgcaccaccagtgggcgggcaccgaggcccagctgcgtgagcagctccgcgccagcctgctccaggttggcgcactggcctcccagctggagcaggagaggcaggagagggccaggagggttgaagggcatgttggagagcttggggacttccaggtcaagaatagtcaggccctgatgtgcctggaaaattgccgagaacaactgagatctctgcctagggccagccaggaggatgagcaggacgcacgcgcagcctccctggccagtgtggagagtgcactcgtcagcgccatccaagccctgcagcactggccggccccagcccatggcggggcccgtgcacagctggagacaggtggcaccgaggagaatgggaagcctgcctccctgcagcagtgctcccagtctgagttgacagagcaggagcaggtgaggcttctttctgaccagattgctctggaggcctcgctgatcagccagatagcagattccctgaagaacacaacatcagatgtctcccgaatgctccatgagatttcttggtcaggacagccaccgatggaatctgctggggcccccgtagacacctgggccaggaaggtcctagtggatggtgagttctggagccaggttgagtctctgaggaagcacttggggacactgggaggagaggcagtcggtgcctcaggagacgggcagcaaagcatcccacagggcctggcccccatcctggccaatgccacatgggtcagggcagagctcagctttgccacacagtcagtgagggagtcgttccaccgcaggctacagagcatccaggagaccctgcggggcacccagacggccctgcggcagcacaaatgcctgctgagggaaatcctgggagcctaccaaaccccagactttgaaagagtgatgcagcaggtcttggaagccctcaggcttccagcgggccatgaagatggtgttcagctgtcctgggacctgagccccttaggagaagtcctgggccgagactcagacagctctcaggagcccttcgatgtgtctgaccagagccctggggcctttgttgctattcaggaggagcttgcccagcagctgaaggagaaggccagcctcttagaggagatagcggctgccttaccatctctgccacctgtggaatcgctgagagattgccagaagcttctccaggtgtcccagagtctctcgtataacacttgtttgggaggcctcggtcagtattcttcattgttggttcaggatgccattattcaggcccaggtttgctatgcgtcctgcagaatccggctagaatatgagaaggagctccagctctgcaaggagtcctggcaaacccgggagccctcctgctcagagcaggcacaggcagcccgggccctgagggaggagtatgaggagcttctccgcaagcagaagagcgagtacctggatgtgatcgccattgttgaaagggagaatgcagagctcaaggccaaggccgcccagctagaccatcagcagcagtgtctggaggatgcagagagcaagcacagcatgagcatgttcaccctgcggggcaggtatgaggaggagattcggtgtgtggtggagcagctgaccaggaccgagagcacactgcaggctgagcgcagccgggtcctgagccagctggatgcctcggtcagagacaggcaggacatggagaggcatcatggtgagcagatacagaccctggaggacaggttccagctcaaggtccgggagctgcagacgatccacgaggaggagctgaggaccctgcaggagcactactcgcagagcctgaggtgccttcaggacaccctctgcctccaccaggggccacaccccaaggccctgccagcccctgcccccaactggcaggccacccagggagaggctgactccatgacggggctgagggagcgcatccaggagctggaggcccagatggatgtcatgcgggaggagctgggacacaaggacctggagggcgacgcggccacactgcgtgagaagtaccagagggacttggagagccttaaggccacgtgcgagcgagggtttgcagcaatggaagaaacgcaccagaagaagattgaagatctccagaggcagcaccagcgggagctagagaaacttcgagaagagaaagaccgcctcctagccgaggagacagcggccaccatctcagccatcgaagccatgaagaacgcccaccgggaggaaatggagcgggagctggagaagagccagcggtcccagatcagcagcgtcaactcggatgttgaggccctgcggcgccagtacctggaggagctgcagtcggtgcagcgggaactggaggtcctctcggagcagtactcgcagaagtgcctggagaatgcccatctggcccaggcgctggaggccgagcggcaggccctgcggcagtgccagcgtgagaaccaggagctcaatgcccacaaccaggagctgaacaaccgcctggctgcagagatcacacggttgcggacgctgctgactggggacggcggtggggaggccactgggtcaccccttgcacagggcaaggatgcctatgaactagaggtcttattgcgggtaaaggaatcggaaatacagtacctgaaacaggagattagctccctcaaggatgagctgcagacggcactgcgggacaagaagtacgcaagtgacaagtacaaagacatctacacagagctcagcatcgcgaaggctaaggctgactgtgacatcagcaggttgaaggagcagctcaaggctgcaacggaagcactgggggagaagtcccctgacagtgccacggtgtccggatatgatataatgaaatctaaaagcaaccctgacttcttgaagaaagacagatcctgtgtcacccggcaactcagaaacatcaggtccaagagtctgaaggaaggcctgacggtgcaagaacggttgaagctctttgaatccagggacttgaagaaagactaggtgtgtcccatccaagttgagcacgcgccttccccagcttgcagcagcacaccccaagcgctgcttttcacctgtacctttgttttattattattattattattgctgttgttgtcatcgttaactgtgggcatggaatgcgtgaggctggcttctgggttgtccacaccactctctgctgtgttgacttcctgttgtcttcatcaaagcttttttccgtggtattctaaaattaggccagcagtgggggctgggagggcatctgtgttagtcctttcctggctgtgacccgccacactcactgtcagtattaaggcccagcagcctgttgataagctaccctgtctcaccatgtgctggtgtggaaacggggcccagccagcacgcctcaaggtagatggaatccccactggtcagagaaaaagctatgcggacactccagcttggcctgggtcacagcactgactcctcacccgctagtctggctgttaagaggagaaagtgcactgccttccagcccaggaggaggacagcattttgtatttgttccactgatgcagcttagaaccacacccctgagagtcgtggcaaacctttcacaacctggaaaatgttgaaagcaaccattcctatttttgtttgttttttattaaatcttgcacaaaa

SEQ ID NO: 156816 - DNA, 3846 bp, Homo sapiens
  Payload ID: 10740
  Gene Symbol: MPRIP
  Gene Name: myosin phosphatase Rho interacting protein
  Uniprot ID: Q6WCQ1
  ENST ID: ENST00000341712
  CDS Start-End: 1-3078
atgtcggcagccaaggagaacccgtgcaggaaattccaggccaacatcttcaacaagagcaagtgtcagaactgcttcaagccccgcgagtcgcatctgctcaacgacgaggacctgacgcaggcaaaacccatttatggcggttggctgctcctggctccagatgggaccgactttgacaacccagtgcaccggtctcggaaatggcagcgacggttcttcatcctttacgagcacggcctcttgcgctacgccctggatgagatgcccacgacccttcctcagggcaccatcaacatgaaccagtgcacagatgtggtggatggggagggccgcacgggccagaagttctccctgtgtattctgacgcctgagaaggagcatttcatccgggcggagaccaaggagatcgtcagtgggtggctggagatgctcatggtctatccccggaccaacaagcagaatcagaagaagaaacggaaagtggagccccccacaccacaggagcctgggcctgccaaggtggctgttaccagcagcagcagcagcagcagcagcagcagcagcatccccagtgctgagaaagtccccaccaccaagtccacactctggcaggaagaaatgaggaccaaggaccagccagatggcagcagcctgagtccagctcagagtcccagccagagccagcctcctgctgccagctccctgcgggaacctgggctagagagcaaagaagaggagagcgccatgagtagcgaccgcatggactgtggccgcaaagtccgggtggagagcggctacttctctctggagaagaccaaacaggacttgaaggctgaagaacagcagctgcccccgccgctctcccctcccagccccagcacccccaaccacaggaggtcccaggtgattgaaaagtttgaggccttggacattgagaaggcagagcacatggagaccaatgcagtggggccctcaccatccagcgacacacgccagggccgcagcgagaagagggcgttccctaggaagcgggacttcaccaatgaagcccccccagctcctctcccagacgcctcggcttcccccctgtctccacaccgaagagccaagtcactggacaggaggtccacggagccctccgtgacgcccgacctgctgaatttcaagaaaggctggctgactaagcagtatgaggacggccagtggaagaaacactggtttgtcctcgccgatcaaagcctgagatactacagggattcagtggctgaggaggcagccgacttggatggagaaattgacttgtccgcatgttacgatgtcacagagtatccagttcagagaaactatggcttccagatacatacaaaggagggcgagtttaccctgtcggccatgacatctgggattcggcggaactggatccagaccatcatgaagcacgtgcacccgaccactgccccggatgtgaccagctcgttgccagaggaaaaaaacaagagcagctgctcttttgagacctgcccgaggcctactgagaagcaagaggcagagctgggggagccggaccctgagcagaagaggagccgcgcacgggagcggaggcgagagggccgctccaagacctttgactgggctgagttccgtcccatccagcaggccctggctcaggagcgggtgggcggcgtggggcctgctgacacccacgagcccctgcgccctgaggcggagcctggggagctggagcgggagcgtgcacggaggcgggaggagcgccgcaagcgcttcgggatgctcgacgccacagacgggccaggcactgaggatgcagccctgcgcatggaggtggaccggagcccagggctgcctatgagcgacctcaaaacgcataacgtccacgtggagattgagcagcggtggcatcaggtggagaccacacctctccgggaagagaagcaggtgcccatcgcccccgtccacctgtcttctgaagatgggggtgaccggctctccacacacgagctgacctctctgctcgagaaggagctggagcagagccagaaggaggcctcagaccttctggagcagaaccggctcctgcaggaccagctgagggtggccctgggccgggagcagagcgcccgtgagggctacgtgctgcaggccacgtgcgagcgagggtttgcagcaatggaagaaacgcaccagaagaagattgaagatctccagaggcagcaccagcgggagctagagaaacttcgagaagagaaagaccgcctcctagccgaggagacagcggccaccatctcagccatcgaagccatgaagaacgcccaccgggaggaaatggagcgggagctggagaagagccagcggtcccagatcagcagcgtcaactcggatgttgaggccctgcggcgccagtacctggaggagctgcagtcggtgcagcgggaactggaggtcctctcggagcagtactcgcagaagtgcctggagaatgcccatctggcccaggcgctggaggccgagcggcaggccctgcggcagtgccagcgtgagaaccaggagctcaatgcccacaaccaggagctgaacaaccgcctggctgcagagatcacacggttgcggacgctgctgactggggacggcggtggggaggccactgggtcaccccttgcacagggcaaggatgcctatgaactagaggtcttattgcgggtaaaggaatcggaaatacagtacctgaaacaggagattagctccctcaaggatgagctgcagacggcactgcgggacaagaagtacgcaagtgacaagtacaaagacatctacacagagctcagcatcgcgaaggctaaggctgactgtgacatcagcaggttgaaggagcagctcaaggctgcaacggaagcactgggggagaagtcccctgacagtgccacggtgtccggatatgatataatgaaatctaaaagcaaccctgacttcttgaagaaagacagatcctgtgtcacccggcaactcagaaacatcaggtccaagtccgtaattgagcaggtctcgtgggatacctgaaatgcacccgcttcccggcccatgcaggagagtctgaaggaaggcctgacggtgcaagaacggttgaagctctttgaatccagggacttgaagaaagactaggtgtgtcccatccaagttgagcacgcgccttccccagcttgcagcagcacaccccaagcgctgcttttcacctgtacctttgttttattattattattattattgctgttgttgtcatcgttaactgtgggcatggaatgcgtgaggctggcttctgggttgtccacaccactctctgctgtgttgacttcctgttgtcttcatcaaagcttttttccgtggtattctaaaattaggccagcagtgggggctgggagggcatctgtgttagtcctttcctggctgtgacccgccacactcactgtcagtattaaggcccagcagcctgttgataagctaccctgtctcaccatgtgctggtgtggaaacggggcccagccagcacgcctcaaggtagatggaatccccactggtcagagaaaaagctatgcggacactccagcttggcctgggtcacagcactgactcctcacccgctagtctggctgttaagaggagaaagtgcactgccttccagcccaggaggaggacagcattttgtatttgttccactgatgcagcttagaaccacacccctgagagtcgtggcaaacctttcacaacctggaaaatgttgaaagcaaccattcctatttttgtttgttttttattaaatcttgcacaaaa

SEQ ID NO: 156817 - DNA, 527 bp, Homo sapiens
  Payload ID: 10740
  Gene Symbol: MPRIP
  Gene Name: myosin phosphatase Rho interacting protein
  ENST ID: ENST00000395806
  CDS Start-End: 90-281
gcggccgcgctgagcccctagcccgccgggagcgccaggccggccaggcctgcgccgccgccgccgccgccgtcgccgccgcgccgaccatgtcggcagccaaggagaacccgtgcaggaaattccaggccaacatcttcaacaagagcaagtgtcagaactgcttcaagccccgcgagtcgcatctgctcaacgacgaggacctgacgcagcaaaacacccacccccttgaaatgaaacgtggagctcacatatatgatgcacgaatgttctcatgttgaaggacaggaagaggaatggcatcagctatgagaccaccctgacccccacccgctgccccatcctacacccgaggtggcccctgaagcatgacctccagggatcttcacagtttgaagagccgctgatatactctaatacttgcagtaatattttttaatagaatgcaatattggatgtacacaaaaggatacaagcagcatacatttacaatataaatctaaataataaaaatgaatgctcgtgaa

SEQ ID NO: 156818 - DNA, 10960 bp, Homo sapiens
  Payload ID: 10740
  Gene Symbol: MPRIP
  Gene Name: myosin phosphatase Rho interacting protein
  Uniprot ID: Q6WCQ1
  ENST ID: ENST00000395811
  CDS Start-End: 90-3206
gcggccgcgctgagcccctagcccgccgggagcgccaggccggccaggcctgcgccgccgccgccgccgccgtcgccgccgcgccgaccatgtcggcagccaaggagaacccgtgcaggaaattccaggccaacatcttcaacaagagcaagtgtcagaactgcttcaagccccgcgagtcgcatctgctcaacgacgaggacctgacgcaggcaaaacccatttatggcggttggctgctcctggctccagatgggaccgactttgacaacccagtgcaccggtctcggaaatggcagcgacggttcttcatcctttacgagcacggcctcttgcgctacgccctggatgagatgcccacgacccttcctcagggcaccatcaacatgaaccagtgcacagatgtggtggatggggagggccgcacgggccagaagttctccctgtgtattctgacgcctgagaaggagcatttcatccgggcggagaccaaggagatcgtcagtgggtggctggagatgctcatggtctatccccggaccaacaagcagaatcagaagaagaaacggaaagtggagccccccacaccacaggagcctgggcctgccaaggtggctgttaccagcagcagcagcagcagcagcagcagcagcagcatccccagtgctgagaaagtccccaccaccaagtccacactctggcaggaagaaatgaggaccaaggaccagccagatggcagcagcctgagtccagctcagagtcccagccagagccagcctcctgctgccagctccctgcgggaacctgggctagagagcaaagaagaggagagcgccatgagtagcgaccgcatggactgtggccgcaaagtccgggtggagagcggctacttctctctggagaagaccaaacaggacttgaaggctgaagaacagcagctgcccccgccgctctcccctcccagccccagcacccccaaccacaggaggtcccaggtgattgaaaagtttgaggccttggacattgagaaggcagagcacatggagaccaatgcagtggggccctcaccatccagcgacacacgccagggccgcagcgagaagagggcgttccctaggaagcgggacttcaccaatgaagcccccccagctcctctcccagacgcctcggcttcccccctgtctccacaccgaagagccaagtcactggacaggaggtccacggagccctccgtgacgcccgacctgctgaatttcaagaaaggctggctgactaagcagtatgaggacggccagtggaagaaacactggtttgtcctcgccgatcaaagcctgagatactacagggattcagtggctgaggaggcagccgacttggatggagaaattgacttgtccgcatgttacgatgtcacagagtatccagttcagagaaactatggcttccagatacatacaaaggagggcgagtttaccctgtcggccatgacatctgggattcggcggaactggatccagaccatcatgaagcacgtgcacccgaccactgccccggatgtgaccagctcgttgccagaggaaaaaaacaagagcagctgctcttttgagacctgcccgaggcctactgagaagcaagaggcagagctgggggagccggaccctgagcagaagaggagccgcgcacgggagcggaggcgagagggccgctccaagacctttgactgggctgagttccgtcccatccagcaggccctggctcaggagcgggtgggcggcgtggggcctgctgacacccacgagcccctgcgccctgaggcggagcctggggagctggagcgggagcgtgcacggaggcgggaggagcgccgcaagcgcttcgggatgctcgacgccacagacgggccaggcactgaggatgcagccctgcgcatggaggtggaccggagcccagggctgcctatgagcgacctcaaaacgcataacgtccacgtggagattgagcagcggtggcatcaggtggagaccacacctctccgggaagagaagcaggtgcccatcgcccccgtccacctgtcttctgaagatgggggtgaccggctctccacacacgagctgacctctctgctcgagaaggagctggagcagagccagaaggaggcctcagaccttctggagcagaaccggctcctgcaggaccagctgagggtggccctgggccgggagcagagcgcccgtgagggctacgtgctgcaggccacgtgcgagcgagggtttgcagcaatggaagaaacgcaccagaagaagattgaagatctccagaggcagcaccagcgggagctagagaaacttcgagaagagaaagaccgcctcctagccgaggagacagcggccaccatctcagccatcgaagccatgaagaacgcccaccgggaggaaatggagcgggagctggagaagagccagcggtcccagatcagcagcgtcaactcggatgttgaggccctgcggcgccagtacctggaggagctgcagtcggtgcagcgggaactggaggtcctctcggagcagtactcgcagaagtgcctggagaatgcccatctggcccaggcgctggaggccgagcggcaggccctgcggcagtgccagcgtgagaaccaggagctcaatgcccacaaccaggagctgaacaaccgcctggctgcagagatcacacggttgcggacgctgctgactggggacggcggtggggaggccactgggtcaccccttgcacagggcaaggatgcctatgaactagaggtcttattgcgggtaaaggaatcggaaatacagtacctgaaacaggagattagctccctcaaggatgagctgcagacggcactgcgggacaagaagtacgcaagtgacaagtacaaagacatctacacagagctcagcatcgcgaaggctaaggctgactgtgacatcagcaggttgaaggagcagctcaaggctgcaacggaagcactgggggagaagtcccctgacagtgccacggtgtccggatatgatataatgaaatctaaaagcaaccctgacttcttgaagaaagacagatcctgtgtcacccggcaactcagaaacatcaggtccaagagtctgaaggaaggcctgacggtgcaagaacggttgaagctctttgaatccagggacttgaagaaagactaggtgtgtcccatccaagttgagcacgcgccttccccagcttgcagcagcacaccccaagcgctgcttttcacctgtacctttgttttattattattattattattgctgttgttgtcatcgttaactgtgggcatggaatgcgtgaggctggcttctgggttgtccacaccactctctgctgtgttgacttcctgttgtcttcatcaaagcttttttccgtggtattctaaaattaggccagcagtgggggctgggagggcatctgtgttagtcctttcctggctgtgacccgccacactcactgtcagtattaaggcccagcagcctgttgataagctaccctgtctcaccatgtgctggtgtggaaacggggcccagccagcacgcctcaaggtagatggaatccccactggtcagagaaaaagctatgcggacactccagcttggcctgggtcacagcactgactcctcacccgctagtctggctgttaagaggagaaagtgcactgccttccagcccaggaggaggacagcattttgtatttgttccactgatgcagcttagaaccacacccctgagagtcgtggcaaacctttcacaacctggaaaatgttgaaagcaaccattcctatttttgtttgttttttattaaatcttgcacaaaatccccggcccctctccttccttccttccttccttcctccgctcgttcctttcttggtctccagtaaccctggtcttttcataactgctcgagattgttgacctgcagcccaggtttcagactctgattgcaaaaaacaaatgaattccccccaggaatcattcaaaatgggggaaggtttgggggtttgggttttttttttaccttttggaaaagaaaccgtcacattgctttggaaaaggttgagaggagacccctgttaagtcaagaagaaagtacagaggatgtcagaatctgatgagaacagcacattagtgtttattgagactccgatcttaactctcatttaattaatctgagctctgaaaacctatcttgcagcatttatctttaaaagagcctggttaaagtaaacctatactaacaattttgctttttctaacagtttgaggaagacctttttaaccaccacaaaacattctatggcaattcttgaaaatctcttaaattggagtctattatggccccatgaaaaccattaatcccattaagatagggagtataaacccctggctggtggaacaggttctgctactttaggagcaaggtggggtgtgagtagatggttttcatgccaagaacatgctttcactttgtattcatgcttgtgttggtgtgatggtctctgtgggtgggtggatgctttgggcgttgaaatctagaaatcctgttgctcagtttctagatgaagtcatgagcaaggccatcagtggagctctggccccgcccccaatgtgcagaagggccgggagcaaggcctggagttttcatgtgttttcagacccaggtttaggtgctctcttctcactgaaataactaagtgctctccactggcatcgagccctttccacaagtttttaaggctcttaacccacactttcactcctctgctactagtcttcagtgttgttaacagcaagagaaaattgggtttgtttaaaaatctacttctctgaggtggcacagttgcgtagctgtagtcccagctactcaggaggctgaggtagtaggattgcttgagcccgggaggtcgaggctgcaatcagtcatgatcgtgtcactgcactccagcctgggtgacaaagcaaggccccatatcagatatagatatacttatcagaccccccctgaccatttagattggcagtgctttgagaaatgcactatgacctttctgtgtcaatgggaatatacagaaggaacattcgggaccccgctgtcccccacagcctcattgttgtctccaggacactgctgggtcacacgaatgctccaggacagacagggacctggagtgcatcaggatctgaccagataggagtttttgcctcgtgtctgggtgctacgattttgtgccgttctctgaggtccaccacctgcccttcctggcatggtttccttcgtgaccatccctgctgcccctgggggtggaccccactggcccttctgcagacagctccctgccttctgccctccagggggttctggccagagtccatgcttggagacaggatcatctgccttcagccctcacagtgctttaaattaaagcaagtttgcccataggacaaaagagcatttgattcccttttttctgtcacatatcccttgaggctggacttcaggaatcctggaaaattaatatgagtgcagcatgtgaggggtcagagacaggccagcagggcgtctgcattcctccctgccacaggtctctccccagaggctggtttagtgtagggtattgccaggaaacggactgaggctgctttgctaagagctcctgaaaatgccctgggcctgtcctggcgtttctgaagagccctcatacagggacagccaccatctgggtcaaggaagtctgggttccctgctggtgggctccatcctgcgatggagtgaaccaggcgagaaaggatgacgatgttcttcatgttgcacctggacatgccccaggaacagagacttgcccaggtggcaacactggcacagatgttgacggctgcccaactggtgccacactgagcagggagccttgtgctgcacagggctgggccctctctccagtttccttcctgcaggcatccaaataccctggaagggatttaacccctgaattccagagggaagaaagaagaacagtgaagaagtagaactggtttctgtatggggagaggaaagtcttagggacagctgcaggcggggtctcaggctgctccttggcaccagctacacagtagtgagctttcccagctttaccgatgaggaagaagttcaaatagatagacttcagcattttaattattttcctataaatgtatttatgtgtagtatgctagcaccagccagtaagctgtgccacacatatgaatgggaaagcgaggcagttgtgctcgtgtgagtttctgcaggcttgtgggtaattaccttgtgtgcacgcctgcacgtgcagaatagtcactttctgctggtcagtttctttatccacccatggtgccccagccccaggcaggtgtggagaccagcatttcagaggacgcgctgtccacagcctcccgggtctgagtggatcattgggcaggggtggagacagtgcgctgccctctgagctggaagcctgtgcttcagggagtcataatgggcctgtgctaagtgggtgatgcagtggacatcccagggcgactagaggtggcagtatcgcgaatttgcaggtttattgaacaagaggtaacatcggagaggatcttgccttcggattcagcaagtatgaaggcagaagagcatggagagcaaggccccacagcctgcttagtgagttggaaggcccagcaagaacctgtttctgcagcagccaccagctcccatcaccccttgaccctccagctcatgctggagaagagggaattttggctgtttaaagaacacagttgtgaatctcagaatgtgcctgaaaggaatactgacagataaggccggaaacaaaactgatggcttgaaaaacatttttatggaatgtatttactatcattttgttttactatagaggtagatgggactcttaacttttgggtacatggaaacatgctgaaaactgaacacaatcctgatcatcactcctgcctggctgtctcctgggaggctgccgggtgccacggagctgggacacagcagagcccgctaggtgttgcagggccctggaggccaaggccaccctgtgtggggtccctgttggcagccaggtccctacacaaacaagtaatcctgtttggcctcctaggttttgcatatgacctgcagcctaatttggggtgtaggggaagctctgctggcccctgctcctttgtatgttgggtgactttaatggctggccacatacccctttctcccagctactcattcactgacttgggtaagttctaagacagttcgcacttagaaaagaatgtgacacatcaacattaacttttcctgaaaagaagagtttgcctaacatggtcctaaagaagcttggaatttataagactttcctttataagatatagtgggggtttttttgggtggaggggggttgttttttgttttttgttttcaagacagagtctcgctctgttgtccaggctggagtgtagtggcatgatctcggctcactgcaacctctgcctcccaggttcatgccattctcctgcctcagcctcccgagtagctgggactacaggtgtctgccgccacgcctggctaatttttttgtatttttagtagagacggggtttcaccatgttggtcaggatggtctcgatttcctgacctcgtgatccgcctgtctcggcctcccaaagtgctgggattacaggcgtgagccaccacgcctggcctataagatacggtaaaaaaaaaaaactgtgacccctttgtcactaagggagaaagaaattaagtattgtcaaagttctataaagaatggaaatgtatgatattatacttcaaaggaatttgatgttgaaattttaaagaaaatttgtcatgttgatgagaagcttcactttcctgggaacttcattcgttttagggcatgagataaaagtcctggctaggggagccataggtctgttgtacaaggaatttgctttctaaacaagttgtaacttgccctaaggtccctgttggagcactaagaggtgacacaggccagagacaacgtttcgtttccccttccctgcaagctgggatcagccctgtgttttctcctttcagctgaagtgagcgaaggttctcagtgctggcaaaagagcccactttctaaaaggacttgggaagaaagctgctgggaacttgcttattaaaaagttccttagaattaaggtatctacccactgttttcgcacctttcaccttcctgggctttcctgccctccagcattcttctctagagaggttcctagcccgctcagcgcgagcgtctccagtaggtaatagcagctgaacgtgggttttccacggacttcaggcttggaggtgccatatacaagcacacttcttccttcccctggcttctccatgccaccacccactttaaagatgtaaactcagtagatttttcatccagtgaacggtcatcttcacatcgaaaggtgaaggccaccactgttctcaatgccaagcaacagaacgttctgagatggccgttcttccttgcacagcagctacggcaggttgttctgcagccaccccttagagggggctcttcgttttacctttgtacagttcttgtgtttacacatttgggccaaacagctttcagcaagggcatgtgtccacagctgatgggcagttaagaaccagcctgagctgaaggctagtaataccgtgctgtaggctctttaaaaggaaagcctggcataaacccagcatggaaaggaacattatcagttatctcaaattttgtctgccagggacaagaccctgttcattcttttgcccttttcagaactgtgagcttcaagtattcttgcttctctgtaaagggaagacatctcccttctctgaaatccttcaacaaaagaaaaggctcttggcagggtaggggagtcagtagctcaacactagatcatccctagagatggggcaagtttctgtctgaacacgtcttgggtccgagtccttaggtgttcggatgcagtactttgtgaatacttaagctactgcatgcttggtgtagcttgcaatttctctgtatttaaaagcagctgtgtttattttcttcaaaataacctgtatattatttagagcaagcaatgtaaatattactgagaagttactgcagggatttttgtgacagagtttgtatgggtttttaaaaaaatcttagacacccctttttaagatggggagaacagggttgactgcaccgttgaagcccgcccagcattataaggaaatgtttttaatgactgctgcatctttgtaaaacgtttggtcatctaacagatggttttaaagtgtacaatatccaaaataacgatagccctgtatccatacattgtttcattgaaagaattctctattgcctcttcttggtagagccagagtccttaaggaaaatcaggaaaattaagaaaatgatggtgccatcttgaccagacttctgcacagtaatttaacgctatcctagggagacttggttgaaggcacagttctgggatcagggtctaaatgtgcagtttctgagaaccttcaagaccactcactgggcagggctctgtggagcactggagctgtttggattccccagccctttggtcatatcctggaattccgtggaggctgcagaacttagatgcagctgttttttacagcacctatttttgtcagattggtaaggaaacactgagtcacagaatacttaagaattggagactccagtaatgtaggatggcctgagaggacgtccaagtcccaaggggtggacacggcatgttcctcgggcacagcctcagtgggggccttccccaggcgcagctcggccacctgaggaaagggtgtttcggaggcgcagccacacacacagcgctggcagcctcacggtcacgcccatcactccctgccccccactgcccttgagaagttagtggtgtcacatccttagttttatagacagctaggaatagattgtgaagaacactcagttcactactgtgttacatttatatcacaagcttcaattaaaatggattttaaaggattttaggatttacctttagtattaacaacgtatctactgacatactgttaggattcaaaaccagttaagtataagaattacttcatgtggttttcctagggtacaatttataaaaggtagaaagcatccaagtggctcctcaacaattacaattcttaatgatttttctcacagctgtgcccttctgtcagggtcagtgtcaaaattcgttatcaaaggcaaaacctactgtgccaagctggggcgctatatgtgaacggagtggaaatgcttcagtcacctctgccgcagcttgtgattccagcagttctcacaaacgttctgtcacatgatgaaaagaagcagcttgtataattccaactggtgtttcatttctgttctaatgctaagtggtaacgcttaacaaacagactaaaagctgtgtgcagaagaaagggctgaatgagtaccgcctccctaggttccagcacagcgctcgggtctaagaagtagagccccggggtagggtgggccatccactgtcaggccagtgtctcaagaaagcctgaccagctgagctgctgctttttttttgggggggggggggggaggggcgtcttgaggctttttttttttttacaaagttagtttgtgatcaacgattcactacaattgaagtgttactttgtcagaatatttattcctttgtgtgacatgctagattccctggatgtagctgatcatttttattttgtaaatattacctaactttacataaactatatcataataaactatttttgcatcaccctttg

SEQ ID NO: 156819 - DNA, 914 bp, Homo sapiens
  Payload ID: 10740
  Gene Symbol: MPRIP
  Gene Name: myosin phosphatase Rho interacting protein
  ENST ID: ENST00000429184
  CDS Start-End: 1-832
cacgtgcgagcgagggtttgcagcaatggaagaaacgcaccagaagaagattgaagatctccagaggcagcaccagcgggagctagagaaacttcgagaagagaaagaccgcctcctagccgaggagacagcggccaccatctcagccatcgaagccatgaagaacgcccaccgggaggaaatggagcgggagctggagaagagccagcggtcccagatcagcagcgtcaactcggatgttgaggccctgcggcgccagtacctggaggagctgcagtcggtgcagcgggaactggaggtcctctcggagcagtactcgcagaagtgcctggagaatgcccatctggcccaggcgctggaggccgagcggcaggccctgcggcagtgccagcgtgagaaccaggagctcaatgcccacaaccaggtcttattgcgggtaaaggaatcggaaatacagtacctgaaacaggagattagctccctcaaggatgagctgcagacggcactgcgggacaagaagtacgcaagtgacaagtacaaagacatctacacagagctcagcatcgcgaaggctaaggctgactgtgacatcagcaggttgaaggagcagctcaaggctgcaacggaagcactgggggagaagtcccctgacagtgccacggtgtccggatatgatataatgaaatctaaaagcaaccctgacttcttgaagaaagacagatcctgtgtcacccggcaactcagaaacatcaggtccaagagtctgaaggaaggcctgacggtgcaagaacggttgaagctctttgaatccagggacttgaagaaagactaggtgtgtcccatccaagttgagcacgcgccttccccagcttgcagcagcacaccccaagcgctgcttttcacctgtacctttg

SEQ ID NO: 156820 - DNA, 4043 bp, Homo sapiens
  Payload ID: 10740
  Gene Symbol: MPRIP
  Gene Name: myosin phosphatase Rho interacting protein
  ENST ID: ENST00000414263
  CDS Start-End: 1-3275
tccggttctccacaatccagtgccaaagatacattcaccccgaagggtctgagaagacctggaccagcagcacatcttccgacaccagccaggaccggtcaccctcggaagaaagcatgtcctcagagcctgcacccagtgtactgcctgcaactggcgactctgacacgtacctctccatcatccactccctggagaccaagctctacgtcacagaggaaaagctcaaagacgtgaccgtgaggctggagagccagcagggtcagagccgtgaggcactgctcgcactgcaccaccagtgggcgggcaccgaggcccagctgcgtgagcagctccgcgccagcctgctccaggttggcgcactggcctcccagctggagcaggagaggcaggagagggccaggagggttgaagggcatgttggagagcttggggacttccaggtcaagaatagtcaggccctgatgtgcctggaaaattgccgagaacaactgagatctctgcctagggccagccaggaggatgagcaggacgcacgcgcagcctccctggccagtgtggagagtgcactcgtcagcgccatccaagccctgcagcactggccggccccagcccatggcggggcccgtgcacagctggagacaggtggcaccgaggagaatgggaagcctgcctccctgcagcagtgctcccagtctgagttgacagagcaggagcaggtgaggcttctttctgaccagattgctctggaggcctcgctgatcagccagatagcagattccctgaagaacacaacatcagatgtctcccgaatgctccatgagatttcttggtcaggacagccaccgatggaatctgctggggcccccgtagacacctgggccaggaaggtcctagtggatggtgagttctggagccaggttgagtctctgaggaagcacttggggacactgggaggagaggcagtcggtgcctcaggagacgggcagcaaagcatcccacagggcctggcccccatcctggccaatgccacatgggtcagggcagagctcagctttgccacacagtcagtgagggagtcgttccaccgcaggctacagagcatccaggagaccctgcggggcacccagacggccctgcggcagcacaaatgcctgctgagggaaatcctgggagcctaccaaaccccagactttgaaagagtgatgcagcaggtcttggaagccctcaggcttccagcgggccatgaagatggtgttcagctgtcctgggacctgagccccttaggagaagtcctgggccgagactcagacagctctcaggagcccttcgatgtgtctgaccagagccctggggcctttgttgctattcaggaggagcttgcccagcagctgaaggagaaggccagcctcttagaggagatagcggctgccttaccatctctgccacctgtggaatcgctgagagattgccagaagcttctccaggtgtcccagagtctctcgtataacacttgtttgggaggcctcggtcagtattcttcattgttggttcaggatgccattattcaggcccaggtttgctatgcgtcctgcagaatccggctagaatatgagaaggagctccagctctgcaaggagtcctggcaaacccgggagccctcctgctcagagcaggcacaggcagcccgggccctgagggaggagtatgaggagcttctccgcaagcagaagagcgagtacctggatgtgatcgccattgttgaaagggagaatgcagagctcaaggccaaggccgcccagctagaccatcagcagcagtgtctggaggatgcagagagcaagcacagcatgagcatgttcaccctgcggggcaggtatgaggaggagattcggtgtgtggtggagcagctgaccaggaccgagagcacactgcaggctgagcgcagccgggtcctgagccagctggatgcctcggtcagagacaggcaggacatggagaggcatcatggtgagcagatacagaccctggaggacaggttccagctcaaggtccgggagctgcagacgatccacgaggaggagctgaggaccctgcaggagcactactcgcagagcctgaggtgccttcaggacaccctctgcctccaccaggggccacaccccaaggccctgccagcccctgcccccaactggcaggccacccagggagaggctgactccatgacggggctgagggagcgcatccaggagctggaggcccagatggatgtcatgcgggaggagctgggacacaaggacctggagggcgacgcggccacactgcgtgagaagtaccagagggacttggagagccttaaggccacgtgcgagcgagggtttgcagcaatggaagaaacgcaccagaagaagattgaagatctccagaggcagcaccagcgggagctagagaaacttcgagaagagaaagaccgcctcctagccgaggagacagcggccaccatctcagccatcgaagccatgaagaacgcccaccgggaggaaatggagcgggagctggagaagagccagcggtcccagatcagcagcgtcaactcggatgttgaggccctgcggcgccagtacctggaggagctgcagtcggtgcagcgggaactggaggtcctctcggagcagtactcgcagaagtgcctggagaatgcccatctggcccaggcgctggaggccgagcggcaggccctgcggcagtgccagcgtgagaaccaggagctcaatgcccacaaccaggagctgaacaaccgcctggctgcagagatcacacggttgcggacgctgctgactggggacggcggtggggaggccactgggtcaccccttgcacagggcaaggatgcctatgaactagaggtcttattgcgggtaaaggaatcggaaatacagtacctgaaacaggagattagctccctcaaggatgagctgcagacggcactgcgggacaagaagtacgcaagtgacaagtacaaagacatctacacagagctcagcatcgcgaaggctaaggctgactgtgacatcagcaggttgaaggagcagctcaaggctgcaacggaagcactgggggagaagtcccctgacagtgccacggtgtccggatatgatataatgaaatctaaaagcaaccctgacttcttgaagaaagacagatcctgtgtcacccggcaactcagaaacatcaggtccaagtccgtaattgagcaggtctcgtgggatacctgaaatgcacccgcttcccggcccatgcaggagagtctgaaggaaggcctgacggtgcaagaacggttgaagctctttgaatccagggacttgaagaaagactaggtgtgtcccatccaagttgagcacgcgccttccccagcttgcagcagcacaccccaagcgctgcttttcacctgtacctttgttttattattattattattattgctgttgttgtcatcgttaactgtgggcatggaatgcgtgaggctggcttctgggttgtccacaccactctctgctgtgttgacttcctgttgtcttcatcaaagcttttttccgtggtattctaaaattaggccagcagtgggggctgggagggcatctgtgttagtcctttcctggctgtgacccgccacactcactgtcagtattaaggcccagcagcctgttgataagctaccctgtctcaccatgtgctggtgtggaaacggggcccagccagcacgcctcaaggtagatggaatccccactggtcagagaaaaagctatgcggacactccagcttggcctgggtcacagcactgactcctcacccgctagtctggctgttaagaggagaaagtgcactgccttccagcccaggaggaggacagcattttgtatttgttccactgatgcagcttagaaccacacccctgagagtcgtggcaaacctttcacaacctggaaaatgttgaaagcaaccattcctatttttgtttgttttttattaaatcttgcacaaaa

SEQ ID NO: 156821 - DNA, 513 bp, Homo sapiens
  Payload ID: 10740
  Gene Symbol: MPRIP
  Gene Name: myosin phosphatase Rho interacting protein
  ENST ID: ENST00000577514
  CDS Start-End: 95-513
gaccggagcctgagaggcgggccgcagcgggaagcagcgggcccgaggccgcgcctgcgccgccgccgccgccgccgtcgccgccgcgccgaccatgtcggcagccaaggagaacccgtgcaggaaattccaggccaacatcttcaacaagagcaagtgtcagaactgcttcaagccccgcgagtcgcatctgctcaacgacgaggacctgacgcaggcaaaacccatttatggcggttggctgctcctggctccagatgggaccgactttgacaacccagtgcaccggtctcggaaatggcagcgacggttcttcatcctttacgagcacggcctcttgcgctacgccctggatgagatgcccacgacccttcctcagggcaccatcaacatgaaccagtgcacagatgtggtggatggggagggccgcacgggccagaagttctccctgtgtattctgacgcctgagaaggagcatttcatccgggcggagaccaaggagatcgtcagtgg

SEQ ID NO: 156822 - DNA, 3195 bp, Homo sapiens
  Payload ID: 10740
  Gene Symbol: MPRIP
  Gene Name: myosin phosphatase Rho interacting protein
  ENST ID: ENST00000584067
  CDS Start-End: 1-2535
aagaagaaacggaaagtggagccccccacaccacaggagcctgggcctgccaaggtggctgttaccagcagcagcagcagcagcagcagcagcagcagcatccccagtgctgagaaagtccccaccaccaagtccacactctggcaggaagaaatgaggaccaaggaccagccagatggcagcagcctgagtccagctcagagtcccagccagagccagcctcctgctgccagctccctgcgggaacctgggctagagagcaaagaagaggagagcgccatgagtagcgaccgcatggactgtggccgcaaagtccgggtggagagcggctacttctctctggagaagaccaaacaggacttgaaggctgaagaacagcagctgcccccgccgctctcccctcccagccccagcacccccaaccacaggaggtcccaggtgattgaaaagtttgaggccttggacattgagaaggcagagcacatggagaccaatgcagtggggccctcaccatccagcgacacacgccagggccgcagcgagaagagggcgttccctaggaagcggcccgacctgctgaatttcaagaaaggctggctgactaagcagtatgaggacggccagtggaagaaacactggtttgtcctcgccgatcaaagcctgagatactacagggattcagtggctgaggaggcagccgacttggatggagaaattgacttgtccgcatgttacgatgtcacagagtatccagttcagagaaactatggcttccagatacatacaaaggagggcgagtttaccctgtcggccatgacatctgggattcggcggaactggatccagaccatcatgaagcacgtgcacccgaccactgccccggatgtgaccagctcgttgccagaggaaaaaaacaagagcagctgctcttttgagacctgcccgaggcctactgagaagcaagaggcagagctgggggagccggaccctgagcagaagaggagccgcgcacgggagcggaggcgagagggccgctccaagacctttgactgggctgagttccgtcccatccagcaggccctggctcaggagcgggtgggcggcgtggggcctgctgacacccacgagcccctgcgccctgaggcggagcctggggagctggagcgggagcgtgcacggaggcgggaggagcgccgcaagcgcttcgggatgctcgacgccacagacgggccaggcactgaggatgcagccctgcgcatggaggtggaccggagcccagggctgcctatgagcgacctcaaaacgcataacgtccacgtggagattgagcagcggtggcatcaggtggagaccacacctctccgggaagagaagcaggtgcccatcgcccccgtccacctgtcttctgaagatgggggtgaccggctctccacacacgagctgacctctctgctcgagaaggagctggagcagagccagaaggaggcctcagaccttctggagcagaaccggctcctgcaggaccagctgagggtggccctgggccgggagcagagcgcccgtgagggctacgtgctgcaggccacgtgcgagcgagggtttgcagcaatggaagaaacgcaccagaagaagattgaagatctccagaggcagcaccagcgggagctagagaaacttcgagaagagaaagaccgcctcctagccgaggagacagcggccaccatctcagccatcgaagccatgaagaacgcccaccgggaggaaatggagcgggagctggagaagagccagcggtcccagatcagcagcgtcaactcggatgttgaggccctgcggcgccagtacctggaggagctgcagtcggtgcagcgggaactggaggtcctctcggagcagtactcgcagaagtgcctggagaatgcccatctggcccaggcgctggaggccgagcggcaggccctgcggcagtgccagcgtgagaaccaggagctcaatgcccacaaccaggagctgaacaaccgcctggctgcagagatcacacggttgcggacgctgctgactggggacggcggtggggaggccactgggtcaccccttgcacagggcaaggatgcctatgaactagaggtcttattgcgggtaaaggaatcggaaatacagtacctgaaacaggagattagctccctcaaggatgagctgcagacggcactgcgggacaagaagtacgcaagtgacaagtacaaagacatctacacagagctcagcatcgcgaaggctaaggctgactgtgacatcagcaggttgaaggagcagctcaaggctgcaacggaagcactgggggagaagtcccctgacagtgccacggtgtccggatatgatataatgaaatctaaaagcaaccctgacttcttgaagaaagacagatcctgtgtcacccggcaactcagaaacatcaggtccaagagtctgaaggaaggcctgacggtgcaagaacggttgaagctctttgaatccagggacttgaagaaagactaggtgtgtcccatccaagttgagcacgcgccttccccagcttgcagcagcacaccccaagcgctgcttttcacctgtacctttgttttattattattattattattgctgttgttgtcatcgttaactgtgggcatggaatgcgtgaggctggcttctgggttgtccacaccactctctgctgtgttgacttcctgttgtcttcatcaaagcttttttccgtggtattctaaaattaggccagcagtgggggctgggagggcatctgtgttagtcctttcctggctgtgacccgccacactcactgtcagtattaaggcccagcagcctgttgataagctaccctgtctcaccatgtgctggtgtggaaacggggcccagccagcacgcctcaaggtagatggaatccccactggtcagagaaaaagctatgcggacactccagcttggcctgggtcacagcactgactcctcacccgctagtctggctgttaagaggagaaagtgcactgccttccagcccaggaggaggacagcattttgtatttgttccactgatgcagcttagaaccacacccctgagagtcgtggcaaacctttcacaacctggaaaatgttgaaagcaaccattcctatttttgtttgttttttattaaatcttgc

SEQ ID NO: 156823 - DNA, 844 bp, Homo sapiens
  Payload ID: 10740
  Gene Symbol: MPRIP
  Gene Name: myosin phosphatase Rho interacting protein
  ENST ID: ENST00000579361
  CDS Start-End: 1-178
cctaaaggactgctatctggatataatgaaatctaaaagcaaccctgacttcttgaagaaagacagatcctgtgtcacccggcaactcagaaacatcaggtccaagagtctgaaggaaggcctgacggtgcaagaacggttgaagctctttgaatccagggacttgaagaaagactaggtgtgtcccatccaagttgagcacgcgccttccccagcttgcagcagcacaccccaagcgctgcttttcacctgtacctttgttttattattattattattattgctgttgttgtcatcgttaactgtgggcatggaatgcgtgaggctggcttctgggttgtccacaccactctctgctgtgttgacttcctgttgtcttcatcaaagcttttttccgtggtattctaaaattaggccagcagtgggggctgggagggcatctgtgttagtcctttcctggctgtgacccgccacactcactgtcagtattaaggcccagcagcctgttgataagctaccctgtctcaccatgtgctggtgtggaaacggggcccagccagcacgcctcaaggtagatggaatccccactggtcagagaaaaagctatgcggacactccagcttggcctgggtcacagcactgactcctcacccgctagtctggctgttaagaggagaaagtgcactgccttccagcccaggaggaggacagcattttgtatttgttccactgatgcagcttagaaccacacccctgagagtcgtggcaaacctttcacaacctggaaaatgttgaaagcaaccattcctatttttgtttgttttttattaaatcttgcacaaaa

SEQ ID NO: 156824 - DNA, 751 bp, Homo sapiens
  Payload ID: 10740
  Gene Symbol: MPRIP
  Gene Name: myosin phosphatase Rho interacting protein
  ENST ID: ENST00000578209
  CDS Start-End: 1-544
ggccactgggtcaccccttgcacagggcaaggatgcctatgaactagaggtcttattgcgggtaaaggaatcggaaatacagtacctgaaacaggagattagctccctcaaggatgagctgcagacggcactgcgggacaagaagtacgcaagtgacaagtacaaagacatctacacagagctcagcatcgcgaaggctaaggctgactgtgacatcagcaggttgaaggagcagctcaaggctgcaacggaagcactgggggagaagtcccctgacagtgccacggtgtccggatatgatataatgaaatctaaaagcaaccctgacttcttgaagaaagacagatcctgtgtcacccggcaactcagaaacatcaggtccaagtgtacgacacctgttctacctgggaatgcaaaccctgagctgcaaataagaacacagacgtgggagacaccacggcctgaagctgctctcctcttccccgctctcctctcctccggtcccgtgatgggttacgctgagccagcaatgtgcacgcactaactccacaggtgttaaagacactttctgctgaaccatttgaaagcaagctgtagggccctcgacatggcagcacccaggagaataagggcatctccacagctgagaccatgactgcagccaggagtgcctggacggacgcatctgacatccagccgtgtgcacaagcccagggctgctgcctgcttgacggctgctgttctttggatc

SEQ ID NO: 156825 - DNA, 438 bp, Homo sapiens
  Payload ID: 10740
  Gene Symbol: MPRIP
  Gene Name: myosin phosphatase Rho interacting protein
  ENST ID: ENST00000579832
  CDS Start-End: 1-86
ggcggaactggatccagaccatcatgaagcacgtgcacccgaccactgccccggatgtgaccagctctttgaatccagggacttgaagaaagactaggtgtgtcccatccaagttgagcacgcgccttccccagcttgcagcagcacaccccaagcgctgcttttcacctgtacctttgttttattattattattattattgctgttgttgtcatcgttaactgtgggcatggaatgcgtgaggctggcttctgggttgtccacaccactctctgctgtgttgacttcctgttgtcttcatcaaagcttttttccgtggtattctaaaattaggccagcagtgggggctgggagggcatctgtgttagtcctttcctggctgtgacccgccacactcactgtcagtattaaggcccagcagcctgttgataagctacc

SEQ ID NO: 156826 - DNA, 309 bp, Homo sapiens
  Payload ID: 10740
  Gene Symbol: MPRIP
  Gene Name: myosin phosphatase Rho interacting protein
  ENST ID: ENST00000462033
  CDS Start-End: 1-286
caagaagtacgcaagtgacaagtacaaagacatctacacagagctcagcatcgcgaaggctaaggctgactgtgacatcagcaggttgaaggagcagctcaaggctgcaacggaagcactgggggagaagtcccctgacagtgccacggtgtccggatatgatataatgaaatctaaaagcaaccctgacttcttgaagaaagacagatcctgtgtcacccggcaactcagaaacatcaggtccaaggtgagtctggggtccagccccctggtgggaggggcttgagggacactggggagagtagccca

SEQ ID NO: 156827 - DNA, 2796 bp, Homo sapiens
  Payload ID: 10741
  Gene Symbol: MYLIP
  Gene Name: myosin regulatory light chain interacting protein
  ENST ID: ENST00000349606
  CDS Start-End: 505-1299
gcggccgcggggccccggacaagggtccgcagagctgcagccttcgagggccagccctctccgagtccggggctgggtcccaccagtgacaaggcggcagccccgcgcacaccaaagagaaggcggctgtggcggcagcggcagccccagccatgctgtgttatgtgacgaggccggacgcggtgctgatggaggtggaggtggaggcgaaagccaacggcgaggactgcctcaaccaggcatatctttttcttgcacatcaaggaggccctcttggcaggccacctcttgtgttccccagagcaggcagtggaactcagtgccctcctggcccagaccaagtttggagactacaaccagaacactgccaagtataactatgaggagctctgtgccaaggagctctcctctgccaccttgaacagcattgttgcaaaacataaggagttggaggggaccagccaggcttcagctgaataccaagttttgcagattgtgtcggcaatggaaaactatggcatagaatggcattctgtgcgggatagcgaagggcagaaactgctcattggggttggacctgaaggaatctcaatttgtaaagatgactttagcccaattaataggatagcttatcctgtggtgcagatggccacccagtcaggaaagaatgtatatttgacggtcaccaaggaatctgggaacagcatcgtgctcttgtttaaaatgatcagcaccagggcggccagcgggctctaccgagcgataacagagacgcacgcattctacaggtgtgacacagtgaccagcgccgtgatgatgcagtatagccgtgacttgaagggccacttggcatctctgtttctgaatgaaaacattaaccttggcaagaaatatgtctttgatattaaaagaacatcaaaggaggtgtatgaccatgccaggagggctctgtacaatgctggcgttgtggacctcgtttcaagaaacaaccagagcccttcacactcgcctctgaagtcctcagaaagcagcatgaactgcagcagctgcgagggcctcagctgccagcagacccgggtgctgcaggagaagctacgcaagctgaaggaagccatgctgtgcatggtgtgctgcgaggaggagatcaactccaccttctgtccctgtggccacactgtgtgctgtgagagctgcgccgcccagctacagtcatgtcccgtctgcaggtcgcgtgtggagcatgtccagcacgtctatctgccaacgcacaccagtcttctcaatctgactgtaatctaatctgttgtgcttttgttggacttggcatgtttccatgaactgcactattataaactattaaaatgatagattgtggagaaagtaattattccaacacccatctgccatgcgatgttaaaaaaaaaaaaaaggaagaaaaataacacagctactcctcactgcaaaaacatatccatgcgtagaatcaacaactccagtcatgggaccaggaggagctctgggacgcagacacattccttggatgttgattttttttatgatctagtaaaggaataggtaaagtctttgatgtcagtgaagtggcaacatagccaaaaagttgggtaccttttaggaaatgatgttgtaagtctccttaatgtatcctgaggtaagtttcctactggcagcagattttgtaagaattacttttaagaatttcattctttttgtatggtcatggagctccaaccatttttaataggaaagtcttttgtaaattgttgtcgttttaatgtcatttctgtctttataacttgatcaagaatgattggaaggcaaacaggtttacaaatcaattctgtgacttttaaaaagttgacaatgttgtcagatttaaaccagtgtggctagtaaaaagcagctcactcaatgtgggtggctccctattcctttacgctccccctatccctaccccacaagcctttcgattataaaatactaccaatcttgttataagattactgtggagtagtcaagtactccccgggccttctgagctggtggaatattttatttcagactgaaaacagagagcactctccttgggaagggaaagcggagcttgctgagtgagagatggagcctcatggtgtacaactgagggtagttaactcatcacttctcccaagcactcgatcccagcttcacccactggtgttgctttgcttgaactgttcaagccttttatagccttaccataagtatttagatatggtgtccttttctgtttttggggggggagttttgttgtgtttttttaaagtaagtgcttaagtattaactttgggttgtcccctctgtatgtttcgaaggggttttggttctttttgcttctgttttcttaaacatgttttccactcccacttgggcattttggaagctggtcagctagcaggttttctgggatgtcgggagacctagatgaccttatcgggtgcaatactagctaaggtaaagctagaaacctacactgtcactttactgagatttctgagtatacttttcatattgccttaatgtagcagtaatgtgtttatgcatttgtttctttgcacagacattttgtcaaatattaaaactctacttttttatggcacatattagcatataagcctttattccaagaggtatttattttttcacttgtaaaaaaataatgtttccacgtaaagaactctgttatatcctagaggactctgtcttttatattcgggataataaagactttaaagcaaa

SEQ ID NO: 156828 - DNA, 1666 bp, Homo sapiens
  Payload ID: 10741
  Gene Symbol: MYLIP
  Gene Name: myosin regulatory light chain interacting protein
  Uniprot ID: Q8WY64
  ENST ID: ENST00000356840
  CDS Start-End: 199-1536
gggcagctggcgggcagcgggtgagggggtggcggggacgcgagtggcggccgcggggccccggacaagggtccgcagagctgcagccttcgagggccagccctctccgagtccggggctgggtcccaccagtgacaaggcggcagccccgcgcacaccaaagagaaggcggctgtggcggcagcggcagccccagccatgctgtgttatgtgacgaggccggacgcggtgctgatggaggtggaggtggaggcgaaagccaacggcgaggactgcctcaaccaggtgtgcaggcgactgggaatcatagaagttgactattttggactgcagtttacgggtagcaaaggtgaaagtttatggctaaacctgagaaaccggatctcccagcagatggatgggctagccccttacaggcttaaacttagagtcaagttcttcgtggagcctcatctcatcttacaggagcagactaggcatatctttttcttgcacatcaaggaggccctcttggcaggccacctcttgtgttccccagagcaggcagtggaactcagtgccctcctggcccagaccaagtttggagactacaaccagaacactgccaagtataactatgaggagctctgtgccaaggagctctcctctgccaccttgaacagcattgttgcaaaacataaggagttggaggggaccagccaggcttcagctgaataccaagttttgcagattgtgtcggcaatggaaaactatggcatagaatggcattctgtgcgggatagcgaagggcagaaactgctcattggggttggacctgaaggaatctcaatttgtaaagatgactttagcccaattaataggatagcttatcctgtggtgcagatggccacccagtcaggaaagaatgtatatttgacggtcaccaaggaatctgggaacagcatcgtgctcttgtttaaaatgatcagcaccagggcggccagcgggctctaccgagcgataacagagacgcacgcattctacaggtgtgacacagtgaccagcgccgtgatgatgcagtatagccgtgacttgaagggccacttggcatctctgtttctgaatgaaaacattaaccttggcaagaaatatgtctttgatattaaaagaacatcaaaggaggtgtatgaccatgccaggagggctctgtacaatgctggcgttgtggacctcgtttcaagaaacaaccagagcccttcacactcgcctctgaagtcctcagaaagcagcatgaactgcagcagctgcgagggcctcagctgccagcagacccgggtgctgcaggagaagctacgcaagctgaaggaagccatgctgtgcatggtgtgctgcgaggaggagatcaactccaccttctgtccctgtggccacactgtgtgctgtgagagctgcgccgcccagctacagtcatgtcccgtctgcaggtcgcgtgtggagcatgtccagcacgtctatctgccaacgcacaccagtcttctcaatctgactgtaatctaatctgttgtgcttttgttggacttggcatgtttccatgaactgcactattataaactattaaaatgatagattgtggagaaagtaattattccaacacccatctgccatgcgatgttaaaaaaaaaaaaaa

SEQ ID NO: 156829 - DNA, 11971 bp, Homo sapiens
  Payload ID: 10742
  Gene Symbol: MYO5A
  Gene Name: myosin VA
  Uniprot ID: Q9Y4I1
  ENST ID: ENST00000356338
  CDS Start-End: 75-5561
agtccgctcgggcggccgcccaggcgaggtgcggcctccgcacaggcggggggcgtaggcgcgcggggcccgccatggctgcgtcggagctctacacaaagtttgccagggtttggatacctgatccagaggaagtctggaagtcagcagagctgctcaaagattataagccaggagataaagtcctcctgcttcacctcgaggaaggaaaggatttggaataccatctagatccaaagaccaaggagctgcctcacttacgaaatcctgacatacttgttggtgaaaatgacctcacagccctcagctatcttcatgagcctgctgtgctccataatctcagagtccgctttattgattccaaacttatttatacgtattgtggtatagtcctagtagctataaatccctatgaacagctgcctatttatggagaagatattattaatgcatacagtggtcagaacatgggtgatatggatccacatatctttgcagtagctgaagaagcttacaagcaaatggccagagatgaacgaaatcagtccatcatcgtaagtggagagtctggggcaggaaaaacagtctcagctaagtatgccatgcgatactttgcaactgtgagtggttctgccagtgaggccaatgtggaggaaaaggtcttggcctccaaccccatcatggagtccattggaaatgctaaaacaaccaggaatgataatagcagccgttttgggaagtatattgagattggttttgataagagatatcgaatcattggtgccaatatgagaacttatcttttagagaaatccagagtggtattccaggcagaagaggagagaaactatcatatcttctatcagctttgtgcctcagcaaagttacctgaatttaaaatgctacgattaggaaatgcagataactttaattacacaaaacaaggaggcagtcctgtgattgaaggagtggatgatgcaaaggagatggcacatactaggcaggcctgcactttgctaggaattagtgaatctcatcaaatgggaattttccgaatacttgctggcatccttcacttaggcaatgttggatttacatcccgagatgcagacagctgcacaatacctcccaagcatgaacctctctgcatcttctgtgaactcatgggtgtggactatgaggagatgtgtcactggctctgccatcggaaactggctactgccacagagacatacatcaagcccatctccaagctgcaggccacgaatgcccgcgatgctttggccaagcacatctatgccaagctctttaactggattgtagataatgtcaatcaggctctccattctgctgtcaaacagcactcttttattggtgtgctagacatttacggatttgaaacatttgagataaatagttttgaacagttttgcataaattatgcaaatgaaaaactacagcaacaattcaatatgcatgtcttcaaattggagcaagaagaatatatgaaggaacaaattccatggacactcatagatttttatgataatcagccttgtattaatcttatagaatcaaaactaggcattctagatttactggatgaggaatgcaagatgcctaaaggcacagatgacacctgggcccaaaaattgtacaacacacatttgaacaaatgtgcactctttgaaaagcctcgtctatcaaacaaagctttcatcatccaacattttgctgacaaagtggaataccagtgtgaaggatttctcgaaaagaataaagacaccgtttttgaagaacaaattaaagttcttaaatcaagcaagtttaagatgctaccagaactatttcaagatgatgagaaggccatcagtccaacttcagccacctcctcagggcgcacacccctcacacgaactcctgcaaagcccaccaaaggcagaccaggccaaatggccaaagagcacaagaaaacagtggggcatcagttcagaaactccctgcacctgcttatggagacactcaatgccactacccctcactatgtgcgctgtatcaagcctaatgacttcaagttcccattcacgtttgatgagaagagggcagtgcagcagctgagagcatgtggtgtcctggaaaccatccgaatcagtgcggccggtttcccctcacggtggacttaccaagaatttttcagccgctaccgtgtcctaatgaagcagaaagatgtgctgagtgacagaaagcaaacatgcaagaatgtgttagagaaactgatactggacaaggacaaataccagtttggtaagacaaagatctttttccgtgccggtcaagtggcctatctagaaaaattgagagctgacaaactgagagctgcctgcatccggatccagaagaccatccgagggtggctgctgagaaagaagtacctacgcatgcggaaggcagccatcaccatgcagagatacgtgcggggctaccaggcccgatgctatgctaagtttctgcgcagaaccaaggcagcaaccatcattcaaaagtactggcgcatgtatgtggtccgcaggaggtacaagattagacgagctgccactatcgttcttcagtcttacttgcgaggcttcttggccagaaataggtatcgcaagatactccgtgagcacaaagcagtcatcattcagaagcgagtccggggctggctggcccgcacacactacaagaggagcatgcatgccatcatctaccttcagtgctgcttcaggcggatgatggccaagcgtgagctaaagaagctcaaaatcgaggctcgctcagtggagcgctataagaagctgcacatcggcatggagaacaagatcatgcagctgcagcgcaaagttgatgagcagaacaaagactacaaatgccttgtggagaaactaaccaatctggaaggaatatacaactctgagactgagaaactacgaagtgacttagaacgtcttcaactaagtgaagaggaagcgaaagttgccactgggcgggtccttagtctgcaggaagaaattgccaagctccggaaagacctggagcaaactcgttcagagaaaaaatgcattgaggaacatgcagatcgatacaaacaagaaacagagcagctggtatcaaatctgaaggaagaaaatactttgctgaagcaagaaaaagaagccctcaatcaccgcatcgtgcagcaggctaaggagatgacagaaactatggagaagaagttagtagaagaaacgaaacaactggaactcgaccttaatgatgaaaggctgagatatcagaaccttctgaatgagttcagtcgcctggaagaaagatatgatgacctcaaggaagagatgacccttatggtgcatgtgcctaagcctggacacaagagaacagactccacccacagcagcaacgagtctgaatatatctttagctctgaaattgcagaaatggaagacattccatcaaggacagaggaaccaagtgagaagaaggtacctctggacatgtcattgttccttaagctccagaagcgggtcacagagctggagcaggagaagcaggtgatgcaggatgagctggaccgcaaggaggagcaggtgctccgcagcaaggccaaggaagaagaaagaccacaaattagaggtgcagaactggaatatgagtcactcaagcgtcaagaactagaatcagaaaacaaaaaactgaagaatgagctaaatgagttgcgcaaggccctcagtgagaaaagtgccccagaggtgaccgccccaggtgcacctgcctaccgtgtcctcatggagcagctgacctctgtgagcgaggagcttgatgtccgcaaggaggaagtcctcatcttaaggtctcaactggtgagccagaaagaggccatccaacccaaggatgacaagaatacaatgacagattccacaatacttttggaagatgtacaaaaaatgaaagataaaggtgaaatagcacaagcatacattggtttgaaagaaacaaataggctcctggaatcccagctgcagtcacagaagaggagccatgagaatgaggccgaggccctccgtggggagatccagagcctgaaggaggagaacaaccgacagcagcagctgctggcccagaacctgcagctgcccccagaggcccgcattgaggccagcctgcagcacgagatcacccggctgaccaacgaaaacttggatttgatggaacaacttgaaaaacaggataagacggtccgtaaactgaaaaaacaactgaaagtatttgccaaaaaaattggcgaactagaagtgggccagatggagaacatatccccaggacagatcattgatgaacccatccgaccagtcaacattcccaggaaagaaaaggatttccaagggatgctggaatacaagaaggaggatgagcaaaaacttgttaagaacctgattctggaactgaagccacgtggtgtagcagtcaatttgattccaggattaccggcatatatcctgttcatgtgtgttcgacatgctgactacctgaatgatgatcagaaagtaaggtcgttgctaacatcaacaattaacagcatcaaaaaagtattgaagaaaagaggtgatgattttgaaaccgtctccttctggctctctaacacatgccgatttttgcactgcttgaaacagtacagtggagaagagggctttatgaagcacaacacatctcgccagaatgaacactgcctcaccaattttgacctggctgagtatcggcaggtgctgagtgacttggccattcagatctaccagcagctcgtgcgggtgttagagaacatccttcagccaatgattgtctcaggcatgctggaacatgaaacgattcagggcgtgtctggggtgaagcccacagggttgagaaagcgaacctccagtatcgccgatgagggcacctacacactggactccatcctccggcagctcaactccttccactcggtcatgtgtcagcatggcatggaccctgaactgatcaagcaggtggtcaagcagatgttctacatcataggggccatcaccctgaacaaccttctcctgcggaaggacatgtgctcctggagtaaaggcatgcagatcaggtacaatgtcagtcaactggaagaatggctgcgtgacaagaatctgatgaatagtggggctaaagaaaccctggaacctctcattcaggctgctcaacttttgcaagtgaaaaagaaaacagatgatgatgcagaagccatttgttctatgtgcaatgctttaactactgcccagattgtgaaagtgttgaatttgtatactccagttaatgagtttgaagaaagagtctctgtgtcgttcattcgtactatacagatgcgtttacgagacaggaaagactctccccagctgctcatggatgctaaacacatctttcctgtcacctttcctttcaacccatcttccctcgcactagaaaccatccagattccagccagcctcggcctgggcttcatttcacgggtctgaaagtgatgtccaggcaaaaattgacaatacatttcttgcccgaaataagaacccattatttccagtgagttactgaaaatacatttttaaagagaaagtactgattatctcccaaatgagaagtcattaactggaaatctccctagaatactttcatcactttggaaacaaagataggctctttcgtgctgtgttatctttatagcaacactcatccttaaccaactaggtaccgtgagtttacatacaggagaatgatggaaggaagggaggaaggaaaggaggagaaaaatgtgtcttcagctggcagcatttattttaaatccttagcactgagtttgaatggtataaaaagtataacttccatagatgagctgttgttaggaaggcaccaaagaacctcctctgcactaaacaggagaatggaaagaaaagtctccattgagtacatatcatgtcagtttagtaatcaattatgttgatattgttaaactggttcaaagaaataaactggcaatatgtaaagtaattcctcatttgtgtcactatgatatagagatattaaaggaatgttggtttgctaaatagtatagatgtccatttgtactatagtttactgagcattttaaattgctgctacatactgtcttcttaaaatgtaagtgatattaggcactacaataagtttctcttgtcaattctgtttacaattcaatcagatcacagttttaactggattatatgcaaatacctacagattcacctgcacaagtagcagacactggaaagtcatgtagtaatatgacaaaatgcttgacatttaggggtaggattagacaaagtggctattgttgatgtcattatttattcaggatgtattacattgatgtgctcattaattttccctgggtggatattgcgtcagggtacagtgttctgtgaagtgacttatttttaactaccagatctgattccttcagtgcatattttcaaccttgacaggttttctctcttcttaatttattaagaattaatctcggctgggcgcggtggctcacgcctgtaatcccagcactttgggaagccaaggtgggcggatcacttcaggttaggagttggagaccagcctggccaacatggcgaaaccctgtctctactaaaaatacaaaaattagccgggcgtggtggcacttgcctgtaatcccagctactcgggaggctgaggcacgagaatcgattaaacctgggaggcggagattgcaatgagatcgaaccactgcactccagcctgggtgacagagagagacactgccttggaaaaaaaaagaatctcactcactatctagagaggattgtcagaatattcacgattcaggtcttgaaactttgattatgcaaaagaaggtatataataaatatttcattatgattcagtttttaaggctttgcagcttctataagtgttctcagatgccactagataattttaaaagcatcatattagaaatactttaagaagacttatataagaaatagaagattgttgaattttacagaggatttggttcattaagacccagattctgtaagttttcattctgaaattctagttaaacatattcaccatttttcttaggaatcttatacaataaatccttcaggttgcacaaaagcaaattattagttttcattagaaactctggttctgaattacaatcataggttatataaatttaactgttagatggtctataaatcttattaaaatatgtgcaatatttatggaagtcaaacagcttcatatcagtgataaagattgttattaaaagataaatactgtctgttaatttacatgggcctcaagttcctcgtttataaaataagagagttggacactgattcttaacatctcctccacatttaaaattctctcttctcagcccttagattctagagagaaaaagctgcagttactcagtaagtccattctctgatggaaagaccagtgtgtagtgcctgtcaattccttaggattaatcaaatgtaaaatcacaagtttgtgtagctgtaacctttcttaaatgtacatgatttatgtacatgcttttagaaggtcctactatatttgtattataattagtttaagtaatttttattacatcatgtattgctttattcagtttgaatacatttatttatttatttgcagtatcaaccagaaacactaccaattgcatcaaattctcccagtttttcctggttgtcaatgcggttttcaatgcacaattaagtcatagccatttggttcgtaccaaatgtgtcagaatctaacagcatccgataggctgtaagttggggagttgctaagaaaatgcaacgtggtacaggctgtccgcctcagccctggaaatctcccagacctcccccagcttcatcctgtgtagcacgactcaacgtgcaccctgaatcttctcaggtcttccaggtcatgctgtagctgtcactgccatgcagcccttttttttactccggacagctcatgtactgaagcgtcatgaaagaaaggctgtggtctgagcccttctctcccatctcctgtctttgtcctgtcaagtgctggagccagagctcctacagctgcccttggtggtttctcctgttcagcgatggtggcacaaaggttctgctattccagggctccagcttcctcccaggtctacccagagctccagatgggggtctgaattaacctctcttggtggcctggagatttttagtcattgacaagaataccttgtaaccagggaaccccaaggcccagtaaatgattctgtataccattttcttgaaggtacaagaagattctgccgactatggggatctttgggccagtttgaggattgctttccctctgaggttctttctctctgtcagccacactttctcacccaacttcagacacaccctgccagcctttcccctactcattcactcttccccttccctcaacttaatcgtctatcccgttgcctgctgtttgactgtgcactgaaggcaggtggatggagtcagtcctcagttgcccctgctggccttcctggtgcttaccatcagcccaatctttgcacagtccttgttgttcttacttctctgcatgcattccttcagaagatcagtcatcaactttttcttaattcctctgtgacacacaatgggaattcaaaggaagagatcttaaaagtcacaacagttctttatcttaataatcccctccccattcaccttactacatgcagactcacctcacacccttacaacttgaagctgaaaatttaaaagtaatttccctttttgcagcttttcctcaggttaaggctttgatctgcctgagagtaactctaaaaggagggaagataaatatgggataaaatccacaaagtgtagcttctaattcctttggaagtttaaaaaatttccacatatctgatgcttcttttgtcaggtgcagaagcacaaaaacatattccgaagccaactgatagggaatttggggattattgtcagtttggagaatttgctgtgttatttcttcatttccatggatagctcatagttggctctttctgggtgagtaattatgtgtaatatagatcaaatcttttactaaggttacagctacatgttaggggaggctatgaaaatactatattattataatttcagtgcagtgattgttgtgagaaataactttcatggtaaccctaggaaaatgggcacctgccaccatcctgagaagtcctcacacaatgccctttctctcttacacacacacacacacacatacacacacacacacccccgtcactaattcatagagttccttagcaggcatagtcaaggatcctctgggtaatgtcagctgcttagtgataaaacagagccaaaactagtgcatcctgttgaaagtaatgcagaaacagtacctgggtccagatatgctttcctgcggcgctttcctctgttacctcgtttcatcctcacagcagcatggacggtaggtggggtcgcttctacaatcatttctgatgatagcttgggaatagagataggggcagtgacttgcctgatgtcgcacagccctctggctgtcctgctttcccatatggagcagtggtggtgtgggcacctgtgatgcaggagactttaaaaatgtcgtgaggtcacgtgctgcccctcctggtacgtgtggaatgcccctggccagcaaggggtgcttttttatcagagttggcagctggcatgtgggaaccgagcaagtgctgcgtaccaagttacttgttttaaggagaccaagtgctcagcgccaggtggttttcttttttgtcatagttacttgctataactcagcttgacttctgtcatgaatcagtgctctctgggaggatgcaatactctgtttgggcattaattggtagcaggttgtctcaaccaaaaagacaggaaacagcaaaagcctctctgaaattaagaggaaagttactctccccacacccatcagagtctttattggagccaccaggtgagctgtgcagcctggacaggcctgcagctataggccaccttcccagtttaggtcctcagcacaggggagcccaagtcactgggtgccttccgagggctgtcactgggcaggccatatacaagtcagtgtgtgcgtgggcactgcagtgtgtgcatgccgtaggtgttgatgggtgctaggaggggtgtcgtgtgcatgcgcgttgaagaggatctgtattgccgtgacctctgttcatggatgagtgcattgtaatttgttctcaggctgtgctgtgagggccgccttaacccttgctcccttcccttctagagctgccttaagttctccagaacttttcttctgtaaaggatatcttgcctggaagggatatcttgccctgtttctcaaggttttgtgagagttttgactggatgtggccctgcatgaccctccttctcctgtacttcctctttcctttccaaatgggaattagaactgtggggcagcaacagtctcagagccagtgagaggccagcttagagaatgcttctgagttagtgggactctgtgtcacaagtaagcaaatgaatatatgaaagaaattatggagataagttagattcttggtaatacttaaatgtcttgctttctactaaccttttgttactaaaggtaaagggtataactcaaactttttgtggacattcttttcaaaattttttaagaaccctgtactataaaaggttgagtaaaaacaggaaagcgtgctataagttcaaatctgttgtattaccctaaattagataaaccaacctgaattatagtagatttctcaatagatgaggaactgaaaaatactatgtaaaatatcttccaaaatgctttttatactttttttatttgtaatttggtctatctaaaatgttcgttagcttaacttaatgggcgttattggattcatatgactaacgtttcctcagtattgtaatgcttgaaatatttgaaagaaaaaatgttgttttttagttgaaactggtatatataattcagtgcttggcaggttagtatatttttatgcatttttcagagtcagcagtttcaaatcttattgttatcatgttataaaattttagcccacatttcaggctccgtaaatcatttgagccattattttttcccaacaaatggtgaattttttctttaaatgtggatatatatgttgtaatttatgattcctggttatgtatttttgtgggatcctgcagtaaaattgacttttttgtgtctttgggagatttaaattgcgctaacagtgttgcgcaaaaatgagttcatgccatttaacatattgtattttaattattaactgtattaatttactatgaaatggacatccttttaactaaaatggaattgaacattgcagttttcaaatatttttccttgttgggtctggaaaaggaattctactttgatctgcatagaaaattttgatacaattttttgaaagttcttaggtgaaacatttacccattaaaaaggaagcagaaatactgagacatgaaaggcattatcaactaactctagactctagaacccattctagcatatctcacgtgcaatttttaaaaataagttaataattcatctcatatcaacaaaagcctttgaaacatgggttttcactagatatcacctagtgctaagataaaaaccaaaacaatatcagaattacatttatgctctaaatttgtagttgtccattgttgtgcttagtaaatgtgtgtcattaatgctgtattctcctagctattatggaaacttgtttaaataaagatatggatat

SEQ ID NO: 156830 - DNA, 12220 bp, Homo sapiens
  Payload ID: 10742
  Gene Symbol: MYO5A
  Gene Name: myosin VA
  ENST ID: ENST00000358212
  CDS Start-End: 245-5812
accccgggcaggtggagcgctcgcggctgctcgcggcgagcccgggagtgatggcgaggcccctgcgggcggccagcgcctgaggcgccccgccccgccccgccccgcgcggccctccccgcccggccctgccctgccctgctccctgccggcggctgcgggcgcttcctagtccgctcgggcggccgcccaggcgaggtgcggcctccgcacaggcggggggcgtaggcgcgcggggcccgccatggctgcgtcggagctctacacaaagtttgccagggtttggatacctgatccagaggaagtctggaagtcagcagagctgctcaaagattataagccaggagataaagtcctcctgcttcacctcgaggaaggaaaggatttggaataccatctagatccaaagaccaaggagctgcctcacttacgaaatcctgacatacttgttggtgaaaatgacctcacagccctcagctatcttcatgagcctgctgtgctccataatctcagagtccgctttattgattccaaacttatttatacgtattgtggtatagtcctagtagctataaatccctatgaacagctgcctatttatggagaagatattattaatgcatacagtggtcagaacatgggtgatatggatccacatatctttgcagtagctgaagaagcttacaagcaaatggccagagatgaacgaaatcagtccatcatcgtaagtggagagtctggggcaggaaaaacagtctcagctaagtatgccatgcgatactttgcaactgtgagtggttctgccagtgaggccaatgtggaggaaaaggtcttggcctccaaccccatcatggagtccattggaaatgctaaaacaaccaggaatgataatagcagccgttttgggaagtatattgagattggttttgataagagatatcgaatcattggtgccaatatgagaacttatcttttagagaaatccagagtggtattccaggcagaagaggagagaaactatcatatcttctatcagctttgtgcctcagcaaagttacctgaatttaaaatgctacgattaggaaatgcagataactttaattacacaaaacaaggaggcagtcctgtgattgaaggagtggatgatgcaaaggagatggcacatactaggcaggcctgcactttgctaggaattagtgaatctcatcaaatgggaattttccgaatacttgctggcatccttcacttaggcaatgttggatttacatcccgagatgcagacagctgcacaatacctcccaagcatgaacctctctgcatcttctgtgaactcatgggtgtggactatgaggagatgtgtcactggctctgccatcggaaactggctactgccacagagacatacatcaagcccatctccaagctgcaggccacgaatgcccgcgatgctttggccaagcacatctatgccaagctctttaactggattgtagataatgtcaatcaggctctccattctgctgtcaaacagcactcttttattggtgtgctagacatttacggatttgaaacatttgagataaatagttttgaacagttttgcataaattatgcaaatgaaaaactacagcaacaattcaatatgcatgtcttcaaattggagcaagaagaatatatgaaggaacaaattccatggacactcatagatttttatgataatcagccttgtattaatcttatagaatcaaaactaggcattctagatttactggatgaggaatgcaagatgcctaaaggcacagatgacacctgggcccaaaaattgtacaacacacatttgaacaaatgtgcactctttgaaaagcctcgtctatcaaacaaagctttcatcatccaacattttgctgacaaagtggaataccagtgtgaaggatttctcgaaaagaataaagacaccgtttttgaagaacaaattaaagttcttaaatcaagcaagtttaagatgctaccagaactatttcaagatgatgagaaggccatcagtccaacttcagccacctcctcagggcgcacacccctcacacgaactcctgcaaagcccaccaaaggcagaccaggccaaatggccaaagagcacaagaaaacagtggggcatcagttcagaaactccctgcacctgcttatggagacactcaatgccactacccctcactatgtgcgctgtatcaagcctaatgacttcaagttcccattcacgtttgatgagaagagggcagtgcagcagctgagagcatgtggtgtcctggaaaccatccgaatcagtgcggccggtttcccctcacggtggacttaccaagaatttttcagccgctaccgtgtcctaatgaagcagaaagatgtgctgagtgacagaaagcaaacatgcaagaatgtgttagagaaactgatactggacaaggacaaataccagtttggtaagacaaagatctttttccgtgccggtcaagtggcctatctagaaaaattgagagctgacaaactgagagctgcctgcatccggatccagaagaccatccgagggtggctgctgagaaagaagtacctacgcatgcggaaggcagccatcaccatgcagagatacgtgcggggctaccaggcccgatgctatgctaagtttctgcgcagaaccaaggcagcaaccatcattcaaaagtactggcgcatgtatgtggtccgcaggaggtacaagattagacgagctgccactatcgttcttcagtcttacttgcgaggcttcttggccagaaataggtatcgcaagatactccgtgagcacaaagcagtcatcattcagaagcgagtccggggctggctggcccgcacacactacaagaggagcatgcatgccatcatctaccttcagtgctgcttcaggcggatgatggccaagcgtgagctaaagaagctcaaaatcgaggctcgctcagtggagcgctataagaagctgcacatcggcatggagaacaagatcatgcagctgcagcgcaaagttgatgagcagaacaaagactacaaatgccttgtggagaaactaaccaatctggaaggaatatacaactctgagactgagaaactacgaagtgacttagaacgtcttcaactaagtgaagaggaagcgaaagttgccactgggcgggtccttagtctgcaggaagaaattgccaagctccggaaagacctggagcaaactcgttcagagaaaaaatgcattgaggaacatgcagatcgatacaaacaagaaacagagcagctggtatcaaatctgaaggaagaaaatactttgctgaagcaagaaaaagaagccctcaatcaccgcatcgtgcagcaggctaaggagatgacagaaactatggagaagaagttagtagaagaaacgaaacaactggaactcgaccttaatgatgaaaggctgagatatcagaaccttctgaatgagttcagtcgcctggaagaaagatatgatgacctcaaggaagagatgacccttatggtgcatgtgcctaagcctggacacaagagaacagactccacccacagcagcaacgagtctgaatatatctttagctctgaaattgcagaaatggaagacattccatcaaggacagaggaaccaagtgagaagaaggtacctctggacatgtcattgttccttaagctccagaagcgggtcacagagctggagcaggagaagcaggtgatgcaggatgagctggaccgcaaggaggagcaggtgctccgcagcaaggccaaggaagaagaaagaccacaaattagaggtgcagaactggaatatgagtcactcaagcgtcaagaactagaatcagaaaacaaaaaactgaagaatgagctaaatgagttgcgcaaggccctcagtgagaaaagtgccccagaggtgaccgccccaggtgcacctgcctaccgtgtcctcatggagcagctgacctctgtgagcgaggagcttgatgtccgcaaggaggaagtcctcatcttaaggtctcaactggtgagccagaaagaggccatccaacccaaggatgacaagaatacaatgacagattccacaatacttttggaagatgtacaaaaaatgaaagataaaggtgaaatagcacaagcatacattggtttgaaagaaacaaatagatcatctgctctggattaccatgagttgaatgaggatggagagctgtggctggtttatgaagggttaaaacaagccaacaggctcctggaatcccagctgcagtcacagaagaggagccatgagaatgaggccgaggccctccgtggggagatccagagcctgaaggaggagaacaaccgacagcagcagctgctggcccagaacctgcagctgcccccagaggcccgcattgaggccagcctgcagcacgagatcacccggctgaccaacgaaaacttggatttgatggaacaacttgaaaaacaggataagacggtccgtaaactgaaaaaacaactgaaagtatttgccaaaaaaattggcgaactagaagtgggccagatggagaacatatccccaggacagatcattgatgaacccatccgaccagtcaacattcccaggaaagaaaaggatttccaagggatgctggaatacaagaaggaggatgagcaaaaacttgttaagaacctgattctgggcaacaaaccacgtggtgtagcagtcaatttgattccaggattaccggcatatatcctgttcatgtgtgttcgacatgctgactacctgaatgatgatcagaaagtaaggtcgttgctaacatcaacaattaacagcatcaaaaaagtattgaagaaaagaggtgatgattttgaaaccgtctccttctggctctctaacacatgccgatttttgcactgcttgaaacagtacagtggagaagagggctttatgaagcacaacacatctcgccagaatgaacactgcctcaccaattttgacctggctgagtatcggcaggtgctgagtgacttggccattcagatctaccagcagctcgtgcgggtgttagagaacatccttcagccaatgattgtctcaggcatgctggaacatgaaacgattcagggcgtgtctggggtgaagcccacagggttgagaaagcgaacctccagtatcgccgatgagggcacctacacactggactccatcctccggcagctcaactccttccactcggtcatgtgtcagcatggcatggaccctgaactgatcaagcaggtggtcaagcagatgttctacatcataggggccatcaccctgaacaaccttctcctgcggaaggacatgtgctcctggagtaaaggcatgcagatcaggtacaatgtcagtcaactggaagaatggctgcgtgacaagaatctgatgaatagtggggctaaagaaaccctggaacctctcattcaggctgctcaacttttgcaagtgaaaaagaaaacagatgatgatgcagaagccatttgttctatgtgcaatgctttaactactgcccagattgtgaaagtgttgaatttgtatactccagttaatgagtttgaagaaagagtctctgtgtcgttcattcgtactatacagatgcgtttacgagacaggaaagactctccccagctgctcatggatgctaaacacatctttcctgtcacctttcctttcaacccatcttccctcgcactagaaaccatccagattccagccagcctcggcctgggcttcatttcacgggtctgaaagtgatgtccaggcaaaaattgacaatacatttcttgcccgaaataagaacccattatttccagtgagttactgaaaatacatttttaaagagaaagtactgattatctcccaaatgagaagtcattaactggaaatctccctagaatactttcatcactttggaaacaaagataggctctttcgtgctgtgttatctttatagcaacactcatccttaaccaactaggtaccgtgagtttacatacaggagaatgatggaaggaagggaggaaggaaaggaggagaaaaatgtgtcttcagctggcagcatttattttaaatccttagcactgagtttgaatggtataaaaagtataacttccatagatgagctgttgttaggaaggcaccaaagaacctcctctgcactaaacaggagaatggaaagaaaagtctccattgagtacatatcatgtcagtttagtaatcaattatgttgatattgttaaactggttcaaagaaataaactggcaatatgtaaagtaattcctcatttgtgtcactatgatatagagatattaaaggaatgttggtttgctaaatagtatagatgtccatttgtactatagtttactgagcattttaaattgctgctacatactgtcttcttaaaatgtaagtgatattaggcactacaataagtttctcttgtcaattctgtttacaattcaatcagatcacagttttaactggattatatgcaaatacctacagattcacctgcacaagtagcagacactggaaagtcatgtagtaatatgacaaaatgcttgacatttaggggtaggattagacaaagtggctattgttgatgtcattatttattcaggatgtattacattgatgtgctcattaattttccctgggtggatattgcgtcagggtacagtgttctgtgaagtgacttatttttaactaccagatctgattccttcagtgcatattttcaaccttgacaggttttctctcttcttaatttattaagaattaatctcggctgggcgcggtggctcacgcctgtaatcccagcactttgggaagccaaggtgggcggatcacttcaggttaggagttggagaccagcctggccaacatggcgaaaccctgtctctactaaaaatacaaaaattagccgggcgtggtggcacttgcctgtaatcccagctactcgggaggctgaggcacgagaatcgattaaacctgggaggcggagattgcaatgagatcgaaccactgcactccagcctgggtgacagagagagacactgccttggaaaaaaaaagaatctcactcactatctagagaggattgtcagaatattcacgattcaggtcttgaaactttgattatgcaaaagaaggtatataataaatatttcattatgattcagtttttaaggctttgcagcttctataagtgttctcagatgccactagataattttaaaagcatcatattagaaatactttaagaagacttatataagaaatagaagattgttgaattttacagaggatttggttcattaagacccagattctgtaagttttcattctgaaattctagttaaacatattcaccatttttcttaggaatcttatacaataaatccttcaggttgcacaaaagcaaattattagttttcattagaaactctggttctgaattacaatcataggttatataaatttaactgttagatggtctataaatcttattaaaatatgtgcaatatttatggaagtcaaacagcttcatatcagtgataaagattgttattaaaagataaatactgtctgttaatttacatgggcctcaagttcctcgtttataaaataagagagttggacactgattcttaacatctcctccacatttaaaattctctcttctcagcccttagattctagagagaaaaagctgcagttactcagtaagtccattctctgatggaaagaccagtgtgtagtgcctgtcaattccttaggattaatcaaatgtaaaatcacaagtttgtgtagctgtaacctttcttaaatgtacatgatttatgtacatgcttttagaaggtcctactatatttgtattataattagtttaagtaatttttattacatcatgtattgctttattcagtttgaatacatttatttatttatttgcagtatcaaccagaaacactaccaattgcatcaaattctcccagtttttcctggttgtcaatgcggttttcaatgcacaattaagtcatagccatttggttcgtaccaaatgtgtcagaatctaacagcatccgataggctgtaagttggggagttgctaagaaaatgcaacgtggtacaggctgtccgcctcagccctggaaatctcccagacctcccccagcttcatcctgtgtagcacgactcaacgtgcaccctgaatcttctcaggtcttccaggtcatgctgtagctgtcactgccatgcagcccttttttttactccggacagctcatgtactgaagcgtcatgaaagaaaggctgtggtctgagcccttctctcccatctcctgtctttgtcctgtcaagtgctggagccagagctcctacagctgcccttggtggtttctcctgttcagcgatggtggcacaaaggttctgctattccagggctccagcttcctcccaggtctacccagagctccagatgggggtctgaattaacctctcttggtggcctggagatttttagtcattgacaagaataccttgtaaccagggaaccccaaggcccagtaaatgattctgtataccattttcttgaaggtacaagaagattctgccgactatggggatctttgggccagtttgaggattgctttccctctgaggttctttctctctgtcagccacactttctcacccaacttcagacacaccctgccagcctttcccctactcattcactcttccccttccctcaacttaatcgtctatcccgttgcctgctgtttgactgtgcactgaaggcaggtggatggagtcagtcctcagttgcccctgctggccttcctggtgcttaccatcagcccaatctttgcacagtccttgttgttcttacttctctgcatgcattccttcagaagatcagtcatcaactttttcttaattcctctgtgacacacaatgggaattcaaaggaagagatcttaaaagtcacaacagttctttatcttaataatcccctccccattcaccttactacatgcagactcacctcacacccttacaacttgaagctgaaaatttaaaagtaatttccctttttgcagcttttcctcaggttaaggctttgatctgcctgagagtaactctaaaaggagggaagataaatatgggataaaatccacaaagtgtagcttctaattcctttggaagtttaaaaaatttccacatatctgatgcttcttttgtcaggtgcagaagcacaaaaacatattccgaagccaactgatagggaatttggggattattgtcagtttggagaatttgctgtgttatttcttcatttccatggatagctcatagttggctctttctgggtgagtaattatgtgtaatatagatcaaatcttttactaaggttacagctacatgttaggggaggctatgaaaatactatattattataatttcagtgcagtgattgttgtgagaaataactttcatggtaaccctaggaaaatgggcacctgccaccatcctgagaagtcctcacacaatgccctttctctcttacacacacacacacacacatacacacacacacacccccgtcactaattcatagagttccttagcaggcatagtcaaggatcctctgggtaatgtcagctgcttagtgataaaacagagccaaaactagtgcatcctgttgaaagtaatgcagaaacagtacctgggtccagatatgctttcctgcggcgctttcctctgttacctcgtttcatcctcacagcagcatggacggtaggtggggtcgcttctacaatcatttctgatgatagcttgggaatagagataggggcagtgacttgcctgatgtcgcacagccctctggctgtcctgctttcccatatggagcagtggtggtgtgggcacctgtgatgcaggagactttaaaaatgtcgtgaggtcacgtgctgcccctcctggtacgtgtggaatgcccctggccagcaaggggtgcttttttatcagagttggcagctggcatgtgggaaccgagcaagtgctgcgtaccaagttacttgttttaaggagaccaagtgctcagcgccaggtggttttcttttttgtcatagttacttgctataactcagcttgacttctgtcatgaatcagtgctctctgggaggatgcaatactctgtttgggcattaattggtagcaggttgtctcaaccaaaaagacaggaaacagcaaaagcctctctgaaattaagaggaaagttactctccccacacccatcagagtctttattggagccaccaggtgagctgtgcagcctggacaggcctgcagctataggccaccttcccagtttaggtcctcagcacaggggagcccaagtcactgggtgccttccgagggctgtcactgggcaggccatatacaagtcagtgtgtgcgtgggcactgcagtgtgtgcatgccgtaggtgttgatgggtgctaggaggggtgtcgtgtgcatgcgcgttgaagaggatctgtattgccgtgacctctgttcatggatgagtgcattgtaatttgttctcaggctgtgctgtgagggccgccttaacccttgctcccttcccttctagagctgccttaagttctccagaacttttcttctgtaaaggatatcttgcctggaagggatatcttgccctgtttctcaaggttttgtgagagttttgactggatgtggccctgcatgaccctccttctcctgtacttcctctttcctttccaaatgggaattagaactgtggggcagcaacagtctcagagccagtgagaggccagcttagagaatgcttctgagttagtgggactctgtgtcacaagtaagcaaatgaatatatgaaagaaattatggagataagttagattcttggtaatacttaaatgtcttgctttctactaaccttttgttactaaaggtaaagggtataactcaaactttttgtggacattcttttcaaaattttttaagaaccctgtactataaaaggttgagtaaaaacaggaaagcgtgctataagttcaaatctgttgtattaccctaaattagataaaccaacctgaattatagtagatttctcaatagatgaggaactgaaaaatactatgtaaaatatcttccaaaatgctttttatactttttttatttgtaatttggtctatctaaaatgttcgttagcttaacttaatgggcgttattggattcatatgactaacgtttcctcagtattgtaatgcttgaaatatttgaaagaaaaaatgttgttttttagttgaaactggtatatataattcagtgcttggcaggttagtatatttttatgcatttttcagagtcagcagtttcaaatcttattgttatcatgttataaaattttagcccacatttcaggctccgtaaatcatttgagccattattttttcccaacaaatggtgaattttttctttaaatgtggatatatatgttgtaatttatgattcctggttatgtatttttgtgggatcctgcagtaaaattgacttttttgtgtctttgggagatttaaattgcgctaacagtgttgcgcaaaaatgagttcatgccatttaacatattgtattttaattattaactgtattaatttactatgaaatggacatccttttaactaaaatggaattgaacattgcagttttcaaatatttttccttgttgggtctggaaaaggaattctactttgatctgcatagaaaattttgatacaattttttgaaagttcttaggtgaaacatttacccattaaaaaggaagcagaaatactgagacatgaaaggcattatcaactaactctagactctagaacccattctagcatatctcacgtgcaatttttaaaaataagttaataattcatctcatatcaacaaaagcctttgaaacatgggttttcactagatatcacctagtgctaagataaaaaccaaaacaatatcagaattacatttatgctctaaatttgtagttgtccattgttgtgcttagtaaatgtgtgtcattaatgctgtattctcctagctattatggaaacttgtttaaataaagatatggat

SEQ ID NO: 156831 - DNA, 684 bp, Homo sapiens
  Payload ID: 10742
  Gene Symbol: MYO5A
  Gene Name: myosin VA
  ENST ID: ENST00000399228
  CDS Start-End: 1-684
cgtcaagaactagaatcagaaaacaaaaaactgaagaatgagctaaatgagttgcgcaaggccctcagtgagaaaagtgccccagaggtgaccgccccaggtgcacctgcctaccgtgtcctcatggagcagctgacctctgtgagcgaggagcttgatgtccgcaaggaggaagtcctcatcttaaggtctcaactggtgagccagaaagaggccatccaacccaagaatacaatgacagattccacaatacttttggaagatgtacaaaaaatgaaagataaaggtgaaatagcacaagcatacattggtttgaaagaaacaaatagatcatctgctctggattaccatgagttgaatgaggatggagagctgtggctggtttatgaagggttaaaacaagccaacaggctcctggaatcccagctgcagtcacagaagaggagccatgagaatgaggccgaggccctccgtggggagatccagagcctgaaggaggagaacaaccgacagcagcagctgctggcccagaacctgcagctgcccccagaggcccgcattgaggccagcctgcagcacgagatcacccggctgaccaacgaaaacttgtattttgaggaattatatgcagatgaccctaagaagtatcaatcatatcggatttccctttacaaacggatgatt

SEQ ID NO: 156832 - DNA, 1758 bp, Homo sapiens
  Payload ID: 10742
  Gene Symbol: MYO5A
  Gene Name: myosin VA
  ENST ID: ENST00000399229
  CDS Start-End: 1-1758
ggtgcacctgcctaccgtgtcctcatggagcagctgacctctgtgagcgaggagcttgatgtccgcaaggaggaagtcctcatcttaaggtctcaactggtgagccagaaagaggccatccaacccaagaatacaatgacagattccacaatacttttggaagatgtacaaaaaatgaaagataaaggtgaaatagcacaagcatacattggtttgaaagaaacaaataggctcctggaatcccagctgcagtcacagaagaggagccatgagaatgaggccgaggccctccgtggggagatccagagcctgaaggaggagaacaaccgacagcagcagctgctggcccagaacctgcagctgcccccagaggcccgcattgaggccagcctgcagcacgagatcacccggctgaccaacgaaaacttggatttgatggaacaacttgaaaaacaggataagacggtccgtaaactgaaaaaacaactgaaagtatttgccaaaaaaattggcgaactagaagtgggccagatggagaacatatccccaggacagatcattgatgaacccatccgaccagtcaacattcccaggaaagaaaaggatttccaagggatgctggaatacaagaaggaggatgagcaaaaacttgttaagaacctgattctggaactgaagccacgtggtgtagcagtcaatttgattccaggattaccggcatatatcctgttcatgtgtgttcgacatgctgactacctgaatgatgatcagaaagtaaggtcgttgctaacatcaacaattaacagcatcaaaaaagtattgaagaaaagaggtgatgattttgaaaccgtctccttctggctctctaacacatgccgatttttgcactgcttgaaacagtacagtggagaagagggctttatgaagcacaacacatctcgccagaatgaacactgcctcaccaattttgacctggctgagtatcggcaggtgctgagtgacttggccattcagatctaccagcagctcgtgcgggtgttagagaacatccttcagccaatgattgtctcaggcatgctggaacatgaaacgattcagggcgtgtctggggtgaagcccacagggttgagaaagcgaacctccagtatcgccgatgagggcacctacacactggactccatcctccggcagctcaactccttccactcggtcatgtgtcagcatggcatggaccctgaactgatcaagcaggtggtcaagcagatgttctacatcataggggccatcaccctgaacaaccttctcctgcggaaggacatgtgctcctggagtaaaggcatgcagatcaggtacaatgtcagtcaactggaagaatggctgcgtgacaagaatctgatgaatagtggggctaaagaaaccctggaacctctcattcaggctgctcaacttttgcaagtgaaaaagaaaacagatgatgatgcagaagccatttgttctatgtgcaatgctttaactactgcccagattgtgaaagtgttgaatttgtatactccagttaatgagtttgaagaaagagtctctgtgtcgttcattcgtactatacagatgcgtttacgagacaggaaagactctccccagctgctcatggatgctaaacacatctttcctgtcacctttcctttcaacccatcttccctcgcactagaaaccatccagattccagccagcctcggcctgggcttcatttcacgggtctga

SEQ ID NO: 156833 - DNA, 12225 bp, Homo sapiens
  Payload ID: 10742
  Gene Symbol: MYO5A
  Gene Name: myosin VA
  Uniprot ID: Q9Y4I1
  ENST ID: ENST00000399231
  CDS Start-End: 245-5812
accccgggcaggtggagcgctcgcggctgctcgcggcgagcccgggagtgatggcgaggcccctgcgggcggccagcgcctgaggcgccccgccccgccccgccccgcgcggccctccccgcccggccctgccctgccctgctccctgccggcggctgcgggcgcttcctagtccgctcgggcggccgcccaggcgaggtgcggcctccgcacaggcggggggcgtaggcgcgcggggcccgccatggctgcgtcggagctctacacaaagtttgccagggtttggatacctgatccagaggaagtctggaagtcagcagagctgctcaaagattataagccaggagataaagtcctcctgcttcacctcgaggaaggaaaggatttggaataccatctagatccaaagaccaaggagctgcctcacttacgaaatcctgacatacttgttggtgaaaatgacctcacagccctcagctatcttcatgagcctgctgtgctccataatctcagagtccgctttattgattccaaacttatttatacgtattgtggtatagtcctagtagctataaatccctatgaacagctgcctatttatggagaagatattattaatgcatacagtggtcagaacatgggtgatatggatccacatatctttgcagtagctgaagaagcttacaagcaaatggccagagatgaacgaaatcagtccatcatcgtaagtggagagtctggggcaggaaaaacagtctcagctaagtatgccatgcgatactttgcaactgtgagtggttctgccagtgaggccaatgtggaggaaaaggtcttggcctccaaccccatcatggagtccattggaaatgctaaaacaaccaggaatgataatagcagccgttttgggaagtatattgagattggttttgataagagatatcgaatcattggtgccaatatgagaacttatcttttagagaaatccagagtggtattccaggcagaagaggagagaaactatcatatcttctatcagctttgtgcctcagcaaagttacctgaatttaaaatgctacgattaggaaatgcagataactttaattacacaaaacaaggaggcagtcctgtgattgaaggagtggatgatgcaaaggagatggcacatactaggcaggcctgcactttgctaggaattagtgaatctcatcaaatgggaattttccgaatacttgctggcatccttcacttaggcaatgttggatttacatcccgagatgcagacagctgcacaatacctcccaagcatgaacctctctgcatcttctgtgaactcatgggtgtggactatgaggagatgtgtcactggctctgccatcggaaactggctactgccacagagacatacatcaagcccatctccaagctgcaggccacgaatgcccgcgatgctttggccaagcacatctatgccaagctctttaactggattgtagataatgtcaatcaggctctccattctgctgtcaaacagcactcttttattggtgtgctagacatttacggatttgaaacatttgagataaatagttttgaacagttttgcataaattatgcaaatgaaaaactacagcaacaattcaatatgcatgtcttcaaattggagcaagaagaatatatgaaggaacaaattccatggacactcatagatttttatgataatcagccttgtattaatcttatagaatcaaaactaggcattctagatttactggatgaggaatgcaagatgcctaaaggcacagatgacacctgggcccaaaaattgtacaacacacatttgaacaaatgtgcactctttgaaaagcctcgtctatcaaacaaagctttcatcatccaacattttgctgacaaagtggaataccagtgtgaaggatttctcgaaaagaataaagacaccgtttttgaagaacaaattaaagttcttaaatcaagcaagtttaagatgctaccagaactatttcaagatgatgagaaggccatcagtccaacttcagccacctcctcagggcgcacacccctcacacgaactcctgcaaagcccaccaaaggcagaccaggccaaatggccaaagagcacaagaaaacagtggggcatcagttcagaaactccctgcacctgcttatggagacactcaatgccactacccctcactatgtgcgctgtatcaagcctaatgacttcaagttcccattcacgtttgatgagaagagggcagtgcagcagctgagagcatgtggtgtcctggaaaccatccgaatcagtgcggccggtttcccctcacggtggacttaccaagaatttttcagccgctaccgtgtcctaatgaagcagaaagatgtgctgagtgacagaaagcaaacatgcaagaatgtgttagagaaactgatactggacaaggacaaataccagtttggtaagacaaagatctttttccgtgccggtcaagtggcctatctagaaaaattgagagctgacaaactgagagctgcctgcatccggatccagaagaccatccgagggtggctgctgagaaagaagtacctacgcatgcggaaggcagccatcaccatgcagagatacgtgcggggctaccaggcccgatgctatgctaagtttctgcgcagaaccaaggcagcaaccatcattcaaaagtactggcgcatgtatgtggtccgcaggaggtacaagattagacgagctgccactatcgttcttcagtcttacttgcgaggcttcttggccagaaataggtatcgcaagatactccgtgagcacaaagcagtcatcattcagaagcgagtccggggctggctggcccgcacacactacaagaggagcatgcatgccatcatctaccttcagtgctgcttcaggcggatgatggccaagcgtgagctaaagaagctcaaaatcgaggctcgctcagtggagcgctataagaagctgcacatcggcatggagaacaagatcatgcagctgcagcgcaaagttgatgagcagaacaaagactacaaatgccttgtggagaaactaaccaatctggaaggaatatacaactctgagactgagaaactacgaagtgacttagaacgtcttcaactaagtgaagaggaagcgaaagttgccactgggcgggtccttagtctgcaggaagaaattgccaagctccggaaagacctggagcaaactcgttcagagaaaaaatgcattgaggaacatgcagatcgatacaaacaagaaacagagcagctggtatcaaatctgaaggaagaaaatactttgctgaagcaagaaaaagaagccctcaatcaccgcatcgtgcagcaggctaaggagatgacagaaactatggagaagaagttagtagaagaaacgaaacaactggaactcgaccttaatgatgaaaggctgagatatcagaaccttctgaatgagttcagtcgcctggaagaaagatatgatgacctcaaggaagagatgacccttatggtgcatgtgcctaagcctggacacaagagaacagactccacccacagcagcaacgagtctgaatatatctttagctctgaaattgcagaaatggaagacattccatcaaggacagaggaaccaagtgagaagaaggtacctctggacatgtcattgttccttaagctccagaagcgggtcacagagctggagcaggagaagcaggtgatgcaggatgagctggaccgcaaggaggagcaggtgctccgcagcaaggccaaggaagaagaaagaccacaaattagaggtgcagaactggaatatgagtcactcaagcgtcaagaactagaatcagaaaacaaaaaactgaagaatgagctaaatgagttgcgcaaggccctcagtgagaaaagtgccccagaggtgaccgccccaggtgcacctgcctaccgtgtcctcatggagcagctgacctctgtgagcgaggagcttgatgtccgcaaggaggaagtcctcatcttaaggtctcaactggtgagccagaaagaggccatccaacccaaggatgacaagaatacaatgacagattccacaatacttttggaagatgtacaaaaaatgaaagataaaggtgaaatagcacaagcatacattggtttgaaagaaacaaatagatcatctgctctggattaccatgagttgaatgaggatggagagctgtggctggtttatgaagggttaaaacaagccaacaggctcctggaatcccagctgcagtcacagaagaggagccatgagaatgaggccgaggccctccgtggggagatccagagcctgaaggaggagaacaaccgacagcagcagctgctggcccagaacctgcagctgcccccagaggcccgcattgaggccagcctgcagcacgagatcacccggctgaccaacgaaaacttggatttgatggaacaacttgaaaaacaggataagacggtccgtaaactgaaaaaacaactgaaagtatttgccaaaaaaattggcgaactagaagtgggccagatggagaacatatccccaggacagatcattgatgaacccatccgaccagtcaacattcccaggaaagaaaaggatttccaagggatgctggaatacaagaaggaggatgagcaaaaacttgttaagaacctgattctggaactgaagccacgtggtgtagcagtcaatttgattccaggattaccggcatatatcctgttcatgtgtgttcgacatgctgactacctgaatgatgatcagaaagtaaggtcgttgctaacatcaacaattaacagcatcaaaaaagtattgaagaaaagaggtgatgattttgaaaccgtctccttctggctctctaacacatgccgatttttgcactgcttgaaacagtacagtggagaagagggctttatgaagcacaacacatctcgccagaatgaacactgcctcaccaattttgacctggctgagtatcggcaggtgctgagtgacttggccattcagatctaccagcagctcgtgcgggtgttagagaacatccttcagccaatgattgtctcaggcatgctggaacatgaaacgattcagggcgtgtctggggtgaagcccacagggttgagaaagcgaacctccagtatcgccgatgagggcacctacacactggactccatcctccggcagctcaactccttccactcggtcatgtgtcagcatggcatggaccctgaactgatcaagcaggtggtcaagcagatgttctacatcataggggccatcaccctgaacaaccttctcctgcggaaggacatgtgctcctggagtaaaggcatgcagatcaggtacaatgtcagtcaactggaagaatggctgcgtgacaagaatctgatgaatagtggggctaaagaaaccctggaacctctcattcaggctgctcaacttttgcaagtgaaaaagaaaacagatgatgatgcagaagccatttgttctatgtgcaatgctttaactactgcccagattgtgaaagtgttgaatttgtatactccagttaatgagtttgaagaaagagtctctgtgtcgttcattcgtactatacagatgcgtttacgagacaggaaagactctccccagctgctcatggatgctaaacacatctttcctgtcacctttcctttcaacccatcttccctcgcactagaaaccatccagattccagccagcctcggcctgggcttcatttcacgggtctgaaagtgatgtccaggcaaaaattgacaatacatttcttgcccgaaataagaacccattatttccagtgagttactgaaaatacatttttaaagagaaagtactgattatctcccaaatgagaagtcattaactggaaatctccctagaatactttcatcactttggaaacaaagataggctctttcgtgctgtgttatctttatagcaacactcatccttaaccaactaggtaccgtgagtttacatacaggagaatgatggaaggaagggaggaaggaaaggaggagaaaaatgtgtcttcagctggcagcatttattttaaatccttagcactgagtttgaatggtataaaaagtataacttccatagatgagctgttgttaggaaggcaccaaagaacctcctctgcactaaacaggagaatggaaagaaaagtctccattgagtacatatcatgtcagtttagtaatcaattatgttgatattgttaaactggttcaaagaaataaactggcaatatgtaaagtaattcctcatttgtgtcactatgatatagagatattaaaggaatgttggtttgctaaatagtatagatgtccatttgtactatagtttactgagcattttaaattgctgctacatactgtcttcttaaaatgtaagtgatattaggcactacaataagtttctcttgtcaattctgtttacaattcaatcagatcacagttttaactggattatatgcaaatacctacagattcacctgcacaagtagcagacactggaaagtcatgtagtaatatgacaaaatgcttgacatttaggggtaggattagacaaagtggctattgttgatgtcattatttattcaggatgtattacattgatgtgctcattaattttccctgggtggatattgcgtcagggtacagtgttctgtgaagtgacttatttttaactaccagatctgattccttcagtgcatattttcaaccttgacaggttttctctcttcttaatttattaagaattaatctcggctgggcgcggtggctcacgcctgtaatcccagcactttgggaagccaaggtgggcggatcacttcaggttaggagttggagaccagcctggccaacatggcgaaaccctgtctctactaaaaatacaaaaattagccgggcgtggtggcacttgcctgtaatcccagctactcgggaggctgaggcacgagaatcgattaaacctgggaggcggagattgcaatgagatcgaaccactgcactccagcctgggtgacagagagagacactgccttggaaaaaaaaagaatctcactcactatctagagaggattgtcagaatattcacgattcaggtcttgaaactttgattatgcaaaagaaggtatataataaatatttcattatgattcagtttttaaggctttgcagcttctataagtgttctcagatgccactagataattttaaaagcatcatattagaaatactttaagaagacttatataagaaatagaagattgttgaattttacagaggatttggttcattaagacccagattctgtaagttttcattctgaaattctagttaaacatattcaccatttttcttaggaatcttatacaataaatccttcaggttgcacaaaagcaaattattagttttcattagaaactctggttctgaattacaatcataggttatataaatttaactgttagatggtctataaatcttattaaaatatgtgcaatatttatggaagtcaaacagcttcatatcagtgataaagattgttattaaaagataaatactgtctgttaatttacatgggcctcaagttcctcgtttataaaataagagagttggacactgattcttaacatctcctccacatttaaaattctctcttctcagcccttagattctagagagaaaaagctgcagttactcagtaagtccattctctgatggaaagaccagtgtgtagtgcctgtcaattccttaggattaatcaaatgtaaaatcacaagtttgtgtagctgtaacctttcttaaatgtacatgatttatgtacatgcttttagaaggtcctactatatttgtattataattagtttaagtaatttttattacatcatgtattgctttattcagtttgaatacatttatttatttatttgcagtatcaaccagaaacactaccaattgcatcaaattctcccagtttttcctggttgtcaatgcggttttcaatgcacaattaagtcatagccatttggttcgtaccaaatgtgtcagaatctaacagcatccgataggctgtaagttggggagttgctaagaaaatgcaacgtggtacaggctgtccgcctcagccctggaaatctcccagacctcccccagcttcatcctgtgtagcacgactcaacgtgcaccctgaatcttctcaggtcttccaggtcatgctgtagctgtcactgccatgcagcccttttttttactccggacagctcatgtactgaagcgtcatgaaagaaaggctgtggtctgagcccttctctcccatctcctgtctttgtcctgtcaagtgctggagccagagctcctacagctgcccttggtggtttctcctgttcagcgatggtggcacaaaggttctgctattccagggctccagcttcctcccaggtctacccagagctccagatgggggtctgaattaacctctcttggtggcctggagatttttagtcattgacaagaataccttgtaaccagggaaccccaaggcccagtaaatgattctgtataccattttcttgaaggtacaagaagattctgccgactatggggatctttgggccagtttgaggattgctttccctctgaggttctttctctctgtcagccacactttctcacccaacttcagacacaccctgccagcctttcccctactcattcactcttccccttccctcaacttaatcgtctatcccgttgcctgctgtttgactgtgcactgaaggcaggtggatggagtcagtcctcagttgcccctgctggccttcctggtgcttaccatcagcccaatctttgcacagtccttgttgttcttacttctctgcatgcattccttcagaagatcagtcatcaactttttcttaattcctctgtgacacacaatgggaattcaaaggaagagatcttaaaagtcacaacagttctttatcttaataatcccctccccattcaccttactacatgcagactcacctcacacccttacaacttgaagctgaaaatttaaaagtaatttccctttttgcagcttttcctcaggttaaggctttgatctgcctgagagtaactctaaaaggagggaagataaatatgggataaaatccacaaagtgtagcttctaattcctttggaagtttaaaaaatttccacatatctgatgcttcttttgtcaggtgcagaagcacaaaaacatattccgaagccaactgatagggaatttggggattattgtcagtttggagaatttgctgtgttatttcttcatttccatggatagctcatagttggctctttctgggtgagtaattatgtgtaatatagatcaaatcttttactaaggttacagctacatgttaggggaggctatgaaaatactatattattataatttcagtgcagtgattgttgtgagaaataactttcatggtaaccctaggaaaatgggcacctgccaccatcctgagaagtcctcacacaatgccctttctctcttacacacacacacacacacatacacacacacacacccccgtcactaattcatagagttccttagcaggcatagtcaaggatcctctgggtaatgtcagctgcttagtgataaaacagagccaaaactagtgcatcctgttgaaagtaatgcagaaacagtacctgggtccagatatgctttcctgcggcgctttcctctgttacctcgtttcatcctcacagcagcatggacggtaggtggggtcgcttctacaatcatttctgatgatagcttgggaatagagataggggcagtgacttgcctgatgtcgcacagccctctggctgtcctgctttcccatatggagcagtggtggtgtgggcacctgtgatgcaggagactttaaaaatgtcgtgaggtcacgtgctgcccctcctggtacgtgtggaatgcccctggccagcaaggggtgcttttttatcagagttggcagctggcatgtgggaaccgagcaagtgctgcgtaccaagttacttgttttaaggagaccaagtgctcagcgccaggtggttttcttttttgtcatagttacttgctataactcagcttgacttctgtcatgaatcagtgctctctgggaggatgcaatactctgtttgggcattaattggtagcaggttgtctcaaccaaaaagacaggaaacagcaaaagcctctctgaaattaagaggaaagttactctccccacacccatcagagtctttattggagccaccaggtgagctgtgcagcctggacaggcctgcagctataggccaccttcccagtttaggtcctcagcacaggggagcccaagtcactgggtgccttccgagggctgtcactgggcaggccatatacaagtcagtgtgtgcgtgggcactgcagtgtgtgcatgccgtaggtgttgatgggtgctaggaggggtgtcgtgtgcatgcgcgttgaagaggatctgtattgccgtgacctctgttcatggatgagtgcattgtaatttgttctcaggctgtgctgtgagggccgccttaacccttgctcccttcccttctagagctgccttaagttctccagaacttttcttctgtaaaggatatcttgcctggaagggatatcttgccctgtttctcaaggttttgtgagagttttgactggatgtggccctgcatgaccctccttctcctgtacttcctctttcctttccaaatgggaattagaactgtggggcagcaacagtctcagagccagtgagaggccagcttagagaatgcttctgagttagtgggactctgtgtcacaagtaagcaaatgaatatatgaaagaaattatggagataagttagattcttggtaatacttaaatgtcttgctttctactaaccttttgttactaaaggtaaagggtataactcaaactttttgtggacattcttttcaaaattttttaagaaccctgtactataaaaggttgagtaaaaacaggaaagcgtgctataagttcaaatctgttgtattaccctaaattagataaaccaacctgaattatagtagatttctcaatagatgaggaactgaaaaatactatgtaaaatatcttccaaaatgctttttatactttttttatttgtaatttggtctatctaaaatgttcgttagcttaacttaatgggcgttattggattcatatgactaacgtttcctcagtattgtaatgcttgaaatatttgaaagaaaaaatgttgttttttagttgaaactggtatatataattcagtgcttggcaggttagtatatttttatgcatttttcagagtcagcagtttcaaatcttattgttatcatgttataaaattttagcccacatttcaggctccgtaaatcatttgagccattattttttcccaacaaatggtgaattttttctttaaatgtggatatatatgttgtaatttatgattcctggttatgtatttttgtgggatcctgcagtaaaattgacttttttgtgtctttgggagatttaaattgcgctaacagtgttgcgcaaaaatgagttcatgccatttaacatattgtattttaattattaactgtattaatttactatgaaatggacatccttttaactaaaatggaattgaacattgcagttttcaaatatttttccttgttgggtctggaaaaggaattctactttgatctgcatagaaaattttgatacaattttttgaaagttcttaggtgaaacatttacccattaaaaaggaagcagaaatactgagacatgaaaggcattatcaactaactctagactctagaacccattctagcatatctcacgtgcaatttttaaaaataagttaataattcatctcatatcaacaaaagcctttgaaacatgggttttcactagatatcacctagtgctaagataaaaaccaaaacaatatcagaattacatttatgctctaaatttgtagttgtccattgttgtgcttagtaaatgtgtgtcattaatgctgtattctcctagctattatggaaacttgtttaaataaagatatggatataaa

SEQ ID NO: 156834 - DNA, 12220 bp, Homo sapiens
  Payload ID: 10742
  Gene Symbol: MYO5A
  Gene Name: myosin VA
  ENST ID: ENST00000399233
  CDS Start-End: 245-5812
accccgggcaggtggagcgctcgcggctgctcgcggcgagcccgggagtgatggcgaggcccctgcgggcggccagcgcctgaggcgccccgccccgccccgccccgcgcggccctccccgcccggccctgccctgccctgctccctgccggcggctgcgggcgcttcctagtccgctcgggcggccgcccaggcgaggtgcggcctccgcacaggcggggggcgtaggcgcgcggggcccgccatggctgcgtcggagctctacacaaagtttgccagggtttggatacctgatccagaggaagtctggaagtcagcagagctgctcaaagattataagccaggagataaagtcctcctgcttcacctcgaggaaggaaaggatttggaataccatctagatccaaagaccaaggagctgcctcacttacgaaatcctgacatacttgttggtgaaaatgacctcacagccctcagctatcttcatgagcctgctgtgctccataatctcagagtccgctttattgattccaaacttatttatacgtattgtggtatagtcctagtagctataaatccctatgaacagctgcctatttatggagaagatattattaatgcatacagtggtcagaacatgggtgatatggatccacatatctttgcagtagctgaagaagcttacaagcaaatggccagagatgaacgaaatcagtccatcatcgtaagtggagagtctggggcaggaaaaacagtctcagctaagtatgccatgcgatactttgcaactgtgagtggttctgccagtgaggccaatgtggaggaaaaggtcttggcctccaaccccatcatggagtccattggaaatgctaaaacaaccaggaatgataatagcagccgttttgggaagtatattgagattggttttgataagagatatcgaatcattggtgccaatatgagaacttatcttttagagaaatccagagtggtattccaggcagaagaggagagaaactatcatatcttctatcagctttgtgcctcagcaaagttacctgaatttaaaatgctacgattaggaaatgcagataactttaattacacaaaacaaggaggcagtcctgtgattgaaggagtggatgatgcaaaggagatggcacatactaggcaggcctgcactttgctaggaattagtgaatctcatcaaatgggaattttccgaatacttgctggcatccttcacttaggcaatgttggatttacatcccgagatgcagacagctgcacaatacctcccaagcatgaacctctctgcatcttctgtgaactcatgggtgtggactatgaggagatgtgtcactggctctgccatcggaaactggctactgccacagagacatacatcaagcccatctccaagctgcaggccacgaatgcccgcgatgctttggccaagcacatctatgccaagctctttaactggattgtagataatgtcaatcaggctctccattctgctgtcaaacagcactcttttattggtgtgctagacatttacggatttgaaacatttgagataaatagttttgaacagttttgcataaattatgcaaatgaaaaactacagcaacaattcaatatgcatgtcttcaaattggagcaagaagaatatatgaaggaacaaattccatggacactcatagatttttatgataatcagccttgtattaatcttatagaatcaaaactaggcattctagatttactggatgaggaatgcaagatgcctaaaggcacagatgacacctgggcccaaaaattgtacaacacacatttgaacaaatgtgcactctttgaaaagcctcgtctatcaaacaaagctttcatcatccaacattttgctgacaaagtggaataccagtgtgaaggatttctcgaaaagaataaagacaccgtttttgaagaacaaattaaagttcttaaatcaagcaagtttaagatgctaccagaactatttcaagatgatgagaaggccatcagtccaacttcagccacctcctcagggcgcacacccctcacacgaactcctgcaaagcccaccaaaggcagaccaggccaaatggccaaagagcacaagaaaacagtggggcatcagttcagaaactccctgcacctgcttatggagacactcaatgccactacccctcactatgtgcgctgtatcaagcctaatgacttcaagttcccattcacgtttgatgagaagagggcagtgcagcagctgagagcatgtggtgtcctggaaaccatccgaatcagtgcggccggtttcccctcacggtggacttaccaagaatttttcagccgctaccgtgtcctaatgaagcagaaagatgtgctgagtgacagaaagcaaacatgcaagaatgtgttagagaaactgatactggacaaggacaaataccagtttggtaagacaaagatctttttccgtgccggtcaagtggcctatctagaaaaattgagagctgacaaactgagagctgcctgcatccggatccagaagaccatccgagggtggctgctgagaaagaagtacctacgcatgcggaaggcagccatcaccatgcagagatacgtgcggggctaccaggcccgatgctatgctaagtttctgcgcagaaccaaggcagcaaccatcattcaaaagtactggcgcatgtatgtggtccgcaggaggtacaagattagacgagctgccactatcgttcttcagtcttacttgcgaggcttcttggccagaaataggtatcgcaagatactccgtgagcacaaagcagtcatcattcagaagcgagtccggggctggctggcccgcacacactacaagaggagcatgcatgccatcatctaccttcagtgctgcttcaggcggatgatggccaagcgtgagctaaagaagctcaaaatcgaggctcgctcagtggagcgctataagaagctgcacatcggcatggagaacaagatcatgcagctgcagcgcaaagttgatgagcagaacaaagactacaaatgccttgtggagaaactaaccaatctggaaggaatatacaactctgagactgagaaactacgaagtgacttagaacgtcttcaactaagtgaagaggaagcgaaagttgccactgggcgggtccttagtctgcaggaagaaattgccaagctccggaaagacctggagcaaactcgttcagagaaaaaatgcattgaggaacatgcagatcgatacaaacaagaaacagagcagctggtatcaaatctgaaggaagaaaatactttgctgaagcaagaaaaagaagccctcaatcaccgcatcgtgcagcaggctaaggagatgacagaaactatggagaagaagttagtagaagaaacgaaacaactggaactcgaccttaatgatgaaaggctgagatatcagaaccttctgaatgagttcagtcgcctggaagaaagatatgatgacctcaaggaagagatgacccttatggtgcatgtgcctaagcctggacacaagagaacagactccacccacagcagcaacgagtctgaatatatctttagctctgaaattgcagaaatggaagacattccatcaaggacagaggaaccaagtgagaagaaggtacctctggacatgtcattgttccttaagctccagaagcgggtcacagagctggagcaggagaagcaggtgatgcaggatgagctggaccgcaaggaggagcaggtgctccgcagcaaggccaaggaagaagaaagaccacaaattagaggtgcagaactggaatatgagtcactcaagcgtcaagaactagaatcagaaaacaaaaaactgaagaatgagctaaatgagttgcgcaaggccctcagtgagaaaagtgccccagaggtgaccgccccaggtgcacctgcctaccgtgtcctcatggagcagctgacctctgtgagcgaggagcttgatgtccgcaaggaggaagtcctcatcttaaggtctcaactggtgagccagaaagaggccatccaacccaagccctctcagaatacaatgacagattccacaatacttttggaagatgtacaaaaaatgaaagataaaggtgaaatagcacaagcatacattggtttgaaagaaacaaatagatcatctgctctggattaccatgagttgaatgaggatggagagctgtggctggtttatgaagggttaaaacaagccaacaggctcctggaatcccagctgcagtcacagaagaggagccatgagaatgaggccgaggccctccgtggggagatccagagcctgaaggaggagaacaaccgacagcagcagctgctggcccagaacctgcagctgcccccagaggcccgcattgaggccagcctgcagcacgagatcacccggctgaccaacgaaaacttggatttgatggaacaacttgaaaaacaggataagacggtccgtaaactgaaaaaacaactgaaagtatttgccaaaaaaattggcgaactagaagtgggccagatggagaacatatccccaggacagatcattgatgaacccatccgaccagtcaacattcccaggaaagaaaaggatttccaagggatgctggaatacaagaaggaggatgagcaaaaacttgttaagaacctgattctggaactgaagccacgtggtgtagcagtcaatttgattccaggattaccggcatatatcctgttcatgtgtgttcgacatgctgactacctgaatgatgatcagaaagtaaggtcgttgctaacatcaacaattaacagcatcaaaaaagtattgaagaaaagaggtgatgattttgaaaccgtctccttctggctctctaacacatgccgatttttgcactgcttgaaacagtacagtggagaagagggctttatgaagcacaacacatctcgccagaatgaacactgcctcaccaattttgacctggctgagtatcggcaggtgctgagtgacttggccattcagatctaccagcagctcgtgcgggtgttagagaacatccttcagccaatgattgtctcaggcatgctggaacatgaaacgattcagggcgtgtctggggtgaagcccacagggttgagaaagcgaacctccagtatcgccgatgagggcacctacacactggactccatcctccggcagctcaactccttccactcggtcatgtgtcagcatggcatggaccctgaactgatcaagcaggtggtcaagcagatgttctacatcataggggccatcaccctgaacaaccttctcctgcggaaggacatgtgctcctggagtaaaggcatgcagatcaggtacaatgtcagtcaactggaagaatggctgcgtgacaagaatctgatgaatagtggggctaaagaaaccctggaacctctcattcaggctgctcaacttttgcaagtgaaaaagaaaacagatgatgatgcagaagccatttgttctatgtgcaatgctttaactactgcccagattgtgaaagtgttgaatttgtatactccagttaatgagtttgaagaaagagtctctgtgtcgttcattcgtactatacagatgcgtttacgagacaggaaagactctccccagctgctcatggatgctaaacacatctttcctgtcacctttcctttcaacccatcttccctcgcactagaaaccatccagattccagccagcctcggcctgggcttcatttcacgggtctgaaagtgatgtccaggcaaaaattgacaatacatttcttgcccgaaataagaacccattatttccagtgagttactgaaaatacatttttaaagagaaagtactgattatctcccaaatgagaagtcattaactggaaatctccctagaatactttcatcactttggaaacaaagataggctctttcgtgctgtgttatctttatagcaacactcatccttaaccaactaggtaccgtgagtttacatacaggagaatgatggaaggaagggaggaaggaaaggaggagaaaaatgtgtcttcagctggcagcatttattttaaatccttagcactgagtttgaatggtataaaaagtataacttccatagatgagctgttgttaggaaggcaccaaagaacctcctctgcactaaacaggagaatggaaagaaaagtctccattgagtacatatcatgtcagtttagtaatcaattatgttgatattgttaaactggttcaaagaaataaactggcaatatgtaaagtaattcctcatttgtgtcactatgatatagagatattaaaggaatgttggtttgctaaatagtatagatgtccatttgtactatagtttactgagcattttaaattgctgctacatactgtcttcttaaaatgtaagtgatattaggcactacaataagtttctcttgtcaattctgtttacaattcaatcagatcacagttttaactggattatatgcaaatacctacagattcacctgcacaagtagcagacactggaaagtcatgtagtaatatgacaaaatgcttgacatttaggggtaggattagacaaagtggctattgttgatgtcattatttattcaggatgtattacattgatgtgctcattaattttccctgggtggatattgcgtcagggtacagtgttctgtgaagtgacttatttttaactaccagatctgattccttcagtgcatattttcaaccttgacaggttttctctcttcttaatttattaagaattaatctcggctgggcgcggtggctcacgcctgtaatcccagcactttgggaagccaaggtgggcggatcacttcaggttaggagttggagaccagcctggccaacatggcgaaaccctgtctctactaaaaatacaaaaattagccgggcgtggtggcacttgcctgtaatcccagctactcgggaggctgaggcacgagaatcgattaaacctgggaggcggagattgcaatgagatcgaaccactgcactccagcctgggtgacagagagagacactgccttggaaaaaaaaagaatctcactcactatctagagaggattgtcagaatattcacgattcaggtcttgaaactttgattatgcaaaagaaggtatataataaatatttcattatgattcagtttttaaggctttgcagcttctataagtgttctcagatgccactagataattttaaaagcatcatattagaaatactttaagaagacttatataagaaatagaagattgttgaattttacagaggatttggttcattaagacccagattctgtaagttttcattctgaaattctagttaaacatattcaccatttttcttaggaatcttatacaataaatccttcaggttgcacaaaagcaaattattagttttcattagaaactctggttctgaattacaatcataggttatataaatttaactgttagatggtctataaatcttattaaaatatgtgcaatatttatggaagtcaaacagcttcatatcagtgataaagattgttattaaaagataaatactgtctgttaatttacatgggcctcaagttcctcgtttataaaataagagagttggacactgattcttaacatctcctccacatttaaaattctctcttctcagcccttagattctagagagaaaaagctgcagttactcagtaagtccattctctgatggaaagaccagtgtgtagtgcctgtcaattccttaggattaatcaaatgtaaaatcacaagtttgtgtagctgtaacctttcttaaatgtacatgatttatgtacatgcttttagaaggtcctactatatttgtattataattagtttaagtaatttttattacatcatgtattgctttattcagtttgaatacatttatttatttatttgcagtatcaaccagaaacactaccaattgcatcaaattctcccagtttttcctggttgtcaatgcggttttcaatgcacaattaagtcatagccatttggttcgtaccaaatgtgtcagaatctaacagcatccgataggctgtaagttggggagttgctaagaaaatgcaacgtggtacaggctgtccgcctcagccctggaaatctcccagacctcccccagcttcatcctgtgtagcacgactcaacgtgcaccctgaatcttctcaggtcttccaggtcatgctgtagctgtcactgccatgcagcccttttttttactccggacagctcatgtactgaagcgtcatgaaagaaaggctgtggtctgagcccttctctcccatctcctgtctttgtcctgtcaagtgctggagccagagctcctacagctgcccttggtggtttctcctgttcagcgatggtggcacaaaggttctgctattccagggctccagcttcctcccaggtctacccagagctccagatgggggtctgaattaacctctcttggtggcctggagatttttagtcattgacaagaataccttgtaaccagggaaccccaaggcccagtaaatgattctgtataccattttcttgaaggtacaagaagattctgccgactatggggatctttgggccagtttgaggattgctttccctctgaggttctttctctctgtcagccacactttctcacccaacttcagacacaccctgccagcctttcccctactcattcactcttccccttccctcaacttaatcgtctatcccgttgcctgctgtttgactgtgcactgaaggcaggtggatggagtcagtcctcagttgcccctgctggccttcctggtgcttaccatcagcccaatctttgcacagtccttgttgttcttacttctctgcatgcattccttcagaagatcagtcatcaactttttcttaattcctctgtgacacacaatgggaattcaaaggaagagatcttaaaagtcacaacagttctttatcttaataatcccctccccattcaccttactacatgcagactcacctcacacccttacaacttgaagctgaaaatttaaaagtaatttccctttttgcagcttttcctcaggttaaggctttgatctgcctgagagtaactctaaaaggagggaagataaatatgggataaaatccacaaagtgtagcttctaattcctttggaagtttaaaaaatttccacatatctgatgcttcttttgtcaggtgcagaagcacaaaaacatattccgaagccaactgatagggaatttggggattattgtcagtttggagaatttgctgtgttatttcttcatttccatggatagctcatagttggctctttctgggtgagtaattatgtgtaatatagatcaaatcttttactaaggttacagctacatgttaggggaggctatgaaaatactatattattataatttcagtgcagtgattgttgtgagaaataactttcatggtaaccctaggaaaatgggcacctgccaccatcctgagaagtcctcacacaatgccctttctctcttacacacacacacacacacatacacacacacacacccccgtcactaattcatagagttccttagcaggcatagtcaaggatcctctgggtaatgtcagctgcttagtgataaaacagagccaaaactagtgcatcctgttgaaagtaatgcagaaacagtacctgggtccagatatgctttcctgcggcgctttcctctgttacctcgtttcatcctcacagcagcatggacggtaggtggggtcgcttctacaatcatttctgatgatagcttgggaatagagataggggcagtgacttgcctgatgtcgcacagccctctggctgtcctgctttcccatatggagcagtggtggtgtgggcacctgtgatgcaggagactttaaaaatgtcgtgaggtcacgtgctgcccctcctggtacgtgtggaatgcccctggccagcaaggggtgcttttttatcagagttggcagctggcatgtgggaaccgagcaagtgctgcgtaccaagttacttgttttaaggagaccaagtgctcagcgccaggtggttttcttttttgtcatagttacttgctataactcagcttgacttctgtcatgaatcagtgctctctgggaggatgcaatactctgtttgggcattaattggtagcaggttgtctcaaccaaaaagacaggaaacagcaaaagcctctctgaaattaagaggaaagttactctccccacacccatcagagtctttattggagccaccaggtgagctgtgcagcctggacaggcctgcagctataggccaccttcccagtttaggtcctcagcacaggggagcccaagtcactgggtgccttccgagggctgtcactgggcaggccatatacaagtcagtgtgtgcgtgggcactgcagtgtgtgcatgccgtaggtgttgatgggtgctaggaggggtgtcgtgtgcatgcgcgttgaagaggatctgtattgccgtgacctctgttcatggatgagtgcattgtaatttgttctcaggctgtgctgtgagggccgccttaacccttgctcccttcccttctagagctgccttaagttctccagaacttttcttctgtaaaggatatcttgcctggaagggatatcttgccctgtttctcaaggttttgtgagagttttgactggatgtggccctgcatgaccctccttctcctgtacttcctctttcctttccaaatgggaattagaactgtggggcagcaacagtctcagagccagtgagaggccagcttagagaatgcttctgagttagtgggactctgtgtcacaagtaagcaaatgaatatatgaaagaaattatggagataagttagattcttggtaatacttaaatgtcttgctttctactaaccttttgttactaaaggtaaagggtataactcaaactttttgtggacattcttttcaaaattttttaagaaccctgtactataaaaggttgagtaaaaacaggaaagcgtgctataagttcaaatctgttgtattaccctaaattagataaaccaacctgaattatagtagatttctcaatagatgaggaactgaaaaatactatgtaaaatatcttccaaaatgctttttatactttttttatttgtaatttggtctatctaaaatgttcgttagcttaacttaatgggcgttattggattcatatgactaacgtttcctcagtattgtaatgcttgaaatatttgaaagaaaaaatgttgttttttagttgaaactggtatatataattcagtgcttggcaggttagtatatttttatgcatttttcagagtcagcagtttcaaatcttattgttatcatgttataaaattttagcccacatttcaggctccgtaaatcatttgagccattattttttcccaacaaatggtgaattttttctttaaatgtggatatatatgttgtaatttatgattcctggttatgtatttttgtgggatcctgcagtaaaattgacttttttgtgtctttgggagatttaaattgcgctaacagtgttgcgcaaaaatgagttcatgccatttaacatattgtattttaattattaactgtattaatttactatgaaatggacatccttttaactaaaatggaattgaacattgcagttttcaaatatttttccttgttgggtctggaaaaggaattctactttgatctgcatagaaaattttgatacaattttttgaaagttcttaggtgaaacatttacccattaaaaaggaagcagaaatactgagacatgaaaggcattatcaactaactctagactctagaacccattctagcatatctcacgtgcaatttttaaaaataagttaataattcatctcatatcaacaaaagcctttgaaacatgggttttcactagatatcacctagtgctaagataaaaaccaaaacaatatcagaattacatttatgctctaaatttgtagttgtccattgttgtgcttagtaaatgtgtgtcattaatgctgtattctcctagctattatggaaacttgtttaaataaagatatggat

SEQ ID NO: 156835 - DNA, 5989 bp, Homo sapiens
  Payload ID: 10742
  Gene Symbol: MYO5A
  Gene Name: myosin VA
  ENST ID: ENST00000553916
  CDS Start-End: 36-5597
gcacaggcggggggcgtaggcgcgcggggcccgccatggctgcgtcggagctctacacaaagtttgccagggtttggatacctgatccagaggaagtctggaagtcagcagagctgctcaaagattataagccaggagataaagtcctcctgcttcacctcgaggaaggaaaggatttggaataccatctagatccaaagaccaaggagctgcctcacttacgaaatcctgacatacttgttggtgaaaatgacctcacagccctcagctatcttcatgagcctgctgtgctccataatctcagagtccgctttattgattccaaacttatttatacgtattgtggtatagtcctagtagctataaatccctatgaacagctgcctatttatggagaagatattattaatgcatacagtggtcagaacatgggtgatatggatccacatatctttgcagtagctgaagaagcttacaagcaaatggccagagatgaacgaaatcagtccatcatcgtaagtggagagtctggggcaggaaaaacagtctcagctaagtatgccatgcgatactttgcaactgtgagtggttctgccagtgaggccaatgtggaggaaaaggtcttggcctccaaccccatcatggagtccattggaaatgctaaaacaaccaggaatgataatagcagccgttttgggaagtatattgagattggttttgataagagatatcgaatcattggtgccaatatgagaacttatcttttagagaaatccagagtggtattccaggcagaagaggagagaaactatcatatcttctatcagctttgtgcctcagcaaagttacctgaatttaaaatgctacgattaggaaatgcagataactttaattacacaaaacaaggaggcagtcctgtgattgaaggagtggatgatgcaaaggagatggcacatactaggcaggcctgcactttgctaggaattagtgaatctcatcaaatgggaattttccgaatacttgctggcatccttcacttaggcaatgttggatttacatcccgagatgcagacagctgcacaatacctcccaagcatgaacctctctgcatcttctgtgaactcatgggtgtggactatgaggagatgtgtcactggctctgccatcggaaactggctactgccacagagacatacatcaagcccatctccaagctgcaggccacgaatgcccgcgatgctttggccaagcacatctatgccaagctctttaactggattgtagataatgtcaatcaggctctccattctgctgtcaaacagcactcttttattggtgtgctagacatttacggatttgaaacatttgagataaatagttttgaacagttttgcataaattatgcaaatgaaaaactacagcaacaattcaatatgcatgtcttcaaattggagcaagaagaatatatgaaggaacaaattccatggacactcatagatttttatgataatcagccttgtattaatcttatagaatcaaaactaggcattctagatttactggatgaggaatgcaagatgcctaaaggcacagatgacacctgggcccaaaaattgtacaacacacatttgaacaaatgtgcactctttgaaaagcctcgtctatcaaacaaagctttcatcatccaacattttgctgacaaagtggaataccagtgtgaaggatttctcgaaaagaataaagacaccgtttttgaagaacaaattaaagttcttaaatcaagcaagtttaagatgctaccagaactatttcaagatgatgagaaggccatcagtccaacttcagccacctcctcagggcgcacacccctcacacgaactcctgcaaagcccaccaaaggcagaccaggccaaatggccaaagagcacaagaaaacagtggggcatcagttcagaaactccctgcacctgcttatggagacactcaatgccactacccctcactatgtgcgctgtatcaagcctaatgacttcaagttcccattcacgtttgatgagaagagggcagtgcagcagctgagagcatgtggtgtcctggaaaccatccgaatcagtgcggccggtttcccctcacggtggacttaccaagaatttttcagccgctaccgtgtcctaatgaagcagaaagatgtgctgagtgacagaaagcaaacatgcaagaatgtgttagagaaactgatactggacaaggacaaataccagtttggtaagacaaagatctttttccgtgccggtcaagtggcctatctagaaaaattgagagctgacaaactgagagctgcctgcatccggatccagaagaccatccgagggtggctgctgagaaagaagtacctacgcatgcggaaggcagccatcaccatgcagagatacgtgcggggctaccaggcccgatgctatgctaagtttctgcgcagaaccaaggcagcaaccatcattcaaaagtactggcgcatgtatgtggtccgcaggaggtacaagattagacgagctgccactatcgttcttcagtcttacttgcgaggcttcttggccagaaataggtatcgcaagatactccgtgagcacaaagcagtcatcattcagaagcgagtccggggctggctggcccgcacacactacaagaggagcatgcatgccatcatctaccttcagtgctgcttcaggcggatgatggccaagcgtgagctaaagaagctcaaaatcgaggctcgctcagtggagcgctataagaagctgcacatcggcatggagaacaagatcatgcagctgcagcgcaaagttgatgagcagaacaaagactacaaatgccttgtggagaaactaaccaatctggaaggaatatacaactctgagactgagaaactacgaagtgacttagaacgtcttcaactaagtgaagaggaagcgaaagttgccactgggcgggtccttagtctgcaggaagaaattgccaagctccggaaagacctggagcaaactcgttcagagaaaaaatgcattgaggaacatgcagatcgatacaaacaagaaacagagcagctggtatcaaatctgaaggaagaaaatactttgctgaagcaagaaaaagaagccctcaatcaccgcatcgtgcagcaggctaaggagatgacagaaactatggagaagaagttagtagaagaaacgaaacaactggaactcgaccttaatgatgaaaggctgagatatcagaaccttctgaatgagttcagtcgcctggaagaaagatatgatgacctcaaggaagagatgacccttatggtgcatgtgcctaagcctggacacaagagaacagactccacccacagcagcaacgagtctgaatatatctttagctctgaaattgcagaaatggaagacattccatcaaggacagaggaaccaagtgagaagaaggtacctctggacatgtcattgttccttaagctccagaagcgggtcacagagctggagcaggagaagcaggtgatgcaggatgagctggaccgcaaggaggagcaggtgctccgcagcaaggccaaggaagaagaaagaccacaaattagaggtgcagaactggaatatgagtcactcaagcgtcaagaactagaatcagaaaacaaaaaactgaagaatgagctaaatgagttgcgcaaggccctcagtgagaaaagtgccccagaggtgaccgccccaggtgcacctgcctaccgtgtcctcatggagcagctgacctctgtgagcgaggagcttgatgtccgcaaggaggaagtcctcatcttaaggtctcaactggtgagccagaaagaggccatccaacccaaggatgacaagaatacaatgacagattccacaatacttttggaagatgtacaaaaaatgaaagataaaggtgaaatagcacaagcatacattggtttgaaagaaacaaataggctcctggaatcccagctgcagtcacagaagaggagccatgagaatgaggccgaggccctccgtggggagatccagagcctgaaggaggagaacaaccgacagcagcagctgctggcccagaacctgcagctgcccccagaggcccgcattgaggccagcctgcagcacgagatcacccggctgaccaacgaaaacttgtattttgaggaattatatgcagatgaccctaagaagtatcaatcatatcggatttccctttacaaacggatgattgatttgatggaacaacttgaaaaacaggataagacggtccgtaaactgaaaaaacaactgaaagtatttgccaaaaaaattggcgaactagaagtgggccagatggagaacatatccccaggacagatcattgatgaacccatccgaccagtcaacattcccaggaaagaaaaggatttccaagggatgctggaatacaagaaggaggatgagcaaaaacttgttaagaacctgattctggaactgaagccacgtggtgtagcagtcaatttgattccaggattaccggcatatatcctgttcatgtgtgttcgacatgctgactacctgaatgatgatcagaaagtaaggtcgttgctaacatcaacaattaacagcatcaaaaaagtattgaagaaaagaggtgatgattttgaaaccgtctccttctggctctctaacacatgccgatttttgcactgcttgaaacagtacagtggagaagagggctttatgaagcacaacacatctcgccagaatgaacactgcctcaccaattttgacctggctgagtatcggcaggtgctgagtgacttggccattcagatctaccagcagctcgtgcgggtgttagagaacatccttcagccaatgattgtctcaggcatgctggaacatgaaacgattcagggcgtgtctggggtgaagcccacagggttgagaaagcgaacctccagtatcgccgatgagggcacctacacactggactccatcctccggcagctcaactccttccactcggtcatgtgtcagcatggcatggaccctgaactgatcaagcaggtggtcaagcagatgttctacatcataggggccatcaccctgaacaaccttctcctgcggaaggacatgtgctcctggagtaaaggcatgcagatcaggtacaatgtcagtcaactggaagaatggctgcgtgacaagaatctgatgaatagtggggctaaagaaaccctggaacctctcattcaggctgctcaacttttgcaagtgaaaaagaaaacagatgatgatgcagaagccatttgttctatgtgcaatgctttaactactgcccagattgtgaaagtgttgaatttgtatactccagttaatgagtttgaagaaagagtctctgtgtcgttcattcgtactatacagatgcgtttacgagacaggaaagactctccccagctgctcatggatgctaaacacatctttcctgtcacctttcctttcaacccatcttccctcgcactagaaaccatccagattccagccagcctcggcctgggcttcatttcacgggtctgaaagtgatgtccaggcaaaaattgacaatacatttcttgcccgaaataagaacccattatttccagtgagttactgaaaatacatttttaaagagaaagtactgattatctcccaaatgagaagtcattaactggaaatctccctagaatactttcatcactttggaaacaaagataggctctttcgtgctgtgttatctttatagcaacactcatccttaaccaactaggtaccgtgagtttacatacaggagaatgatggaaggaagggaggaaggaaaggaggagaaaaatgtgtcttcagctggcagcatttattttaaatccttagcactgagtttgaatggtataaaaagtataacttccatagatgagctgttgttaggaaggcac

SEQ ID NO: 156836 - DNA, 3008 bp, Homo sapiens
  Payload ID: 10742
  Gene Symbol: MYO5A
  Gene Name: myosin VA
  ENST ID: ENST00000556196
  CDS Start-End: 75-218
agtccgctcgggcggccgcccaggcgaggtgcggcctccgcacaggcggggggcgtaggcgcgcggggcccgccatggctgcgtcggagctctacacaaagtttgccagggtttggatacctgatccagaggaagtctggaagtcagcagagctgctcaaagattataagccaggagataaagtcctcctgcttcacctcgaggaaggaaaggtatagtcctagtagctataaatccctatgaacagctgcctatttatggagaagatattattaatgcatacagtggtcagaacatgggtgatatggatccacatatctttgcagtagctgaagaagcttacaagcaaatggccagagatgaacgaaatcagtccatcatcgtaagtggagagtctggggcaggaaaaacagtctcagctaagtatgccatgcgatactttgcaactgtgagtggttctgccagtgaggccaatgtggaggaaaaggtcttggcctccaaccccatcatggagtccattggaaatgctaaaacaaccaggaatgataatagcagccgttttgggaagtatattgagattggttttgataagagatatcgaatcattggtgccaatatgagaacttatcttttagagaaatccagagtggtattccaggcagaagaggagagaaactatcatatcttctatcagctttgtgcctcagcaaagttacctgaatttaaaatgctacgattaggaaatgcagataactttaattacacaaaacaaggaggcagtcctgtgattgaaggagtggatgatgcaaaggagatggcacatactaggcaggcctgcactttgctaggaattagtgaatctcatcaaatgggaattttccgaatacttgctggcatccttcacttaggcaatgttggatttacatcccgagatgcagacagctgcacaatacctcccaagcatgaacctctctgcatcttctgtgaactcatgggtgtggactatgaggagatgtgtcactggctctgccatcggaaactggctactgccacagagacatacatcaagcccatctccaagctgcaggccacgaatgcccgcgatgctttggccaagcacatctatgccaagctctttaactggattgtagataatgtcaatcaggctctccattctgctgtcaaacagcactcttttattggtgtgctagacatttacggatttgaaacatttgagataaatagttttgaacagttttgcataaattatgcaaatgaaaaactacagcaacaattcaatatgcatgtcttcaaattggagcaagaagaatatatgaaggaacaaattccatggacactcatagatttttatgataatcagccttgtattaatcttatagaatcaaaactaggcattctagatttactggatgaggaatgcaagatgcctaaaggcacagatgacacctgggcccaaaaattgtacaacacacatttgaacaaatgtgcactctttgaaaagcctcgtctatcaaacaaagctttcatcatccaacattttgctgacaaagtggaataccagtgtgaaggatttctcgaaaagaataaagacaccgtttttgaagaacaaattaaagttcttaaatcaagcaagtttaagatgctaccagaactatttcaagatgatgagaaggccatcagtccaacttcagccacctcctcagggcgcacacccctcacacgaactcctgcaaagcccaccaaaggcagaccaggccaaatggccaaagagcacaagaaaacagtggggcatcagttcagaaactccctgcacctgcttatggagacactcaatgccactacccctcactatgtgcgctgtatcaagcctaatgacttcaagttcccattcacgtttgatgagaagagggcagtgcagcagctgagagcatgtggtgtcctggaaaccatccgaatcagtgcggccggtttcccctcacggtggacttaccaagaatttttcagccgctaccgtgtcctaatgaagcagaaagatgtgctgagtgacagaaagcaaacatgcaagaatgtgttagagaaactgatactggacaaggacaaataccagtttggtaagacaaagatctttttccgtgccggtcaagtggcctatctagaaaaattgagagctgacaaactgagagctgcctgcatccggatccagaagaccatccgagggtggctgctgagaaagaagtacctacgcatgcggaaggcagccatcaccatgcagagatacgtgcggggctaccaggcccgatgctatgctaagtttctgcgcagaaccaaggcagcaaccatcattcaaaagtactggcgcatgtatgtggtccgcaggaggtacaagattagacgagctgccactatcgttcttcagtcttacttgcgaggcttcttggccagaaataggtatcgcaagatactccgtgagcacaaagcagtcatcattcagaagcgagtccggggctggctggcccgcacacactacaagaggagcatgcatgccatcatctaccttcagtgctgcttcaggcggatgatggccaagcgtgagctaaagaagctcaaaatcgaggctcgctcagtggagcgctataagaagctgcacatcggcatggagaacaagatcatgcagctgcagcgcaaagttgatgagcagaacaaagactacaaatgccttgtggagaaactaaccaatctggaaggaatatacaactctgagactgagaaactacgaagtgacttagaacgtcttcaactaagtgaagaggaagcgaaagttgccactgggcgggtccttagtctgcaggaagaaattgccaagctccggaaagacctggagcaaactcgttcagagaaaaaatgcattgaggaacatgcagatcgatacaaacaagaaacagagcagctggtatcaaatctgaaggaagaaaatactttgctgaagc

SEQ ID NO: 156837 - DNA, 693 bp, Homo sapiens
  Payload ID: 10742
  Gene Symbol: MYO5A
  Gene Name: myosin VA
  ENST ID: ENST00000568914
  CDS Start-End: 1-693
cgtcaagaactagaatcagaaaacaaaaaactgaagaatgagctaaatgagttgcgcaaggccctcagtgagaaaagtgccccagaggtgaccgccccaggtgcacctgcctaccgtgtcctcatggagcagctgacctctgtgagcgaggagcttgatgtccgcaaggaggaagtcctcatcttaaggtctcaactggtgagccagaaagaggccatccaacccaaggatgacaagaatacaatgacagattccacaatacttttggaagatgtacaaaaaatgaaagataaaggtgaaatagcacaagcatacattggtttgaaagaaacaaatagatcatctgctctggattaccatgagttgaatgaggatggagagctgtggctggtttatgaagggttaaaacaagccaacaggctcctggaatcccagctgcagtcacagaagaggagccatgagaatgaggccgaggccctccgtggggagatccagagcctgaaggaggagaacaaccgacagcagcagctgctggcccagaacctgcagctgcccccagaggcccgcattgaggccagcctgcagcacgagatcacccggctgaccaacgaaaacttgtattttgaggaattatatgcagatgaccctaagaagtatcaatcatatcggatttccctttacaaacggatgatt

SEQ ID NO: 156838 - DNA, 12139 bp, Homo sapiens
  Payload ID: 10742
  Gene Symbol: MYO5A
  Gene Name: myosin VA
  ENST ID: ENST00000613858
  CDS Start-End: 245-5731
accccgggcaggtggagcgctcgcggctgctcgcggcgagcccgggagtgatggcgaggcccctgcgggcggccagcgcctgaggcgccccgccccgccccgccccgcgcggccctccccgcccggccctgccctgccctgctccctgccggcggctgcgggcgcttcctagtccgctcgggcggccgcccaggcgaggtgcggcctccgcacaggcggggggcgtaggcgcgcggggcccgccatggctgcgtcggagctctacacaaagtttgccagggtttggatacctgatccagaggaagtctggaagtcagcagagctgctcaaagattataagccaggagataaagtcctcctgcttcacctcgaggaaggaaaggatttggaataccatctagatccaaagaccaaggagctgcctcacttacgaaatcctgacatacttgttggtgaaaatgacctcacagccctcagctatcttcatgagcctgctgtgctccataatctcagagtccgctttattgattccaaacttatttatacgtattgtggtatagtcctagtagctataaatccctatgaacagctgcctatttatggagaagatattattaatgcatacagtggtcagaacatgggtgatatggatccacatatctttgcagtagctgaagaagcttacaagcaaatggccagagatgaacgaaatcagtccatcatcgtaagtggagagtctggggcaggaaaaacagtctcagctaagtatgccatgcgatactttgcaactgtgagtggttctgccagtgaggccaatgtggaggaaaaggtcttggcctccaaccccatcatggagtccattggaaatgctaaaacaaccaggaatgataatagcagccgttttgggaagtatattgagattggttttgataagagatatcgaatcattggtgccaatatgagaacttatcttttagagaaatccagagtggtattccaggcagaagaggagagaaactatcatatcttctatcagctttgtgcctcagcaaagttacctgaatttaaaatgctacgattaggaaatgcagataactttaattacacaaaacaaggaggcagtcctgtgattgaaggagtggatgatgcaaaggagatggcacatactaggcaggcctgcactttgctaggaattagtgaatctcatcaaatgggaattttccgaatacttgctggcatccttcacttaggcaatgttggatttacatcccgagatgcagacagctgcacaatacctcccaagcatgaacctctctgcatcttctgtgaactcatgggtgtggactatgaggagatgtgtcactggctctgccatcggaaactggctactgccacagagacatacatcaagcccatctccaagctgcaggccacgaatgcccgcgatgctttggccaagcacatctatgccaagctctttaactggattgtagataatgtcaatcaggctctccattctgctgtcaaacagcactcttttattggtgtgctagacatttacggatttgaaacatttgagataaatagttttgaacagttttgcataaattatgcaaatgaaaaactacagcaacaattcaatatgcatgtcttcaaattggagcaagaagaatatatgaaggaacaaattccatggacactcatagatttttatgataatcagccttgtattaatcttatagaatcaaaactaggcattctagatttactggatgaggaatgcaagatgcctaaaggcacagatgacacctgggcccaaaaattgtacaacacacatttgaacaaatgtgcactctttgaaaagcctcgtctatcaaacaaagctttcatcatccaacattttgctgacaaagtggaataccagtgtgaaggatttctcgaaaagaataaagacaccgtttttgaagaacaaattaaagttcttaaatcaagcaagtttaagatgctaccagaactatttcaagatgatgagaaggccatcagtccaacttcagccacctcctcagggcgcacacccctcacacgaactcctgcaaagcccaccaaaggcagaccaggccaaatggccaaagagcacaagaaaacagtggggcatcagttcagaaactccctgcacctgcttatggagacactcaatgccactacccctcactatgtgcgctgtatcaagcctaatgacttcaagttcccattcacgtttgatgagaagagggcagtgcagcagctgagagcatgtggtgtcctggaaaccatccgaatcagtgcggccggtttcccctcacggtggacttaccaagaatttttcagccgctaccgtgtcctaatgaagcagaaagatgtgctgagtgacagaaagcaaacatgcaagaatgtgttagagaaactgatactggacaaggacaaataccagtttggtaagacaaagatctttttccgtgccggtcaagtggcctatctagaaaaattgagagctgacaaactgagagctgcctgcatccggatccagaagaccatccgagggtggctgctgagaaagaagtacctacgcatgcggaaggcagccatcaccatgcagagatacgtgcggggctaccaggcccgatgctatgctaagtttctgcgcagaaccaaggcagcaaccatcattcaaaagtactggcgcatgtatgtggtccgcaggaggtacaagattagacgagctgccactatcgttcttcagtcttacttgcgaggcttcttggccagaaataggtatcgcaagatactccgtgagcacaaagcagtcatcattcagaagcgagtccggggctggctggcccgcacacactacaagaggagcatgcatgccatcatctaccttcagtgctgcttcaggcggatgatggccaagcgtgagctaaagaagctcaaaatcgaggctcgctcagtggagcgctataagaagctgcacatcggcatggagaacaagatcatgcagctgcagcgcaaagttgatgagcagaacaaagactacaaatgccttgtggagaaactaaccaatctggaaggaatatacaactctgagactgagaaactacgaagtgacttagaacgtcttcaactaagtgaagaggaagcgaaagttgccactgggcgggtccttagtctgcaggaagaaattgccaagctccggaaagacctggagcaaactcgttcagagaaaaaatgcattgaggaacatgcagatcgatacaaacaagaaacagagcagctggtatcaaatctgaaggaagaaaatactttgctgaagcaagaaaaagaagccctcaatcaccgcatcgtgcagcaggctaaggagatgacagaaactatggagaagaagttagtagaagaaacgaaacaactggaactcgaccttaatgatgaaaggctgagatatcagaaccttctgaatgagttcagtcgcctggaagaaagatatgatgacctcaaggaagagatgacccttatggtgcatgtgcctaagcctggacacaagagaacagactccacccacagcagcaacgagtctgaatatatctttagctctgaaattgcagaaatggaagacattccatcaaggacagaggaaccaagtgagaagaaggtacctctggacatgtcattgttccttaagctccagaagcgggtcacagagctggagcaggagaagcaggtgatgcaggatgagctggaccgcaaggaggagcaggtgctccgcagcaaggccaaggaagaagaaagaccacaaattagaggtgcagaactggaatatgagtcactcaagcgtcaagaactagaatcagaaaacaaaaaactgaagaatgagctaaatgagttgcgcaaggccctcagtgagaaaagtgccccagaggtgaccgccccaggtgcacctgcctaccgtgtcctcatggagcagctgacctctgtgagcgaggagcttgatgtccgcaaggaggaagtcctcatcttaaggtctcaactggtgagccagaaagaggccatccaacccaaggatgacaagaatacaatgacagattccacaatacttttggaagatgtacaaaaaatgaaagataaaggtgaaatagcacaagcatacattggtttgaaagaaacaaataggctcctggaatcccagctgcagtcacagaagaggagccatgagaatgaggccgaggccctccgtggggagatccagagcctgaaggaggagaacaaccgacagcagcagctgctggcccagaacctgcagctgcccccagaggcccgcattgaggccagcctgcagcacgagatcacccggctgaccaacgaaaacttggatttgatggaacaacttgaaaaacaggataagacggtccgtaaactgaaaaaacaactgaaagtatttgccaaaaaaattggcgaactagaagtgggccagatggagaacatatccccaggacagatcattgatgaacccatccgaccagtcaacattcccaggaaagaaaaggatttccaagggatgctggaatacaagaaggaggatgagcaaaaacttgttaagaacctgattctgggcaacaaaccacgtggtgtagcagtcaatttgattccaggattaccggcatatatcctgttcatgtgtgttcgacatgctgactacctgaatgatgatcagaaagtaaggtcgttgctaacatcaacaattaacagcatcaaaaaagtattgaagaaaagaggtgatgattttgaaaccgtctccttctggctctctaacacatgccgatttttgcactgcttgaaacagtacagtggagaagagggctttatgaagcacaacacatctcgccagaatgaacactgcctcaccaattttgacctggctgagtatcggcaggtgctgagtgacttggccattcagatctaccagcagctcgtgcgggtgttagagaacatccttcagccaatgattgtctcaggcatgctggaacatgaaacgattcagggcgtgtctggggtgaagcccacagggttgagaaagcgaacctccagtatcgccgatgagggcacctacacactggactccatcctccggcagctcaactccttccactcggtcatgtgtcagcatggcatggaccctgaactgatcaagcaggtggtcaagcagatgttctacatcataggggccatcaccctgaacaaccttctcctgcggaaggacatgtgctcctggagtaaaggcatgcagatcaggtacaatgtcagtcaactggaagaatggctgcgtgacaagaatctgatgaatagtggggctaaagaaaccctggaacctctcattcaggctgctcaacttttgcaagtgaaaaagaaaacagatgatgatgcagaagccatttgttctatgtgcaatgctttaactactgcccagattgtgaaagtgttgaatttgtatactccagttaatgagtttgaagaaagagtctctgtgtcgttcattcgtactatacagatgcgtttacgagacaggaaagactctccccagctgctcatggatgctaaacacatctttcctgtcacctttcctttcaacccatcttccctcgcactagaaaccatccagattccagccagcctcggcctgggcttcatttcacgggtctgaaagtgatgtccaggcaaaaattgacaatacatttcttgcccgaaataagaacccattatttccagtgagttactgaaaatacatttttaaagagaaagtactgattatctcccaaatgagaagtcattaactggaaatctccctagaatactttcatcactttggaaacaaagataggctctttcgtgctgtgttatctttatagcaacactcatccttaaccaactaggtaccgtgagtttacatacaggagaatgatggaaggaagggaggaaggaaaggaggagaaaaatgtgtcttcagctggcagcatttattttaaatccttagcactgagtttgaatggtataaaaagtataacttccatagatgagctgttgttaggaaggcaccaaagaacctcctctgcactaaacaggagaatggaaagaaaagtctccattgagtacatatcatgtcagtttagtaatcaattatgttgatattgttaaactggttcaaagaaataaactggcaatatgtaaagtaattcctcatttgtgtcactatgatatagagatattaaaggaatgttggtttgctaaatagtatagatgtccatttgtactatagtttactgagcattttaaattgctgctacatactgtcttcttaaaatgtaagtgatattaggcactacaataagtttctcttgtcaattctgtttacaattcaatcagatcacagttttaactggattatatgcaaatacctacagattcacctgcacaagtagcagacactggaaagtcatgtagtaatatgacaaaatgcttgacatttaggggtaggattagacaaagtggctattgttgatgtcattatttattcaggatgtattacattgatgtgctcattaattttccctgggtggatattgcgtcagggtacagtgttctgtgaagtgacttatttttaactaccagatctgattccttcagtgcatattttcaaccttgacaggttttctctcttcttaatttattaagaattaatctcggctgggcgcggtggctcacgcctgtaatcccagcactttgggaagccaaggtgggcggatcacttcaggttaggagttggagaccagcctggccaacatggcgaaaccctgtctctactaaaaatacaaaaattagccgggcgtggtggcacttgcctgtaatcccagctactcgggaggctgaggcacgagaatcgattaaacctgggaggcggagattgcaatgagatcgaaccactgcactccagcctgggtgacagagagagacactgccttggaaaaaaaaagaatctcactcactatctagagaggattgtcagaatattcacgattcaggtcttgaaactttgattatgcaaaagaaggtatataataaatatttcattatgattcagtttttaaggctttgcagcttctataagtgttctcagatgccactagataattttaaaagcatcatattagaaatactttaagaagacttatataagaaatagaagattgttgaattttacagaggatttggttcattaagacccagattctgtaagttttcattctgaaattctagttaaacatattcaccatttttcttaggaatcttatacaataaatccttcaggttgcacaaaagcaaattattagttttcattagaaactctggttctgaattacaatcataggttatataaatttaactgttagatggtctataaatcttattaaaatatgtgcaatatttatggaagtcaaacagcttcatatcagtgataaagattgttattaaaagataaatactgtctgttaatttacatgggcctcaagttcctcgtttataaaataagagagttggacactgattcttaacatctcctccacatttaaaattctctcttctcagcccttagattctagagagaaaaagctgcagttactcagtaagtccattctctgatggaaagaccagtgtgtagtgcctgtcaattccttaggattaatcaaatgtaaaatcacaagtttgtgtagctgtaacctttcttaaatgtacatgatttatgtacatgcttttagaaggtcctactatatttgtattataattagtttaagtaatttttattacatcatgtattgctttattcagtttgaatacatttatttatttatttgcagtatcaaccagaaacactaccaattgcatcaaattctcccagtttttcctggttgtcaatgcggttttcaatgcacaattaagtcatagccatttggttcgtaccaaatgtgtcagaatctaacagcatccgataggctgtaagttggggagttgctaagaaaatgcaacgtggtacaggctgtccgcctcagccctggaaatctcccagacctcccccagcttcatcctgtgtagcacgactcaacgtgcaccctgaatcttctcaggtcttccaggtcatgctgtagctgtcactgccatgcagcccttttttttactccggacagctcatgtactgaagcgtcatgaaagaaaggctgtggtctgagcccttctctcccatctcctgtctttgtcctgtcaagtgctggagccagagctcctacagctgcccttggtggtttctcctgttcagcgatggtggcacaaaggttctgctattccagggctccagcttcctcccaggtctacccagagctccagatgggggtctgaattaacctctcttggtggcctggagatttttagtcattgacaagaataccttgtaaccagggaaccccaaggcccagtaaatgattctgtataccattttcttgaaggtacaagaagattctgccgactatggggatctttgggccagtttgaggattgctttccctctgaggttctttctctctgtcagccacactttctcacccaacttcagacacaccctgccagcctttcccctactcattcactcttccccttccctcaacttaatcgtctatcccgttgcctgctgtttgactgtgcactgaaggcaggtggatggagtcagtcctcagttgcccctgctggccttcctggtgcttaccatcagcccaatctttgcacagtccttgttgttcttacttctctgcatgcattccttcagaagatcagtcatcaactttttcttaattcctctgtgacacacaatgggaattcaaaggaagagatcttaaaagtcacaacagttctttatcttaataatcccctccccattcaccttactacatgcagactcacctcacacccttacaacttgaagctgaaaatttaaaagtaatttccctttttgcagcttttcctcaggttaaggctttgatctgcctgagagtaactctaaaaggagggaagataaatatgggataaaatccacaaagtgtagcttctaattcctttggaagtttaaaaaatttccacatatctgatgcttcttttgtcaggtgcagaagcacaaaaacatattccgaagccaactgatagggaatttggggattattgtcagtttggagaatttgctgtgttatttcttcatttccatggatagctcatagttggctctttctgggtgagtaattatgtgtaatatagatcaaatcttttactaaggttacagctacatgttaggggaggctatgaaaatactatattattataatttcagtgcagtgattgttgtgagaaataactttcatggtaaccctaggaaaatgggcacctgccaccatcctgagaagtcctcacacaatgccctttctctcttacacacacacacacacacatacacacacacacacccccgtcactaattcatagagttccttagcaggcatagtcaaggatcctctgggtaatgtcagctgcttagtgataaaacagagccaaaactagtgcatcctgttgaaagtaatgcagaaacagtacctgggtccagatatgctttcctgcggcgctttcctctgttacctcgtttcatcctcacagcagcatggacggtaggtggggtcgcttctacaatcatttctgatgatagcttgggaatagagataggggcagtgacttgcctgatgtcgcacagccctctggctgtcctgctttcccatatggagcagtggtggtgtgggcacctgtgatgcaggagactttaaaaatgtcgtgaggtcacgtgctgcccctcctggtacgtgtggaatgcccctggccagcaaggggtgcttttttatcagagttggcagctggcatgtgggaaccgagcaagtgctgcgtaccaagttacttgttttaaggagaccaagtgctcagcgccaggtggttttcttttttgtcatagttacttgctataactcagcttgacttctgtcatgaatcagtgctctctgggaggatgcaatactctgtttgggcattaattggtagcaggttgtctcaaccaaaaagacaggaaacagcaaaagcctctctgaaattaagaggaaagttactctccccacacccatcagagtctttattggagccaccaggtgagctgtgcagcctggacaggcctgcagctataggccaccttcccagtttaggtcctcagcacaggggagcccaagtcactgggtgccttccgagggctgtcactgggcaggccatatacaagtcagtgtgtgcgtgggcactgcagtgtgtgcatgccgtaggtgttgatgggtgctaggaggggtgtcgtgtgcatgcgcgttgaagaggatctgtattgccgtgacctctgttcatggatgagtgcattgtaatttgttctcaggctgtgctgtgagggccgccttaacccttgctcccttcccttctagagctgccttaagttctccagaacttttcttctgtaaaggatatcttgcctggaagggatatcttgccctgtttctcaaggttttgtgagagttttgactggatgtggccctgcatgaccctccttctcctgtacttcctctttcctttccaaatgggaattagaactgtggggcagcaacagtctcagagccagtgagaggccagcttagagaatgcttctgagttagtgggactctgtgtcacaagtaagcaaatgaatatatgaaagaaattatggagataagttagattcttggtaatacttaaatgtcttgctttctactaaccttttgttactaaaggtaaagggtataactcaaactttttgtggacattcttttcaaaattttttaagaaccctgtactataaaaggttgagtaaaaacaggaaagcgtgctataagttcaaatctgttgtattaccctaaattagataaaccaacctgaattatagtagatttctcaatagatgaggaactgaaaaatactatgtaaaatatcttccaaaatgctttttatactttttttatttgtaatttggtctatctaaaatgttcgttagcttaacttaatgggcgttattggattcatatgactaacgtttcctcagtattgtaatgcttgaaatatttgaaagaaaaaatgttgttttttagttgaaactggtatatataattcagtgcttggcaggttagtatatttttatgcatttttcagagtcagcagtttcaaatcttattgttatcatgttataaaattttagcccacatttcaggctccgtaaatcatttgagccattattttttcccaacaaatggtgaattttttctttaaatgtggatatatatgttgtaatttatgattcctggttatgtatttttgtgggatcctgcagtaaaattgacttttttgtgtctttgggagatttaaattgcgctaacagtgttgcgcaaaaatgagttcatgccatttaacatattgtattttaattattaactgtattaatttactatgaaatggacatccttttaactaaaatggaattgaacattgcagttttcaaatatttttccttgttgggtctggaaaaggaattctactttgatctgcatagaaaattttgatacaattttttgaaagttcttaggtgaaacatttacccattaaaaaggaagcagaaatactgagacatgaaaggcattatcaactaactctagactctagaacccattctagcatatctcacgtgcaatttttaaaaataagttaataattcatctcatatcaacaaaagcctttgaaacatgggttttcactagatatcacctagtgctaagataaaaaccaaaacaatatcagaattacatttatgctctaaatttgtagttgtccattgttgtgcttagtaaatgtgtgtcattaatgctgtattctcctagctattatggaaacttgtttaaataaagatatggat

SEQ ID NO: 156839 - DNA, 9505 bp, Homo sapiens
  Payload ID: 10743
  Gene Symbol: MYO5B
  Gene Name: myosin VB
  Uniprot ID: Q9ULV0
  ENST ID: ENST00000285039
  CDS Start-End: 301-5847
tcgccggccctcgcctcctccccacacctgggaggggagtggtgcggcgcggcctcctcccccggcgctcgcaactcctgtccggccgtagctgcgccgccgcggcgggagtaaaggtcgcgccgccgggagcgagccggccgcggcgcctgcgggaagccggcggggcaggtcggagaagagcgagaagatcgagaaactccaggccagcccgggaacatggcgccaggcgggccagccgcggactgagagccgcggggcagccaggagccggggcccgagccccgcccggcccgggccatgtcggtgggcgagctctacagccagtgcacaagggtctggatccctgaccctgatgaggtatggcgctcagctgagttaaccaaggactacaaagaaggagacaagagcctacagctcagactggaggatgaaacgattctggaatacccaattgatgtacaacgcaaccagctgcccttcttacggaatccagatatcttggtgggagaaaatgacctgactgcccttagctatcttcatgagcctgcagttttgcataatttgaaggtccgtttcctggagtccaaccatatctacacttactgtggtatcgtacttgttgccattaatccttatgaacagttgccaatctatggacaagatgtcatctatacctacagtggccaaaacatgggagacatggacccccacatctttgctgtggcagaagaagcctacaagcagatggccagagatgagaagaatcagtccatcatagtcagtggggagtctggagccgggaagacggtatcagccaagtatgccatgcgctatttcgccaccgttggtggctcggccagtgaaaccaacatcgaagagaaggtgctggcatccagtcccatcatggaggccattggaaatgccaagaccacccgcaatgacaacagcagccgttttggcaagtacatccagattggctttgacaaaaggtaccacatcatcggggccaacatgaggacttacctcttggagaagtccagagtggtcttccaggcagatgatgagaggaattaccacatcttttaccagctctgtgctgctgccggtcttccagaatttaaagagcttgcactaacaagtgcagaggactttttctatacatcacagggaggagacacttccatcgagggtgtggacgatgctgaggactttgagaagactcgacaagccttcacactcctcggagtgaaagagtcccatcagatgagcatttttaagataattgcttctatcttgcaccttggaagtgtggcgattcaggctgagcgtgatggtgattcctgtagtatatcaccccaggatgtatacctaagcaacttctgccgactgctaggggtggagcacagtcagatggagcactggctgtgtcatcgcaagctggtcaccacctcggagacctacgtcaagaccatgtccctgcagcaggtgatcaatgcgcgcaacgccctggcgaagcacatctatgcccagttgttcggctggattgtggagcacatcaacaaggccctgcacacctccctcaagcagcactccttcatcggggtcctggacatctatgggtttgagacatttgaggtaaacagctttgagcagttctgtatcaactatgcaaatgaaaagctccagcagcagttcaactcgcatgttttcaaactggagcaagaagaatacatgaaggaacagatcccttggaccctgattgatttttatgataaccaaccttgtatcgacctcattgaagccaagctgggtatcttggacctgttggatgaagaatgtaaggtccccaaaggaactgaccagaactgggctcagaagctctatgaccggcactccagcagccagcacttccagaagccccgcatgtccaacacggccttcatcatcgtccactttgcagacaaggtggagtacctctctgatggttttctggagaaaaacagagacacggtgtatgaagagcagatcaatatcctgaaggccagcaagttcccactagtggctgacttgtttcatgatgacaaggaccctgttcctgccaccacccctgggaaggggtcatcttcgaagatcagcgtccgttctgccagaccccccatgaaagtctccaacaaggagcacaagaaaaccgttggccaccagttccgtacctccctgcatctgctcatggagaccctgaatgccacgacacctcactatgtccgctgcatcaagcccaacgatgagaagctcccctttcactttgacccaaagagagcagtgcagcaactcagagcctgcggggtgttggagacgattcgaatcagtgcagctggctacccatccaggtgggcctaccatgactttttcaaccggtatcgggtgctggtcaagaagagagagctcgccaacacagacaaaaaggccatctgcaggtctgtcctggagaacctcatcaaggaccccgacaagttccagtttggccgcaccaagatcttctttcgagcaggccaggtggcctacctggagaagctgcgggctgacaagttccggacagccaccatcatgatccagaaaactgtccggggatggctgcagaaggtgaaatatcacaggctgaagggggctaccttaaccctgcagaggtactgccggggacacctggcccgcaggctggctgagcacctgcggaggatcagagcggctgtggtgctccagaaacattaccgcatgcagagggcccgccaggcctaccagagggtccgcagagctgccgttgttatccaggccttcacccgggccatgtttgtgcggagaacctaccgccaggtcctcatggagcacaaggccaccaccatccagaagcacgtgcggggctggatggcacgcaggcacttccagcggctgcgggatgcagccattgtcatccagtgtgccttccggatgctcaaggccaggcgggagctgaaggccctcaggattgaggcccgctcagcagagcatctgaaacgtctcaacgtgggcatggagaacaaggtggtccagctgcagcggaagatcgatgagcagaacaaagagttcaagacactttcagagcagttgtccgtgaccacctcaacatacaccatggaggtagagcggctgaagaaggagctggtgcactaccagcagagcccaggtgaggacaccagcctcaggctgcaggaggaggtggagagcctgcgcacagagctgcagagggcccactcggagcgcaagatcttggaggacgcccacagcagggagaaagatgagctgaggaagcgagttgcagacctggagcaagaaaatgctctcttgaaagatgagaaagaacagctcaacaaccaaatcctgtgccagtctaaagatgaatttgcccagaactctgtgaaggaaaatctcatgaagaaagaactggaggaggagcgatcccggtaccagaaccttgtgaaggaatattcacagttggagcagagatacgacaaccttcgggatgaaatgaccatcataaagcaaactccaggtcataggcggaacccatcaaaccaaagtagcttagaatctgactccaattacccctccatctccacatctgagatcggagacactgaggatgccctccagcaggtggaggaaattggcctggagaaggcagccatggacatgacggtcttcctgaagctgcagaagagagtacgggagctggagcaggagaggaaaaagctgcaagtgcagctggagaagagagaacagcaggacagcaagaaagtccaggcggaaccaccacagactgacatagatttggacccgaatgcagatctggcctacaatagtctgaagaggcaagagctggagtcagagaacaaaaagctgaagaatgacctgaatgagctgaggaaagccgtggccgaccaagccacgcagaataactccagccacggctccccagatagctacagcctcctgctgaaccagctcaagctggcccacgaggagctcgaggtgcgcaaggaggaggtgctcatcctcaggacccagatcgtgagcgccgaccagcggcgactcgccggcaggaacgcggagccgaacattaatgccagatcaagttggcctaacagtgaaaagcatgttgaccaggaggatgccattgaggcctatcacggggtctgccagacaaacagcaagactgaggattggggatatttaaatgaagatggagaactcggcttggcctaccaaggcctaaagcaagttgccaggctgctggaggctcagctgcaggcccagagcctggagcatgaggaggaggtggagcatctcaaggctcagctcgaggccctgaaggaggagatggacaaacagcagcagaccttctgccagacgctactgctctccccagaggcccaggtggaattcggcgttcagcaggaaatatcccggctgaccaacgagaatctggaccttaaagaactggtagaaaagctggaaaagaatgagaggaagctcaaaaagcaactgaagatttacatgaagaaagcccaggacctagaagctgcccaggcattggcccagagtgagaggaagcgccatgagctcaacaggcaggtcacggtccagcggaaagagaaggatttccagggcatgctggagtaccacaaagaggacgaggccctcctcatccggaacctggtgacagacttgaagccccagatgctgtcgggcacagtgccctgtctccccgcctacatcctctacatgtgcatccggcacgcggactacaccaacgacgatctcaaggtgcactccctgctgacctccaccatcaacggcattaagaaagtcctgaaaaagcacaatgatgactttgagatgacgtcattctggttatccaacacctgccgccttcttcactgtctgaagcagtacagcggggatgagggcttcatgactcagaacactgcaaagcagaatgaacactgtcttaagaattttgacctcaccgaataccgtcaggtgctgagtgacctttccattcagatctaccagcagctcattaaaattgccgagggcgtgttacagccgatgatagtttctgccatgttggaaaatgagagcattcagggtctatctggtgtgaagcccaccggctaccggaagcgctcctccagcatggcagatggggataactcatactgcctggaagctatcatccgccagatgaatgcctttcatacagtcatgtgtgaccagggcttggaccctgagatcatcctgcaggtattcaaacagctcttctacatgatcaacgcagtgactcttaacaacctgctcttgcggaaggacgtctgctcttggagcacaggcatgcaactcaggtacaatataagtcagcttgaggagtggcttcggggaagaaaccttcaccagagtggagcagttcagaccatggaacctctgatccaagcagcccagctcctgcaattaaagaagaaaacccaggaggacgcagaggctatctgctccctgtgtacctccctcagcacccagcagattgtcaaaattttaaacctttatactcccctgaatgaatttgaagaacgggtaacagtggcctttatacgaacaatccaggcacaactacaagagcggaatgaccctcagcaactgctattagatgccaagcacatgtttcctgttttgtttccatttaatccatcttctctaaccatggactcaatccacatcccagcgtgtctcaatctggaattcctcaatgaagtctgaagatgcatgtttccagcattagtttgattcccaatgtgagcaagaaggaagtatatacagtaaagtaaattcaaggatctgttaaatctggtaaaagtagatcaaatcagagattgacagcctgtggagggtgctgaactatacagaattagacacaactatgtcattattttttgtacctactgctcagaataaaaacacttgaaatatggaagattttaagtttgatttcagtccaacacatatacataatttatagacaccaagcagtccccatagacatataaaaggtgtcaattctataaaacgaagctgcctagttttgatctttgcatagaactagagaatgtccaaattaaaataccaaatatatataagtcacataaattgccttcaaagggctttaacaaataatggtactaataaccatgataatggcatatactgacatttcccaaagtttgcaaaccataggtgtggttgagtttgtggtgagatgttttaagaacaaaaatatggggatgagacttctgagaaatattcccaaaatattttttaatggctgattatacacagacagtggtgtaactgacctccagaccagacattttgagtactggtttctgaagcaaaattagaagtgccagtcctcagtgtgctcaaacgcttttgtgttatcttgatttaatggaagagattattaaaatgctgctatcccaaactccaagtgagaaagatggaaaaatattttgtttctgatgctagtccatacactttccaagtcccacaaaactttcacaaaaatgtatataagctaaatattagaaacggataacaaacttgttttatttatagatgtaaaaaccaaacaagtcaatatgaaagcttttaatctcttaataccattaagcttccagtaagagcatcacataatgctctactgttccagaaaccaaatagtaaaacaaactaaagttcgcacatcagatcatctgaaaaaccttcaaaaataatcagttcagggatattatacaaaagtttgggttttttttttttaagagaataaaatggcttaggtcaactttcccttttcaggttattttcaacgtttttcaaatttagcacacaaaaaattgtaaatatctctcccacaaaataaggattttaaaaaagtaattcagtaatataacaggcttagatgtttgctgctcttagaattttttttaacttgtttttggtttcttcaaaagcaagcattcaattggaaacccatattctttccacacttttttttactgtcttttctgtatttcttgatagcagtatgctgttcccataagaaaaaaatggtatttgcaaatcatggaagaacagcctctgtattacattgagaaaataagatttatccatgaattggaagtagaacagcctgccttcaccctcttttactcaaccacccaacttaaaaggctcttggaaacacagcacactccacgctaccttctgcactgtgcccttagagcacagcttcctcagttgttctctgcatctcctggggcttaggccagtcttagcctgggttaaggctgctgacattgtgttccaatcagttgtcatgggcattatcccctctacatccacattaaacatgccggcttctcttgggcatcggcagagctgtgcctttttctttcagttacagttacataatcactgacgtccatgacacttacccatggatccatgtgctgacttcatttagaaggccaatctaaaacaactgggtttgtggctacctctttaaagttgtttgtgaaggataatttgttttttaatgcactttagtttgaaagtgagtctcttatgtaaggaccatccttaaaagaccaaaaatgccttgttagagtgttaaggagttttgacatgcagtggttccacaaacacagtggcttactatccttatacactgtcttataccatcattctctccatctctcttggtcactactctctgctgtcactggttaatcactaggtgccaagagcttactgaataaaagcttggcaattagaataaatggggagggaaggaccttatgaatagtccatttagcctaagaaatggcagatttagttcttctcttccaaaagataaaggtatatcctggaattgtacttaaaacttacagatgactaacaaatatatactttatatgtagttaatatttagatctgtcttatttaatacttggaggctagaagaagcatctttaggggaactatataatcttttgttagcattttctctgcattttaaaaaatcatttcaattcaaacatttatcagtgtcatgaaatcagtaatgactctttaacaattcaggtttgaactctgcattagatgtctctttaattttttaatatttaaaatttagttgacatttttttcaccaggtgcctttagcggttactaagataactgacatcagttgtttctctgaaataagtgttgctgtgggaataattttaatgttcaaggtgatatcatgggggagttttgtcttttaaaacattagaagcattttaaatattaagaatcaaatatttatagatcaaaacttgtgttttaagtattatacgggacctgtttacttatagtaaatgtgaatgtacacatgagttgttgctgaagctgacaagcatattacatacatgcattttccctgtgccctcatagttgcagttagagttccagtacctgtaggctcacctgggaggcagattagacccaaaggtagatgtttttcccctttccatgaagcatgtcagtgggagttgcttcctttgatttccctagtactaaattttaaggcttttgtaaaaacaaaacaaaactaggagcttggaacagttaaaaatcaacactgctaccatcaattcatcaaatatttacttagagctttcatacattaagattccagtaaccaataaattagaattcatttcttctgcataaagtaaattttcatacacttgacctactaagacagcaagggtgtcctaaattgaggcatttgtataatgcctgcataactaaatggtcactaaaatgggacagcatggggcaagaccttgtagttcttcacagaatatttgtggtcagtttctccaattaatttgctgcatgagccaaataaccataattcactttttatacccactggtgccataattagagaattagagggtgtagacagaggttaatgccaatgagaaacacaggacagggttttttttattataaaggtcattagatacaaaagattgtttttcaaaaaatttctaattctaacaaaggggatcaatcagaaatgaaactaagctactttctaaagtgacactgtatcagaataatccagatttgaatataacattttgccaccaactgacatttagatgaaggactgcctctctgaaagagttcagatcatattcaggggtgaatccaacaccatggaagaaagactactgatgaaaatattttcccactttgcacaaatctgtaaactacacctttgtttatagaaaaatgcttgtaatagtcactgtaatatttagctgtggataaaaatttgtggaaataaatacttttgaataaa

SEQ ID NO: 156840 - DNA, 3109 bp, Homo sapiens
  Payload ID: 10743
  Gene Symbol: MYO5B
  Gene Name: myosin VB
  ENST ID: ENST00000324581
  CDS Start-End: 1-2898
gtcctcatggagcacaaggccaccaccatccagaagcacgtgcggggctggatggcacgcaggcacttccagcggctgcgggatgcagccattgtcatccagtgtgccttccggatgctcaaggccaggcgggagctgaaggccctcaggattgaggcccgctcagcagagcatctgaaacgtctcaacgtgggcatggagaacaaggtggtccagctgcagcggaagatcgatgagcagaacaaagagttcaagacactttcagagcagttgtccgtgaccacctcaacatacaccatggaggtagagcggctgaagaaggagctggtgcactaccagcagagcccaggtgaggacaccagcctcaggctgcaggaggaggtggagagcctgcgcacagagctgcagagggcccactcggagcgcaagatcttggaggacgcccacagcagggagaaagatgagctgaggaagcgagttgcagacctggagcaagaaaatgctctcttgaaagatgagaaagaacagctcaacaaccaaatcctgtgccagtctaaagatgaatttgcccagaactctgtgaaggaaaatctcatgaagaaagaactggaggaggagcgatcccggtaccagaaccttgtgaaggaatattcacagttggagcagagatacgacaaccttcgggatgaaatgaccatcataaagcaaactccaggtcataggcggaacccatcaaaccaaagtagcttagaatctgactccaattacccctccatctccacatctgagatcggagacactgaggatgccctccagcaggtggaggaaattggcctggagaaggcagccatggacatgacggtcttcctgaagctgcagaagagagtacgggagctggagcaggagaggaaaaagctgcaagtgcagctggagaagagagaacagcaggacagcaagaaagtccaggcggaaccaccacagactgacatagatttggacccgaatgcagatctggcctacaatagtctgaagaggcaagagctggagtcagagaacaaaaagctgaagaatgacctgaatgagctgaggaaagccgtggccgaccaagccacgcagaataactccagccacggctccccagatagctacagcctcctgctgaaccagctcaagctggcccacgaggagctcgaggtgcgcaaggaggaggtgctcatcctcaggacccagatcgtgagcgccgaccagcggcgactcgccggcaggaacgcggagccgaacattaatgccagatcaagttggcctaacagtgaaaagcatgttgaccaggaggatgccattgaggcctatcacggggtctgccagacaaacaggctgctggaggctcagctgcaggcccagagcctggagcatgaggaggaggtggagcatctcaaggctcagctcgaggccctgaaggaggagatggacaaacagcagcagaccttctgccagacgctactgctctccccagaggcccaggtggaattcggcgttcagcaggaaatatcccggctgaccaacgagaatctggaccttaaagaactggtagaaaagctggaaaagaatgagaggaagctcaaaaagcaactgaagatttacatgaagaaagcccaggacctagaagctgcccaggcattggcccagagtgagaggaagcgccatgagctcaacaggcaggtcacggtccagcggaaagagaaggatttccagggcatgctggagtaccacaaagaggacgaggccctcctcatccggaacctggtgacagacttgaagccccagatgctgtcgggcacagtgccctgtctccccgcctacatcctctacatgtgcatccggcacgcggactacaccaacgacgatctcaaggtgcactccctgctgacctccaccatcaacggcattaagaaagtcctgaaaaagcacaatgatgactttgagatgacgtcattctggttatccaacacctgccgccttcttcactgtctgaagcagtacagcggggatgagggcttcatgactcagaacactgcaaagcagaatgaacactgtcttaagaattttgacctcaccgaataccgtcaggtgctgagtgacctttccattcagatctaccagcagctcattaaaattgccgagggcgtgttacagccgatgatagtttctgccatgttggaaaatgagagcattcagggtctatctggtgtgaagcccaccggctaccggaagcgctcctccagcatggcagatggggataactcatactgcctggaagctatcatccgccagatgaatgcctttcatacagtcatgtgtgaccagggcttggaccctgagatcatcctgcaggtattcaaacagctcttctacatgatcaacgcagtgactcttaacaacctgctcttgcggaaggacgtctgctcttggagcacaggcatgcaactcaggtacaatataagtcagcttgaggagtggcttcggggaagaaaccttcaccagagtggagcagttcagaccatggaacctctgatccaagcagcccagctcctgcaattaaagaagaaaacccaggaggacgcagaggctatctgctccctgtgtacctccctcagcacccagcagattgtcaaaattttaaacctttatactcccctgaatgaatttgaagaacgggtaacagtggcctttatacgaacaatccaggcacaactacaagagcggaatgaccctcagcaactgctattagatgccaagcacatgtttcctgttttgtttccatttaatccatcttctctaaccatggactcaatccacatcccagcgtgtctcaatctggaattcctcaatgaagtctgaagatgcatgtttccagcattagtttgattcccaatgtgagcaagaaggaagtatatacagtaaagtaaattcaaggatctgttaaatctggtaaaagtagatcaaatcagagattgacagcctgtggagggtgctgaactatacagaattagacacaactatgtcattattttttgtacctactgctcagaataaaaacacttgaaatatg

SEQ ID NO: 156841 - DNA, 1693 bp, Homo sapiens
  Payload ID: 10743
  Gene Symbol: MYO5B
  Gene Name: myosin VB
  Uniprot ID: Q9ULV0
  ENST ID: ENST00000592688
  CDS Start-End: 256-1512
tcctgagttccagagcaggtggcaacagcctgtgaagagcagctctcctggcagcgtccctgactggcgcatttctgacggctgcccatgggccgcactggtcacctccaactgcaagcaggattttacccccaccatcccaggccgggctgatgtctgttctcacactgcttcctctgcttccaggaccttaaagaactggtagaaaagctggaaaagaatgagaggaagctcaaaaagcaactgaagatttacatgaagaaagcccaggacctagaagctgcccaggcattggcccagagtgagaggaagcgccatgagctcaacaggcaggtcacggtccagcggaaagagaaggatttccagggcatgctggagtaccacaaagaggacgaggccctcctcatccggaacctggtgacagacttgaagccccagatgctgtcgggcacagtgccctgtctccccgcctacatcctctacatgtgcatccggcacgcggactacaccaacgacgatctcaaggtgcactccctgctgacctccaccatcaacggcattaagaaagtcctgaaaaagcacaatgatgactttgagatgacgtcattctggttatccaacacctgccgccttcttcactgtctgaagcagtacagcggggatgagggcttcatgactcagaacactgcaaagcagaatgaacactgtcttaagaattttgacctcaccgaataccgtcaggtgctgagtgacctttccattcagatctaccagcagctcattaaaattgccgagggcgtgttacagccgatgatagtttctgccatgttggaaaatgagagcattcagggtctatctggtgtgaagcccaccggctaccggaagcgctcctccagcatggcagatggggataactcatactgcctggaagctatcatccgccagatgaatgcctttcatacagtcatgtgtgaccagggcttggaccctgagatcatcctgcaggtattcaaacagctcttctacatgatcaacgcagtgactcttaacaacctgctcttgcggaaggacgtctgctcttggagcacaggcatgcaactcaggtacaatataagtcagcttgaggagtggcttcggggaagaaaccttcaccagagtggagcagttcagaccatggaacctctgatccaagcagcccagctcctgcaattaaagaagaaaacccaggaggacgcagaggctatctgctccctgtgtacctccctcagcacccagcagattgtcaaaattttaaacctttatactcccctgaatgaatttgaagaacgggtaacagtggcctttatacgaacaatccaggcacaactacaagagcggaatgaccctcagcaactgctattagatgccaagcacatgtttcctgttttgtttccatttaatccatcttctctaaccatggactcaatccacatcccagcgtgtctcaatctggaattcctcaatgaagtctgaagatgcatgtttccagcattagtttgattcccaatgtgagcaagaaggaagtatatacagtaaagtaaattcaaggatctgttaaatctggtaaaagtagatcaaatcagagattgacagcctgtggagggtgctgaactatacagaattagacacaactatgtcattattttttgtacct

SEQ ID NO: 156842 - DNA, 2726 bp, Homo sapiens
  Payload ID: 10743
  Gene Symbol: MYO5B
  Gene Name: myosin VB
  ENST ID: ENST00000616031
  CDS Start-End: 352-2514
agccctacattctgctgctgctgcagagtgatgatttttaacagaccagaacttacacatctaaatgagtgttgttgttcagtgaagtcaccttaggacaatgatttaaataacaccgcgatttctcaagaagtttggaacttctcttatggttgagttcaaagccattttatgttatatgtggcccaaacaagttttattagtacaattaaatctttattgaggacttttgatggaccacatagtgaacttggactgggaatcaaaagaatggtaaggcagggtgtctgccttcactgtgcctgcagtctggctgagatgcacatgtgagccacactagcacaagccagcatgcactggcctgtcacaagagagtgcacaagggtctggatccctgaccctgatgaggtatggcgctcagctgagttaaccaaggactacaaagaaggagacaagagcctacagctcagactggaggatgaaacgattctggaatacccaattgatgtacaacgcaaccagctgcccttcttacggaatccagatatcttggtgggagaaaatgacctgactgcccttagctatcttcatgagcctgcagttttgcataatttgaaggtccgtttcctggagtccaaccatatctacacttactgtggtatcgtacttgttgccattaatccttatgaacagttgccaatctatggacaagatgtcatctatacctacagtggccaaaacatgggagacatggacccccacatctttgctgtggcagaagaagcctacaagcagatggccagagatgagaagaatcagtccatcatagtcagtggggagtctggagccgggaagacggtatcagccaagtatgccatgcgctatttcgccaccgttggtggctcggccagtgaaaccaacatcgaagagaaggtgctggcatccagtcccatcatggaggccattggaaatgccaagaccacccgcaatgacaacagcagccgttttggcaagtacatccagattggctttgacaaaaggtaccacatcatcggggccaacatgaggacttacctcttggagaagtccagagtggtcttccaggcagatgatgagaggaattaccacatcttttaccagctctgtgctgctgccggtcttccagaatttaaagagcttgcactaacaagtgcagaggactttttctatacatcacagggaggagacacttccatcgagggtgtggacgatgctgaggactttgagaagactcgacaagccttcacactcctcggagtgaaagagtcccatcagatgagcatttttaagataattgcttctatcttgcaccttggaagtgtggcgattcaggctgagcgtgatggtgattcctgtagtatatcaccccaggatgtatacctaagcaacttctgccgactgctaggggtggagcacagtcagatggagcactggctgtgtcatcgcaagctggtcaccacctcggagacctacgtcaagaccatgtccctgcagcaggtgatcaatgcgcgcaacgccctggcgaagcacatctatgcccagttgttcggctggattgtggagcacatcaacaaggccctgcacacctccctcaagcagcactccttcatcggggtcctggacatctatgggtttgagacatttgaggtaaacagctttgagcagttctgtatcaactatgcaaatgaaaagctccagcagcagttcaactcgcatgttttcaaactggagcaagaagaatacatgaaggaacagatcccttggaccctgattgatttttatgataaccaaccttgtatcgacctcattgaagccaagctgggtatcttggacctgttggatgaagaatgtaaggtccccaaaggaactgaccagaactgggctcagaagctctatgaccggcactccagcagccagcacttccagaagccccgcatgtccaacacggccttcatcatcgtccactttgcagacaaggtggagtacctctctgatggttttctggagaaaaacagagacacggtgtatgaagagcagatcaatatcctgaaggccagcaagttcccactagtggctgacttgtttcatgatgacaaggaccctgttcctgccaccacccctgggaaggggtcatcttcgaagatcagcgtccgttctgccagaccccccatgaaagtctccaacaaggagcacaagaaaaccgttggccaccagttccgtacctccctcagcacccagcagattgtcaaaattttaaacctttatactcccctgaatgaatttgaagaacgggtaacagtggcctttatacgaacaatccaggcacaactacaagagcggaatgaccctcagcaactgctattagatgccaagcacatgtttcctgttttgtttccatttaatccatcttctctaaccatggactcaatccacatcccagcgtgtctcaatctggaattcctcaatgaagtctgaagatgcatgtttccagcattagtttgattcccaatgtgagcaagaaggaagtatatacagtaaagtaaattcaaggatctgttaaatctggtaaaagtagatcaaatcagagattgacagcctgtggagggtgctgaactatacagaattagacacaactatgtcattattttttgtacctactgctcagaataaaaacacttgaaatatgg

SEQ ID NO: 156843 - DNA, 6971 bp, Homo sapiens
  Payload ID: 10744
  Gene Symbol: MYO5C
  Gene Name: myosin VC
  Uniprot ID: Q9NQX4
  ENST ID: ENST00000261839
  CDS Start-End: 163-5391
aactcgggaacgggaacaggaggccgttggaaaactttgggcaagatggcccggcggtgatttccgcggcggtctctcctgcgcccggcctctgcggcgcaggcccagcccccgagcctcgcacgttcggcagccccggcctggccccggcccctcctgcccatggcggtggccgagctgtacacgcagtacaacagggtctggattcccgatcctgaagaagtttggaagtctgctgaaatagccaaggactacagagttggtgacaaggtcctgcgactcctgctggaggatggaacggagctggattattctgtcaatccagaatctctgcctccacttcggaatcctgacatcctcgtgggcgagaatgacctcacggctctcagctatcttcacgagcccgcggtgctccacaacctcagaatccgctttgcagaatccaaactcatttacacctacagtggaatcattttggtggccatgaatccttacaagcagttgccaatatacggagatgccatcatccacgcctacagcgggcagaacatgggcgatatggacccacacatatttgccgtggcagaagaggcatacaagcagatggccagaaacaacagaaaccagtccataattgtaagtggggagtcaggtgctggaaagacagtgtcggctcgctatgccatgaggtactttgccaccgtcagcaaatcgggcagcaacgctcacgtggaagacaaggtcctggcatccaatcccatcaccgaggccgttggaaatgccaagaccacccgcaatgacaatagtagtcggtttgggaaatacacagaaatcagttttgatgaacaaaatcaaattataggagccaacatgagcacttacctcctggagaaatccagagttgtctttcaatcggaaaatgaacgaaattaccacattttctatcagctttgtgcatctgcacagcagtcggaatttaaacatcttaaattggggagtgccgaagaatttaattatacaagaatgggaggcaatactgtcattgagggtgtgaatgatcgagctgaaatggtagagactcaaaagaccttcacgcttctgggtttcaaggaggattttcagatggacgtttttaaaatcctggcagccatcctacatctgggcaatgtgcagatcaccgcggtgggcaacgagaggtcctcagttagtgaggatgacagtcacctgaaggtgttctgtgagctcctgggcctggagagtggcagagttgctcagtggctgtgcaatcgcaaaatcgtcacaagctctgagacggtggtaaaacccatgaccaggcctcaggctgtcaacgccagggatgcactggccaaaaagatctatgctcacctgttcgacttcattgtggagagaattaaccaagcgttgcagttttcaggcaagcagcacacttttattggtgttttggacatttatggttttgaaacctttgatgtgaacagctttgaacaattttgcatcaattacgctaatgaaaaactgcaacaacagtttaacatgcatgtcttcaaactggaacaagaagaatacatgaaggaagatataccttggacgctgatagatttttatgacaatcaaccagttattgacctgattgaagcaaaaatgggaattctggagttactggatgaagaatgtttgttaccacatggaactgatgaaaactggcttcaaaagctgtataataattttgtcaacaggaaccctttgtttgaaaagcctagaatgtcaaacacatcctttgtcatccagcactttgctgataaggtagagtataaatgtgaaggtttcctggagaaaaacagagacaccgtctatgacatgctggttgaaatcctgagagcaagcaagtttcatctctgtgccaacttttttcaagaaaatccaactcctccttctccttttggttcaatgattacagttaaatctgcaaagcaagtcatcaagccaaacagcaagcatttccggaccacagttgggagcaagttccgcagctctctgtacttgctcatggagaccctcaatgcgacgacgccccactacgttcgatgcatcaagccaaatgatgagaagttaccctttgaatttgactccaaaagaattgttcagcagctgcgagcctgcggcgttttagaaacgattcgcattagtgcacagagctacccttccaggtggacatacatcgagttctacagtcgctacggcattctcatgaccaagcaagagctttccttcagcgataaaaaggaggtgtgcaaggtggttttacacagactcatccaggattctaatcagtaccagtttggtaaaaccaaaattttcttcagagcaggacaagtggcttatttagagaaacttcgattggataaactgaggcagagttgtgttatggtacaaaagcacatgcgtggctggctccagaggaaaaaattcctccgagagagacgagccgccctgataatccagcagtacttccggggtcagcaaactgtgaggaaagctattactgcagtggccttaaaagaagcttgggcagccataatcattcagaagcactgccgcgggtatcttgttcgcagcctgtatcagttgattcgcatggccaccatcacaatgcaggcctacagccgaggattcctggcaaggaggaggtatcgaaagatgctggaggaacataaggctgtgatcctacagaaatacgcacgggcgtggctggccagacgcagattccagagtatccgacgattcgtgcttaatattcagcttacttacagggtccagcgtttgcagaaaaagttggaagatcagaacaaagaaaaccatgggctggtggagaagctgactagcctggctgctcttcgagctggggatgtggaaaagattcagaagctggaagcagaactagaaaaagcagccactcacaggcgaaattacgaggagaaggggaagagatacagggatgctgtggaagagaaattggcaaagcttcagaagcataattcagaactggaaacacagaaagaacaaatacagctgaagcttcaagagaagactgaagagttaaaagaaaaaatggacaacctcaccaagcagctctttgatgatgtacaaaaggaagaacggcaaagaatgcttcttgaaaaaagttttgaactgaaaacacaagactatgagaagcagattcagtctttgaaagaagaaattaaagctctcaaggatgagaagatgcaactccaacacctggtggagggggagcacgtcacttctgatggcttgaaggcggaagtggcccgcctgagcaagcaggtcaagacaatctctgagttcgaaaaagagatagaactacttcaggcacagaagatagatgtggagaaacatgtgcagtcacaaaaacgggaaatgagagaaaagatgtcagagatcaccaaacaacttctcgaaagctatgacattgaagatgtaagaagcaggctctctgtggaagatctggaacatttaaatgaggatggagaactttggtttgcttatgaaggactaaagaaagcaacacgtgttttggagagccatttccagtctcagaaggattgctatgaaaaggagattgaagctttgaacttcaaagtggtgcatctcagtcaagaaatcaaccacctgcagaagttattcagagaagaaaatgacatcaatgaaagcatccgtcatgaagttaccaggctaacatcagagaacatgatgatcccagactttaaacagcaaatttcagaattggagaaacagaagcaagatcttgaaatccgcctgaatgaacaagctgagaaaatgaaaggaaaactagaagaattgtctaatcagttacatcgcagtcaagaggaggaaggaacacaaagaaaggccttggaagcccaaaatgaaatacataccaaagagaaggagaagctgattgataagattcaagaaatgcaggaggccagtgaccacttgaagaaacaatttgaaactgaaagtgaagtcaagtgtaacttccggcaggaagcatcccggctcactttggaaaacagggatcttgaagaagaattagacatgaaagacagagtgattaaaaagctacaagatcaagtcaagacactaagcaagacaattggaaaagccaatgatgtgcactcgtcctcaggacccaaggagtaccttggaatgctgcaatacaagagagaagacgaggccaagctcattcagaacctcattcttgacttgaagccccgtggcgtggtggtgaacatgatccccgggctgccggctcatatcctgttcatgtgtgtgcgctacgcagactctctgaatgatgccaacatgctgaagtccctcatgaacagcaccattaatggcatcaagcaggtggttaaggaacatttagaagactttgaaatgctgtccttttggctttccaacacttgtcattttctcaattgcctgaagcagtacagcggagaagaggaattcatgaagcataatagtccacagcagaataagaattgcttgaacaattttgacctttcagaatacagacagattctcagtgatgtggctatacgaatatatcatcaatttattatcataatggaaaagaatatccaaccgataatagttccgggaatgctggagtatgagagcctgcagggcatttccggcctgaagcccacaggcttccggaagcgctcctctagcatagacgacacggacggctacaccatgacctccgtcctgcaacagctgagctacttttacaccaccatgtgccagaacggcctggaccccgagcttgtgaggcaggcggtgaagcagctcttcttcttgatcggggcggtcacgctgaacagcctcttcctgcgcaaggacatgtgctcctgcagaaaagggatgcagatcaggtgcaatatcagctacttagaagaatggcttaaagataagaacttgcagaacagcttagcaaaggaaactttggagcccctctctcaggcagcctggttgcttcaggtcaagaagaccacagacagtgatgccaaggagatctacgaacgctgcacctcactgtctgctgtgcagatcataaagatccttaattcatacacacctatagatgactttgagaagagagtgactccatcctttgttcgcaaagtacaggctctcctaaatagccgggaggattcatcacagctgatgttggataccaaatatctctttcaagtcacatttccttttaccccctctccacatgctctggaaatgattcagatccccagcagtttcaagctaggctttctgaataggttatagcaggagaaaaagtcaatgcactttttcttcaaaagctaagtgaaggttcaatatgagggatgtgttttattaattggcagtggaaattggaatgtgatttaaggaagaaaacagacttttctcaaatggaccacatcatctctcactcacagtgacaatgctgctcctgtaattttgtaagaattcacacacaccagctgtatttggaaaagccatgtctcactctcgaatctcagctggttttcactgaaattcctggagggctcatattttcttccacgtgcctcttgatctgttctgtcttgtggcagggctctaccaggagggagtgagatctggggacacagtggcttccaagttttctaaggttcatgtgaaacctgagtacatttacaaagctgcaagtggattctagtgctgagtcttccaggaaaaaatcccgtttggccaccgtgacctgccaaaagttctcttgccccatgcctgctggggacagaaggttttcatgaactctttttactgaaaatgccctgcatttaaaaatgtttattttagacccttctaaatttttttttttttttttttttgagactccggagtctcgctctatcgccaggctggagtgtagtggcatgatctcggcttattgcaacctccgcttcctgggttcaaacaattctcctgcctcagcctcctgagtagctgggactacaggcacctgccaccacgcccagctaatttttgtatttttagtggagacaggtttcaccatgttggccaggatggcctcgatctcttgacctcgtgatccgcccacctcagcctcccaaagtgctaggattacaggcgtgtgccaccgcgcccggctgacccttttaatttttaagagtgttcaatccgagatgaatcatttgaagtatttttatatgtatatctatttaaaactaatatattattaaagcttaattgccatgccgtttatcttctctgaaagaacttcaaatcttacctgccaacatattcaccataatttttttattttttaatacctttcatacaataacttttttaaaacaacctcagattgaaaaagcaacctaaattactttcgctctctaatcagcatttcaatgtatttatttttaaattttctcaaaaagtaactaaaaaattgtgtcggaccctacttttgagaaatctacgtttcccaagttttatgggaactggctattccttgtcccggcacaccttctcattccttcctttcagagcctaaaacctcatttgataagcactcctagtctctggcctgtggatccagtgctattctgtcaccaacctaagaatcccaattgcaccttctgtttctgacagtcacaggtgacagctgtgattctataatacagactggtgtcttagaggtaggaataatacatgattatgaagcatcaccctgctaatacataataatgtctttttatattataagtgattgagtttagttcatttcaatacattgtacatgaaaaaatgaaaagtagaactttgtaatactttaatcaataaaattaattaccaaa

SEQ ID NO: 156844 - DNA, 770 bp, Homo sapiens
  Payload ID: 10744
  Gene Symbol: MYO5C
  Gene Name: myosin VC
  ENST ID: ENST00000558479
  CDS Start-End: 451-770
gttggaaaactttgggcaagatggcccggcggtgatttccgcggcggtctctcctgcgcccggcctctgcggcgcaggcccagcccccgagcctcgcacgttcggcagccccggcctggccccggcccctcctgcccatggcggtggccgagctgtacacgcagggtctggattcccgatcctgaagaagtttggaagtctgctgaaatagccaaggactacagagttggtgacaaggtcctgcgactcctgctggaggatggaacggagctggattattctgtcaatccagaatctctgcctccacttcggaatcctgacatcctcgtgggcgagaatgacctcacggctctcagctatcttcacgagcccgcggtgctccacaacctcagaatccgctttgcagaatccaaactcatttacacctacagtggaatcattttggtggccatgaatccttacaagcagttgccaatatacggagatgccatcatccacgcctacagcgggcagaacatgggcgatatggacccacacatatttgccgtggcagaagaggcatacaagcagatggccagaaacaacagaaaccagtccataattgtaagtggggagtcaggtgctggaaagacagtgtcggctcgctatgccatgaggtactttgccaccgtcagcaaatcgggcagcaacgctcacgtggaagacaaggtcctggcatccaatcccatcaccgaggccgttggaaatgccaagaccacccgcaatgacaa

SEQ ID NO: 156845 - DNA, 3074 bp, Homo sapiens
  Payload ID: 10744
  Gene Symbol: MYO5C
  Gene Name: myosin VC
  ENST ID: ENST00000558902
  CDS Start-End: 134-595
gaaaactttgggcaagatggcccggcggtgatttccgcggcggtctctcctgcgcccggcctctgcggcgcaggcccagcccccgagcctcgcacgttcggcagccccggcctggccccggcccctcctgcccatggcggtggccgagctgtacacgcagtacaacagggtctggattcccgatcctgaagaagtttggaagtctgctgaaatagccaaggactacagagttggtgacaaggtcctgcgactcctgctggaggatggaacggagctggattattctgtcaatccagaatctctgcctccacttcggaatcctgacatcctcgtgggcgagaatgacctcacggctctcagctatcttcacgagcccgcggtgctccacaacctcagaatccgctttgcagaatccaaactcatttacacctacagtggaatcattttggtggccatgaatccttacaagcagttgccaatatacggagatgccatcatccacgcctacagcgggcagaacatgggcgatatggacccacacatatttgccgtggcagaagaggcatacaagcagatggccagatgggaaatctgaggcacaggacctggacctgctgactctttacctaaatctttactgcataaccccagccgcagctcctgagctccctccgctttatgtcttcgtctgtgagctggactctcagagggcacccattcctggttctgatgcttataatgagggagcaggtggtgcttacatgagaaacaacagaaaccagtccataattgtaagtggggagtcaggtgctggaaagacagtgtcggctcgctatgccatgaggtactttgccaccgtcagcaaatcgggcagcaacgctcacgtggaagacaaggtcctggcatccaatcccatcaccgaggccgttggaaatgccaagaccacccgcaatgacaatagtagtcggtttgggaaatacacagaaatcagttttgatgaacaaaatcaaattataggagccaacatgagcacttacctcctggagaaatccagagttgtctttcaatcggaaaatgaacgaaattaccacattttctatcagctttgtgcatctgcacagcagtcggaatttaaacatcttaaattggggagtgccgaagaatttaattatacaagaatgggaggcaatactgtcattgagggtgtgaatgatcgagctgaaatggtagagactcaaaagaccttcacgcttctgggtttcaaggaggattttcagatggacgtttttaaaatcctggcagccatcctacatctgggcaatgtgcagatcaccgcggtgggcaacgagaggtcctcagttagtgaggatgacagtcacctgaaggtgttctgtgagctcctgggcctggagagtggcagagttgctcagtggctgtgcaatcgcaaaatcgtcacaagctctgagacggtggtaaaacccatgaccaggcctcaggctgtcaacgccagggatgcactggccaaaaagatctatgctcacctgttcgacttcattgtggagagaattaaccaagcgttgcagttttcagttttgaaacctttgatgtgaacagctttgaacaattttgcatcaattacgctaatgaaaaactgcaacaacagtttaacatgcatgtcttcaaactggaacaagaagaatacatgaaggaagatataccttggacgctgatagatttttatgacaatcaaccagttattgacctgattgaagcaaaaatgggaattctggagttactggatgaagaatgtttgttaccacatggaactgatgaaaactggcttcaaaagctgtataataattttgtcaacaggaaccctttgtttgaaaagcctagaatgtcaaacacatcctttgtcatccagcactttgctgataaggtagagtataaatgtgaaggtttcctggagaaaaacagagacaccgtctatgacatgctggttgaaatcctgagagcaagcaagtttcatctctgtgccaacttttttcaagaaaatccaactcctccttctccttttggttcaatgattacagttaaatctgcaaagcaagtcatcaagccaaacagcaagcatttccggaccacagttgggagcaagttccgcagctctctgtacttgctcatggagaccctcaatgcgacgacgccccactacgttcgatgcatcaagccaaatgatgagaagttaccctttgaatttgactccaaaagaattgttcagcagctgcgagcctgcggcgttttagaaacgattcgcattagtgcacagagctacccttccaggtggacatacatcgagttctacagtcgctacggcattctcatgaccaagcaagagctttccttcagcgataaaaaggaggtgtgcaaggtggttttacacagactcatccaggattctaatcagtaccagtttggtaaaaccaaaattttcttcagagcaggacaagtggcttatttagagaaacttcgattggataaactgaggcagagttgtgttatggtacaaaagcacatgcgtggctggctccagaggaaaaaattcctccgagagagacgagccgccctgataatccagcagtacttccggggtcagcaaactgtgagaacaaagaaaaccatgggctggtggagaagctgactagcctggctgctcttcgagctggggatgtggaaaagattcagaagctggaagcagaactagaaaaagcagccactcacaggcgaaattacgaggagaaggggaagagatacagggatgctgtggaagagaaattggcaaagcttcagaagcataattcagaactggaaacacagaaagaacaaatacagctgaagcttcaagagaagactgaagagttaaaagaaaaaatggacaacctcaccaagcagctctttgatgatgtacaaaaggaagaacggcaaagaatgcttcttgaaaaaagttttgaactgaaaacacaagactatgagaagcagattcagtctttgaaagaagaaattaaagctctcaa

SEQ ID NO: 156846 - DNA, 6076 bp, Homo sapiens
  Payload ID: 10744
  Gene Symbol: MYO5C
  Gene Name: myosin VC
  ENST ID: ENST00000560809
  CDS Start-End: 21-830
ggccccggcccctcctgcccatggcggtggccgagctgtacacgcagtacaacagggtctggattcccgatcctgaagaagtttggaagtctgctgaaatagccaaggactacagagttggtgacaaggtcctgcgactcctgctggaggatggaacggagctggattattctgtcaatccagaatctctgcctccacttcggaatcctgacatcctcgtgggcgagaatgacctcacggctctcagctatcttcacgagcccgcggtgctccacaacctcagaatccgctttgcagaatccaaactcatttacacctacagtggaatcattttggtggccatgaatccttacaagcagttgccaatatacggagatgccatcatccacgcctacagcgggcagaacatgggcgatatggacccacacatatttgccgtggcagaagaggcatacaagcagatggccagaaacaacagaaaccagtccataattgtaagtggggagtcaggtgctggaaagacagtgtcggctcgctatgccatgaggtactttgccaccgtcagcaaatcgggcagcaacgctcacgtggaagacaaggtcctggcatccaatcccatcaccgaggccgttggaaatgccaagaccacccgcaatgacaatagtagtcggtttgggaaatacacagaaatcagttttgatgaacaaaatcaaattataggagccaacatgagcacttacctcctggagaaatccagagttgtctttcaaggagtgccgaagaatttaattatacaagaatgggaggcaatactgtcattgagggtgtgaatgatcgagctgaaatggtagagactcaaaagaccttcacgcttctgggaaatgtgctaatcccctcacggtgactgaatatggtttcaaggaggattttcagatggacgtttttaaaatcctggcagccatcctacatctgggcaatgtgcagatcaccgcggtgggcaacgagaggtcctcagttagtgaggatgacagtcacctgaaggtgttctgtgagctcctgggcctggagagtggcagagttgctcagtggctgtgcaatcgcaaaatcgtcacaagctctgagacggtggtaaaacccatgaccaggcctcaggctgtcaacgccagggatgcactggccaaaaagatctatgctcacctgttcgacttcattgtggagagaattaaccaagcgttgcagttttcagttttgaaacctttgatgtgaacagctttgaacaattttgcatcaattacgctaatgaaaaactgcaacaacagtttaacatgcatgtcttcaaactggaacaagaagaatacatgaaggaagatataccttggacgctgatagatttttatgacaatcaaccagttattgacctgattgaagcaaaaatgggaattctggagttactggatgaagaatgtttgttaccacatggaactgatgaaaactggcttcaaaagctgtataataattttgtcaacaggaaccctttgtttgaaaagcctagaatgtcaaacacatcctttgtcatccagcactttgctgataaggtagagtataaatgtgaaggtttcctggagaaaaacagagacaccgtctatgacatgctggttgaaatcctgagagcaagcaagtttcatctctgtgccaacttttttcaagaaaatccaactcctccttctccttttggttcaatgattacagttaaatctgcaaagcaagtcatcaagccaaacagcaagcatttccggaccacagttgggagcaagttccgcagctctctgtacttgctcatggagaccctcaatgcgacgacgccccactacgttcgatgcatcaagccaaatgatgagaagttaccctttgaatttgactccaaaagaattgttcagcagctgcgagcctgcggcgttttagaaacgattcgcattagtgcacagagctacccttccaggtggacatacatcgagttctacagtcgctacggcattctcatgaccaagcaagagctttccttcagcgataaaaaggaggtgtgcaaggtggttttacacagactcatccaggattctaatcagtaccagtttggtaaaaccaaaattttcttcagagcaggacaagtggcttatttagagaaacttcgattggataaactgaggcagagttgtgttatggtacaaaagcacatgcgtggctggctccagaggaaaaaattcctccgagagagacgagccgccctgataatccagcagtacttccggggtcagcaaactgtgagatgctggaggaacataaggctgtgatcctacagaaatacgcacgggcgtggctggccagacgcagattccagagtatccgacgattcgtgcttaatattcagcttacttacagggtccagcgtttgcagaaaaagttggaagatcagaacaaagaaaaccatgggctggtggagaagctgactagcctggctgctcttcgagctggggatgtggaaaagattcagaagctggaagcagaactagaaaaagcagccactcacaggcgaaattacgaggagaaggggaagagatacagggatgctgtggaagagaaattggcaaagcttcagaagcataattcagaactggaaacacagaaagaacaaatacagctgaagcttcaagagaagactgaagagttaaaaggcttcttgaaaaaagttttgaactgaaaacacaagactatgagaagcagattcagtctttgaaagaagaaattaaagctctcaaggatgagaagatgcaactccaacacctggtggagggggagcacgtcacttctgatggcttgaaggcggaagtggcccgcctgagcaagcaggtcaagacaatctctgagttcgaaaaagagatagaactacttcaggcacagaagatagatgtggagaaacatgtgcagtcacaaaaacgggaaatgagagaaaagatgtcagagatcaccaaacaacttctcgaaagctatgacattgaagatgtaagaagcaggctctctgtggaagatctggaacatttaaatgaggatggagaactttggtttgcttatgaaggactaaagaaagcaacacgtgttttggagagccatttccagtctcagaaggattgctatgaaaaggagattgaagctttgaacttcaaagtggtgcatctcagtcaagaaatcaaccacctgcagaagttattcagagaagaaaatgacatcaatgaaagcatccgtcatgaagttaccaggctaacatcagagaacatgatgatcccagactttaaacagcaaatttcagaattggagaaacagaagcaagatcttgaaatccgcctgaatgaacaagctgagaaaatgaaaggaaaactagaagaattgtctaatcagttacatcgcagtcaagaggaggaaggaacacaaagaaaggccttggaagcccaaaatgaaatacataccaaagagaaggagaagctgattgataagattcaagaaatgcaggaggccagtgaccacttgaagaaacaatttgaaactgaaagtgaagtcaagtgtaacttccggcaggaagcatcccggctcactttggaaaacagggatcttgaagaagaattagacatgaaagacagagtgattaaaaagctacaagatcaagtcaagacactaagcaagacaattggaaaagacttgaagccccgtggcgtggtggtgaacatgatccccgggctgccggctcatatcctgttcatgtgtgtgcgctacgcagactctctgaatgatgccaacatgctgaagtccctcatgaacagcaccattaatggcatcaagcaggtggttaaggaacatttagaagactttgaaatgctgtccttttggctttccaacacttgtcattttctcaattgcctgaagcagtacagcggagaagaggaattcatgaagcataatagtccacagcagaataagaattgcttgaacaattttgacctttcagaatacagacagattctcagtgatgtggctatacgaatatatcatcaatttattatcataatggaaaagaatatccaaccgataatagttccgggaatgctggagtatgagagcctgcagggcatttccggcctgaagcccacaggcttccggaagcgctcctctagcatagacgacacggacggctacaccatgacctccgtcctgcaacagctgagctacttttacaccaccatgtgccagaacggcctggaccccgagcttgtgaggcaggcggtgaagcagctcttcttcttgatcggggcggtcacgctgaacagcctcttcctgcgcaaggacatgtgctcctgcagaaaagggatgcagatcaggtgcaatatcagctacttagaagaatggcttaaagataagaacttgcagaacagcttagcaaaggaaactttggagcccctctctcaggcagcctggttgcttcaggtcaagaagaccacagacagtgatgccaaggagatctacgaacgctgcacctcactgtctgctgtgcagatcataaagatccttaattcatacacacctatagatgactttgagaagagagtgactccatcctttgttcgcaaagtacaggctctcctaaatagccgggaggattcatcacagctgatgttggataccaaatatctctttcaagtcacatttccttttaccccctctccacatgctctggaaatgattcagatccccagcagtttcaagctaggctttctgaataggttatagcaggagaaaaagtcaatgcactttttcttcaaaagctaagtgaaggttcaatatgagggatgtgttttattaattggcagtggaaattggaatgtgatttaaggaagaaaacagacttttctcaaatggaccacatcatctctcactcacagtgacaatgctgctcctgtaattttgtaagaattcacacacaccagctgtatttggaaaagccatgtctcactctcgaatctcagctggttttcactgaaattcctggagggctcatattttcttccacgtgcctcttgatctgttctgtcttgtggcagggctctaccaggagggagtgagatctggggacacagtggcttccaagttttctaaggttcatgtgaaacctgagtacatttacaaagctgcaagtggattctagtgctgagtcttccaggaaaaaatcccgtttggccaccgtgacctgccaaaagttctcttgccccatgcctgctggggacagaaggttttcatgaactctttttactgaaaatgccctgcatttaaaaatgtttattttagacccttctaaatttttttttttttttttttttgagactccggagtctcgctctatcgccaggctggagtgtagtggcatgatctcggcttattgcaacctccgcttcctgggttcaaacaattctcctgcctcagcctcctgagtagctgggactacaggcacctgccaccacgcccagctaatttttgtatttttagtggagacaggtttcaccatgttggccaggatggcctcgatctcttgacctcgtgatccgcccacctcagcctcccaaagtgctaggattacaggcgtgtgccaccgcgcccggctgacccttttaatttttaagagtgttcaatccgagatgaatcatttgaagtatttttatatgtatatctatttaaaactaatatattattaaagcttaattgccatgccgtttatcttctctgaaagaacttcaaatcttacctgccaacatattcaccataatttttttattttttaatacctttcatacaataacttttttaaaacaacctcagattgaaaaagcaacctaaattactttcgctctctaatcagcatttcaatgtatttatttttaaattttctcaaaaagtaactaaaaaattgtgtcggaccctacttttgagaaatctacgtttcccaagttttatgggaactggctattccttgtcccgg

SEQ ID NO: 156847 - DNA, 2129 bp, Homo sapiens
  Payload ID: 10744
  Gene Symbol: MYO5C
  Gene Name: myosin VC
  Uniprot ID: Q9NQX4
  ENST ID: ENST00000559459
  CDS Start-End: 109-1401
cggtgatttccgcggcggtctctcctgcgcccggcctctgcggcgcaggcccagcccccgagcctcgcacgttcggcagccccggcctggccccggcccctcctgcccatggcggtggccgagctgtacacgcagtacaacagggtctggattcccgatcctgaagaagtttggaagtctgctgaaatagccaaggactacagagttggtgacaaggtcctgcgactcctgctggaggatggaacggagctggattattctgtcaatccagaatctctgcctccacttcggaatcctgacatcctcgtgggcgagaatgacctcacggctctcagctatcttcacgagcccgcggtgctccacaacctcagaatccgctttgcagaatccaaactcatttacacctacagtggaatcattttggtggccatgaatccttacaagcagttgccaatatacggagatgccatcatccacgcctacagcgggcagaacatgggcgatatggacccacacatatttgccgtggcagaagaggcatacaagcagatggccagaaacaacagaaaccagtccataattgtaagtggggagtcaggtgctggaaagacagtgtcggctcgctatgccatgaggtactttgccaccgtcagcaaatcgggcagcaacgctcacgtggaagacaaggtcctggcatccaatcccatcaccgaggccgttggaaatgccaagaccacccgcaatgacaatagtagtcggtttgggaaatacacagaaatcagttttgatgaacaaaatcaaattataggagccaacatgagcacttacctcctggagaaatccagagttgtctttcaatcggaaaatgaacgaaattaccacattttctatcagctttgtgcatctgcacagcagtcggaatttaaacatcttaaattggggagtgccgaagaatttaattatacaagaatgggaggcaatactgtcattgagggtgtgaatgatcgagctgaaatggtagagactcaaaagaccttcacgcttctgggtttcaaggaggattttcagatggacgtttttaaaatcctggcagccatcctacatctgggcaatgtgcagatcaccgcggtgggcaacgagaggtcctcagttagtgaggatgacagtcacctgaaggtgttctgtgagctcctgggcctggagagtggcagagttgctcagtggctgtgcaatcgcaaaatcgtcacaagctctgagacggtggtaaaacccatgaccaggcctcaggctgtcaacgccagggatgcactggccaaaaagatctatgctcacctgttcgacttcattgtggagagaattaaccaagcgttgcagttttcagttttgaaacctttgatgtgaacagctttgaacaattttgcatcaattacgctaatgaaaaactgcaacaacagtttaacatgcatgtcttcaaactggaacaagaagaatacatgaaggaagatataccttggacgctgatagatttttatgacaatcaaccagttattgacctgattgaagcaaaaatgggaattctggagttactggatgaagaatgtttgttaccacatggaactgatgaaaactggcttcaaaagctgtataataattttgtcaacaggaaccctttgtttgaaaagcctagaatgtcaaacacatcctttgtcatccagcactttgctgataaggtaccgtgaaggtctccatcaatgctgtcaaccccggaacctgtacagcctccagaaggagtaggcaggccaggaatgtttctgatcagattcaagtcatacttaacatgtagctttgatgagtgtgtgtttaacagttccttatttgtttttgtggcgagatacatgagttccaactgtactactttaaagacgaatgtgttgttagaagaccacacttctgattttggatgtactgaagttactgaatttcattaacctcttatcagtttattttctatatgaaattgtgataatcaagacagcataattcttccttatgatgaaagctatatttttttctgaagttctatttgattaaactggactatattacagtggcaacataggttaactcaa

SEQ ID NO: 156848 - DNA, 5387 bp, Homo sapiens
  Payload ID: 10745
  Gene Symbol: MYO6
  Gene Name: myosin VI
  ENST ID: ENST00000369975
  CDS Start-End: 26-3787
ggagatcgtggatcctccttcaaaaatggaggatggaaagcccgtttgggcgccacaccctacagatggatttcagatgggcaatattgtggatattggccccgacagcttaacaattgaacccttgaatcagaaaggcaagacatttttggctctcataaaccaagtgtttcctgcagaagaggacagtaaaaaagatgtggaagataactgttcactaatgtatttaaatgaagccacactgctccataatatcaaagttcgatatagtaaagacagaatttatacatatgtcgccaacattctgattgcagtgaatccatactttgacatacctaaaatatattcttcagaagcaataaagtcatatcaaggaaaatctcttgggacaagaccacctcatgtctttgcaattgctgataaagcttttcgagacatgaaggtgctcaagatgagtcagtctatcattgtatctggagaatcaggagccggcaaaacagaaaatacaaaatttgttctaagatacctgactgaatcctatggaacaggtcaagatattgatgacagaattgttgaagctaacccactcctagaagcctttggaaatgcgaagactgttcgcaacaataatagcagtcgatttgggaaatttgtagaaatacattttaatgaaaagagctcagttgttggaggatttgtttcacattatctcctagagaaatctaggatctgtgttcaaggcaaagaggaaagaaattatcatatcttttataggttgtgtgctggtgcttctgaagatattagagaaaaacttcatttgagttcaccagataattttcggtatttaaaccgaggctgcactagatactttgctaacaaagaaactgacaaacagattttacagaaccgcaaaagtcctgagtaccttaaggcaggttctatgaaagatcctctgctagatgaccatggtgattttattagaatgtgcacggctatgaaaaaaattggtttggatgatgaagaaaagcttgatctcttccgggtagtagctggcgtcctgcaccttggaaatattgattttgaggaagctggcagcacttcaggtggttgtaatctgaagaataaatctgctcagtctttggaatattgtgctgaattactgggtttggaccaagatgatcttcgagtaagtttgaccacaagagtcatgctaacaacagcagggggcaccaaaggaacagttataaaggtacctctgaaagtggagcaagcaaacaatgctcgtgatgccctggcaaagacagtgtatagccatctttttgatcatgtggtaaacagagtaaatcagtgttttccttttgaaacatcatcctattttattggagtcctagatattgctggttttgagtactttgagcataacagttttgaacaattttgcatcaactattgcaatgaaaaacttcaacaattttttaatgaaaggattctgaaggaggaacaagaactctatcaaaaagaaggtttaggtgttaatgaagtgcattatgtggataatcaggactgtatagatttaattgaagccaaattagtgggaatactggatattttggatgaagaaaatcgccttccccagccaagtgatcaacactttacatctgcagttcaccaaaagcacaaggatcattttcgactcactattcccagaaaatctaagctggcagttcataggaatatcagagacgacgaaggcttcattatcaggcattttgcgggggcagtgtgctatgaaacaacccagtttgtggagaaaaataatgatgctttacatatgtctcttgaatccttaatatgtgaatccagagataagtttatacgggaattatttgaatcatccacaaataacaacaaagatactaaacaaaaagcaggaaaacttagcttcatcagcgtgggaaacaagtttaagacacagttaaatttgcttctggataaacttcgaagtactggagcaagctttattcgttgcatcaaacctaacttaaagatgacaagccaccactttgaaggtgctcaaattctgtctcagcttcagtgttcagggatggtgtctgttttggacttgatgcagggtggttacccatcacgagcttcatttcatgaactctacaacatgtacaaaaagtatatgccagataaacttgcaagattggatccaagactattttgtaaggctttgtttaaagctttgggcttaaatgaaaatgactacaagtttgggttaaccaaagtattttttagacctggcaagtttgcagaatttgatcagatcatgaagtctgaccctgaccacttagcagagttggttaaaagagtcaatcactggctcacatgcagtcgctggaagaaagttcagtggtgctcactctcagtcatcaaattgaaaaacaaaataaaatatcgagctgaagcctgcattaaaatgcaaaaaactattcgaatgtggctttgcaagaggagacacaaacctcgcattgatggtctggttaaggtgggcacactgaaaaaacgacttgataaatttaatgaggtagtcagtgtgttgaaagatggaaaacccgagatgaataaacagatcaagaatctggaaatttctattgatactttgatggccaaaattaagtccactatgatgacgcaggaacaaatccagaaagaatatgatgcactggttaaaagctcagaggaactcctcagtgcattacagaaaaaaaaacagcaggaagaggaagcagaaaggctgaggcgtattcaagaagaaatggaaaaggaaagaaaaagacgtgaagaagacgaaaaacgtcgaagaaaggaagaggaggaaaggcggatgaaacttgagatggaagcaaagagaaaacaagaagaagaagagagaaagaaaagggaagatgatgaaaaacgcattcaagctgaagtggaggcacagctggcccgacagaaggaggaggaatcccaacagcaagcagttctggagcaggagcgcagggaccgggagctggccctgaggattgcccagagtgaagccgagctcatcagtgatgaggcccaggccgacctggcgctgcggagaggtcctgctgtactagccaccaaagcagctgctggtactaagaaatatgatcttagtaaatggaaatatgcagaactacgtgataccatcaatacttcttgtgatattgagctcctggcagcttgcagagaagaatttcataggagactaaaagtgtatcatgcttggaaatctaagaacaagaagagaaatactgaaacagagcaacgtgctccaaagtctgttactgattatgctcagcaaaacccagcagctcagattcctgccaggcagcgggagattgaaatgaaccgacagcaacgcttcttccgcatcccattcatccgccctgccgaccagtacaaagaccctcagagtaagaaaaaaggctggtggtatgcccattttgatggaccatggattgcccggcaaatggaactccatcctgacaagccacccatcctacttgtggctggtaaggacgacatggagatgtgtgagctgaatcttgaggagactggcctgactcggaagcgtggtgctgagatcttgccaagacagtttgaagaaatctgggaacgctgtggaggcatccagtaccttcagaatgcgattgagagcagacaggctcggcccacctatgcaacagccatgctgcagagtctgttaaagtagatgttgcacaccagccttacagctgggagcctttgccatggtacttaggtagggtgtgtgcccccagatttaaccattccataatcatgttagagttacttctataaagtgaacagattttattaatcacggcttttggtgaatttgtttaaggttaattatggtagcaaattttggacctaaacattatttttctgtatcccgctgtaattcccaaaactctcattattctctaactattacacatgggcatattctgatgtttctcatcctttgccagaagactaccttacatccatcgtaattgttctctaggaaaagagaacttttttcaaaattcaaaatactttttaaggatggcacagtaccatataactggagtaataaaacatgagcttacattcttacaataactaaaccacttaaaatgatcaaggcactaatgttttggtctgaaaagctgtgtactttatagacattttcagacatttttggaaatttccattaaaggtggaaaatctatttttttcctcctttgcagtgtcttagtttgaatgaaacacttcgaagttctagaattctagaaagagccttaatgtatttgatgtattctgtgataagaggtactaatagtatccagcacagatttgcttttctttgctagcacaatgtgtgttgctgtcagaatattctttttatattctgtggaaaaataaaggaaattcagattgtttaaatgcctaaaagttttgagataagttttgtttcaattagaaaaggaaataggttttaggtggcatagtggcttaactggactgaattcaaatattctttcaacttcatctcaatagtgatttttgtatcagaatcttgtccaagttgtttcattgatttagtaagtgttctgcttccaacatctttctttttaagaaattcctagtgtcttttttggcctttgaggttttggtaattgtagacctgtttcataagctttgtaattcagaaatccttgtatttagtaagtgcttgttttacataactgataattttaaaatgttttctttgtgtgctgttagtattgattcaaatgtcagcagctttaagcctaatatttatgactttcacatttggaatttaaagacaaaaatacatcaaggagttatgctgacataattctaaggagttttgttgtattttagaataaaattataaagtaaaatgattctctgtactgctttttcccccagtttttagagaccctaacctttgaaatgaaattccagtgatttcttttttccctagaaagattacctcagttagggaagtatttcccagctgactagtgtttgtgagccacagacactgtcttcagaattgcttctctcatgtcttagtagagaaatatttatttattatgatacattcaaatgattgtcaagttaaattaaatggttgtgtctgtgctattgagaatgcaaatgtgattatcttttgaaggctgtattactgcatagcttcacccaccctcgggtcatttcgtccctgtgattggggacagaaggtgtagctactgaagtaaatgacctattctctctcttcc

SEQ ID NO: 156849 - DNA, 5597 bp, Homo sapiens
  Payload ID: 10745
  Gene Symbol: MYO6
  Gene Name: myosin VI
  Uniprot ID: Q9UM54
  ENST ID: ENST00000369977
  CDS Start-End: 140-3997
cttcactggccctcatcacttctcaccgcgccctccagcttcacccgtacaggtagccccgccgccgcgcacctgccttcgctcccgcaccggtgacagtggatagtggaaacaggagatcgtggatcctccttcaaaaatggaggatggaaagcccgtttgggcgccacaccctacagatggatttcagatgggcaatattgtggatattggccccgacagcttaacaattgaacccttgaatcagaaaggcaagacatttttggctctcataaaccaagtgtttcctgcagaagaggacagtaaaaaagatgtggaagataactgttcactaatgtatttaaatgaagccacactgctccataatatcaaagttcgatatagtaaagacagaatttatacatatgtcgccaacattctgattgcagtgaatccatactttgacatacctaaaatatattcttcagaagcaataaagtcatatcaaggaaaatctcttgggacaagaccacctcatgtctttgcaattgctgataaagcttttcgagacatgaaggtgctcaagatgagtcagtctatcattgtatctggagaatcaggagccggcaaaacagaaaatacaaaatttgttctaagatacctgactgaatcctatggaacaggtcaagatattgatgacagaattgttgaagctaacccactcctagaagcctttggaaatgcgaagactgttcgcaacaataatagcagtcgatttgggaaatttgtagaaatacattttaatgaaaagagctcagttgttggaggatttgtttcacattatctcctagagaaatctaggatctgtgttcaaggcaaagaggaaagaaattatcatatcttttataggttgtgtgctggtgcttctgaagatattagagaaaaacttcatttgagttcaccagataattttcggtatttaaaccgaggctgcactagatactttgctaacaaagaaactgacaaacagattttacagaaccgcaaaagtcctgagtaccttaaggcaggttctatgaaagatcctctgctagatgaccatggtgattttattagaatgtgcacggctatgaaaaaaattggtttggatgatgaagaaaagcttgatctcttccgggtagtagctggcgtcctgcaccttggaaatattgattttgaggaagctggcagcacttcaggtggttgtaatctgaagaataaatctgctcagtctttggaatattgtgctgaattactgggtttggaccaagatgatcttcgagtaagtttgaccacaagagtcatgctaacaacagcagggggcaccaaaggaacagttataaaggtacctctgaaagtggagcaagcaaacaatgctcgtgatgccctggcaaagacagtgtatagccatctttttgatcatgtggtaaacagagtaaatcagtgttttccttttgaaacatcatcctattttattggagtcctagatattgctggttttgagtactttgagcataacagttttgaacaattttgcatcaactattgcaatgaaaaacttcaacaattttttaatgaaaggattctgaaggaggaacaagaactctatcaaaaagaaggtttaggtgttaatgaagtgcattatgtggataatcaggactgtatagatttaattgaagccaaattagtgggaatactggatattttggatgaagaaaatcgccttccccagccaagtgatcaacactttacatctgcagttcaccaaaagcacaaggatcattttcgactcactattcccagaaaatctaagctggcagttcataggaatatcagagacgacgaaggcttcattatcaggcattttgcgggggcagtgtgctatgaaacaacccagtttgtggagaaaaataatgatgctttacatatgtctcttgaatccttaatatgtgaatccagagataagtttatacgggaattatttgaatcatccacaaataacaacaaagatactaaacaaaaagcaggaaaacttagcttcatcagcgtgggaaacaagtttaagacacagttaaatttgcttctggataaacttcgaagtactggagcaagctttattcgttgcatcaaacctaacttaaagatgacaagccaccactttgaaggtgctcaaattctgtctcagcttcagtgttcagggatggtgtctgttttggacttgatgcagggtggttacccatcacgagcttcatttcatgaactctacaacatgtacaaaaagtatatgccagataaacttgcaagattggatccaagactattttgtaaggctttgtttaaagctttgggcttaaatgaaaatgactacaagtttgggttaaccaaagtattttttagacctggcaagtttgcagaatttgatcagatcatgaagtctgaccctgaccacttagcagagttggttaaaagagtcaatcactggctcacatgcagtcgctggaagaaagttcagtggtgctcactctcagtcatcaaattgaaaaacaaaataaaatatcgagctgaagcctgcattaaaatgcaaaaaactattcgaatgtggctttgcaagaggagacacaaacctcgcattgatggtctggttaaggtgggcacactgaaaaaacgacttgataaatttaatgaggtagtcagtgtgttgaaagatggaaaacccgagatgaataaacagatcaagaatctggaaatttctattgatactttgatggccaaaattaagtccactatgatgacgcaggaacaaatccagaaagaatatgatgcactggttaaaagctcagaggaactcctcagtgcattacagaaaaaaaaacagcaggaagaggaagcagaaaggctgaggcgtattcaagaagaaatggaaaaggaaagaaaaagacgtgaagaagacgaaaaacgtcgaagaaaggaagaggaggaaaggcggatgaaacttgagatggaagcaaagagaaaacaagaagaagaagagagaaagaaaagggaagatgatgaaaaacgcattcaagctgaagtggaggcacagctggcccgacagaaggaggaggaatcccaacagcaagcagttctggagcaggagcgcagggaccgggagctggccctgaggattgcccagagtgaagccgagctcatcagtgatgaggcccaggccgacctggcgctgcggagaaatgatggaacaagacccaaaatgacaccggaacaaatggccaaagaaatgtcagaatttttgagtagaggtcctgctgtactagccaccaaagcagctgctggtactaagaaatatgatcttagtaaatggaaatatgcagaactacgtgataccatcaatacttcttgtgatattgagctcctggcagcttgcagagaagaatttcataggagactaaaagtgtatcatgcttggaaatctaagaacaagaagagaaatactgaaacagagcaacgtgctccaaagtctgttactgattatgattttgcaccatttttgaacaattcacctcagcaaaacccagcagctcagattcctgccaggcagcgggagattgaaatgaaccgacagcaacgcttcttccgcatcccattcatccgccctgccgaccagtacaaagaccctcagagtaagaaaaaaggctggtggtatgcccattttgatggaccatggattgcccggcaaatggaactccatcctgacaagccacccatcctacttgtggctggtaaggacgacatggagatgtgtgagctgaatcttgaggagactggcctgactcggaagcgtggtgctgagatcttgccaagacagtttgaagaaatctgggaacgctgtggaggcatccagtaccttcagaatgcgattgagagcagacaggctcggcccacctatgcaacagccatgctgcagagtctgttaaagtagatgttgcacaccagccttacagctgggagcctttgccatggtacttaggtagggtgtgtgcccccagatttaaccattccataatcatgttagagttacttctataaagtgaacagattttattaatcacggcttttggtgaatttgtttaaggttaattatggtagcaaattttggacctaaacattatttttctgtatcccgctgtaattcccaaaactctcattattctctaactattacacatgggcatattctgatgtttctcatcctttgccagaagactaccttacatccatcgtaattgttctctaggaaaagagaacttttttcaaaattcaaaatactttttaaggatggcacagtaccatataactggagtaataaaacatgagcttacattcttacaataactaaaccacttaaaatgatcaaggcactaatgttttggtctgaaaagctgtgtactttatagacattttcagacatttttggaaatttccattaaaggtggaaaatctatttttttcctcctttgcagtgtcttagtttgaatgaaacacttcgaagttctagaattctagaaagagccttaatgtatttgatgtattctgtgataagaggtactaatagtatccagcacagatttgcttttctttgctagcacaatgtgtgttgctgtcagaatattctttttatattctgtggaaaaataaaggaaattcagattgtttaaatgcctaaaagttttgagataagttttgtttcaattagaaaaggaaataggttttaggtggcatagtggcttaactggactgaattcaaatattctttcaacttcatctcaatagtgatttttgtatcagaatcttgtccaagttgtttcattgatttagtaagtgttctgcttccaacatctttctttttaagaaattcctagtgtcttttttggcctttgaggttttggtaattgtagacctgtttcataagctttgtaattcagaaatccttgtatttagtaagtgcttgttttacataactgataattttaaaatgttttctttgtgtgctgttagtattgattcaaatgtcagcagctttaagcctaatatttatgactttcacatttggaatttaaagacaaaaatacatcaaggagttatgctgacataattctaaggagttttgttgtattttagaataaaattataaagtaaaatgattctctgtactgctttttcccccagtttttagagaccctaacctttgaaatgaaattccagtgatttcttttttccctagaaagattacctcagttagggaagtatttcccagctgactagtgtttgtgagccacagacactgtcttcagaattgcttctctcatgtcttagtagagaaatatttatttattatgatacattcaaatgattgtcaagttaaattaaatggttgtgtctgtgctattgagaatgcaaatgtgattatcttttgaaggctgtattactgcatagcttcacccaccctcgggtcatttcgtccctgtgattggggacagaaggtgtagctactgaagtaaatgacctattctctctcttcc

SEQ ID NO: 156850 - DNA, 8692 bp, Homo sapiens
  Payload ID: 10745
  Gene Symbol: MYO6
  Gene Name: myosin VI
  ENST ID: ENST00000369981
  CDS Start-End: 280-4167
gtgcacgccgcagtgccggggactcggcggggcgccggccggcgggcggagaccgactcgggatctgtccgagcaggaagccagcctcagcccggccgctgtcgccgccctgtcctggtgcccgtccgcgtcgtcgccctcttcactggccctcatcacttctcaccgcgccctccagcttcacccgtacaggtagccccgccgccgcgcacctgccttcgctcccgcaccggtgacagtggatagtggaaacaggagatcgtggatcctccttcaaaaatggaggatggaaagcccgtttgggcgccacaccctacagatggatttcagatgggcaatattgtggatattggccccgacagcttaacaattgaacccttgaatcagaaaggcaagacatttttggctctcataaaccaagtgtttcctgcagaagaggacagtaaaaaagatgtggaagataactgttcactaatgtatttaaatgaagccacactgctccataatatcaaagttcgatatagtaaagacagaatttatacatatgtcgccaacattctgattgcagtgaatccatactttgacatacctaaaatatattcttcagaagcaataaagtcatatcaaggaaaatctcttgggacaagaccacctcatgtctttgcaattgctgataaagcttttcgagacatgaaggtgctcaagatgagtcagtctatcattgtatctggagaatcaggagccggcaaaacagaaaatacaaaatttgttctaagatacctgactgaatcctatggaacaggtcaagatattgatgacagaattgttgaagctaacccactcctagaagcctttggaaatgcgaagactgttcgcaacaataatagcagtcgatttgggaaatttgtagaaatacattttaatgaaaagagctcagttgttggaggatttgtttcacattatctcctagagaaatctaggatctgtgttcaaggcaaagaggaaagaaattatcatatcttttataggttgtgtgctggtgcttctgaagatattagagaaaaacttcatttgagttcaccagataattttcggtatttaaaccgaggctgcactagatactttgctaacaaagaaactgacaaacagattttacagaaccgcaaaagtcctgagtaccttaaggcaggttctatgaaagatcctctgctagatgaccatggtgattttattagaatgtgcacggctatgaaaaaaattggtttggatgatgaagaaaagcttgatctcttccgggtagtagctggcgtcctgcaccttggaaatattgattttgaggaagctggcagcacttcaggtggttgtaatctgaagaataaatctgctcagtctttggaatattgtgctgaattactgggtttggaccaagatgatcttcgagtaagtttgaccacaagagtcatgctaacaacagcagggggcaccaaaggaacagttataaaggtacctctgaaagtggagcaagcaaacaatgctcgtgatgccctggcaaagacagtgtatagccatctttttgatcatgtggtaaacagagtaaatcagtgttttccttttgaaacatcatcctattttattggagtcctagatattgctggttttgagtactttgagcataacagttttgaacaattttgcatcaactattgcaatgaaaaacttcaacaattttttaatgaaaggattctgaaggaggaacaagaactctatcaaaaagaaggtttaggtgttaatgaagtgcattatgtggataatcaggactgtatagatttaattgaagccaaattagtgggaatactggatattttggatgaagaaaatcgccttccccagccaagtgatcaacactttacatctgcagttcaccaaaagcacaaggatcattttcgactcactattcccagaaaatctaagctggcagttcataggaatatcagagacgacgaaggcttcattatcaggcattttgcgggggcagtgtgctatgaaacaacccagtttgtggagaaaaataatgatgctttacatatgtctcttgaatccttaatatgtgaatccagagataagtttatacgggaattatttgaatcatccacaaataacaacaaagatactaaacaaaaagcaggaaaacttagcttcatcagcgtgggaaacaagtttaagacacagttaaatttgcttctggataaacttcgaagtactggagcaagctttattcgttgcatcaaacctaacttaaagatgacaagccaccactttgaaggtgctcaaattctgtctcagcttcagtgttcagggatggtgtctgttttggacttgatgcagggtggttacccatcacgagcttcatttcatgaactctacaacatgtacaaaaagtatatgccagataaacttgcaagattggatccaagactattttgtaaggctttgtttaaagctttgggcttaaatgaaaatgactacaagtttgggttaaccaaagtattttttagacctggcaagtttgcagaatttgatcagatcatgaagtctgaccctgaccacttagcagagttggttaaaagagtcaatcactggctcacatgcagtcgctggaagaaagttcagtggtgctcactctcagtcatcaaattgaaaaacaaaataaaatatcgagctgaagcctgcattaaaatgcaaaaaactattcgaatgtggctttgcaagaggagacacaaacctcgcattgatggtctggttaaggtgggcacactgaaaaaacgacttgataaatttaatgaggtagtcagtgtgttgaaagatggaaaacccgagatgaataaacagatcaagaatctggaaatttctattgatactttgatggccaaaattaagtccactatgatgacgcaggaacaaatccagaaagaatatgatgcactggttaaaagctcagaggaactcctcagtgcattacagaaaaaaaaacagcaggaagaggaagcagaaaggctgaggcgtattcaagaagaaatggaaaaggaaagaaaaagacgtgaagaagacgaaaaacgtcgaagaaaggaagaggaggaaaggcggatgaaacttgagatggaagcaaagagaaaacaagaagaagaagagagaaagaaaagggaagatgatgaaaaacgcattcaagctgaagtggaggcacagctggcccgacagaaggaggaggaatcccaacagcaagcagttctggagcaggagcgcagggaccgggagctggccctgaggattgcccagagtgaagccgagctcatcagtgatgaggcccaggccgacctggcgctgcggaggtacttggattcctatccggtaacttctaaaaatgatggaacaagacccaaaatgacaccggaacaaatggccaaagaaatgtcagaatttttgagtagaggtcctgctgtactagccaccaaagcagctgctggtactaagaaatatgatcttagtaaatggaaatatgcagaactacgtgataccatcaatacttcttgtgatattgagctcctggcagcttgcagagaagaatttcataggagactaaaagtgtatcatgcttggaaatctaagaacaagaagagaaatactgaaacagagcaacgtgctccaaagtctgttactgattatgattttgcaccatttttgaacaattcacctcagcaaaacccagcagctcagattcctgccaggcagcgggagattgaaatgaaccgacagcaacgcttcttccgcatcccattcatccgccctgccgaccagtacaaagaccctcagagtaagaaaaaaggctggtggtatgcccattttgatggaccatggattgcccggcaaatggaactccatcctgacaagccacccatcctacttgtggctggtaaggacgacatggagatgtgtgagctgaatcttgaggagactggcctgactcggaagcgtggtgctgagatcttgccaagacagtttgaagaaatctgggaacgctgtggaggcatccagtaccttcagaatgcgattgagagcagacaggctcggcccacctatgcaacagccatgctgcagagtctgttaaagtagatgttgcacaccagccttacagctgggagcctttgccatggtacttaggtagggtgtgtgcccccagatttaaccattccataatcatgttagagttacttctataaagtgaacagattttattaatcacggcttttggtgaatttgtttaaggttaattatggtagcaaattttggacctaaacattatttttctgtatcccgctgtaattcccaaaactctcattattctctaactattacacatgggcatattctgatgtttctcatcctttgccagaagactaccttacatccatcgtaattgttctctaggaaaagagaacttttttcaaaattcaaaatactttttaaggatggcacagtaccatataactggagtaataaaacatgagcttacattcttacaataactaaaccacttaaaatgatcaaggcactaatgttttggtctgaaaagctgtgtactttatagacattttcagacatttttggaaatttccattaaaggtggaaaatctatttttttcctcctttgcagtgtcttagtttgaatgaaacacttcgaagttctagaattctagaaagagccttaatgtatttgatgtattctgtgataagaggtactaatagtatccagcacagatttgcttttctttgctagcacaatgtgtgttgctgtcagaatattctttttatattctgtggaaaaataaaggaaattcagattgtttaaatgcctaaaagttttgagataagttttgtttcaattagaaaaggaaataggttttaggtggcatagtggcttaactggactgaattcaaatattctttcaacttcatctcaatagtgatttttgtatcagaatcttgtccaagttgtttcattgatttagtaagtgttctgcttccaacatctttctttttaagaaattcctagtgtcttttttggcctttgaggttttggtaattgtagacctgtttcataagctttgtaattcagaaatccttgtatttagtaagtgcttgttttacataactgataattttaaaatgttttctttgtgtgctgttagtattgattcaaatgtcagcagctttaagcctaatatttatgactttcacatttggaatttaaagacaaaaatacatcaaggagttatgctgacataattctaaggagttttgttgtattttagaataaaattataaagtaaaatgattctctgtactgctttttcccccagtttttagagaccctaacctttgaaatgaaattccagtgatttcttttttccctagaaagattacctcagttagggaagtatttcccagctgactagtgtttgtgagccacagacactgtcttcagaattgcttctctcatgtcttagtagagaaatatttatttattatgatacattcaaatgattgtcaagttaaattaaatggttgtgtctgtgctattgagaatgcaaatgtgattatcttttgaaggctgtattactgcatagcttcacccaccctcgggtcatttcgtccctgtgattggggacagaaggtgtagctactgaagtaaatgacctattctctctcttccatctctcgcctttaactggtgtttttatttgtgtaggatagtgaatgataagcttttttcctaaccagtagtgagtaaagttcttgaacaaaatttagtagccaaattgttttttaatgacatgtctctttagtacaatagttttgtgtatcttttagatacattaataggcactagatggaaaattaaagagttaaacatatttaaatgagagaatctaatgtttcagaaatttgtaagaaatgtatcacagcaaagggttgttataagtccttagtttttgactctaatagttaatacaattatagttaatcttaagccataatgtttctaatcatgtcacacagctgtcctagaacttatctatttaaaatagtttcctgagttaattttggccagcagggcaactgccctaattcagatagatttacagtaacctacgtacagtagatgcacatacacacagacacccctttgctggagaaacttaggaccctgtcagccttttaaaggaaacagcaggagtggtgtcctaaatgatgttcatgcagctgctttaccatgttcacagtcaagcccatgcatgccaggttaaaactgtggaaatcaaaagtaaattcactcatattttaatcattttaactgagatttaaaattagaagtttaaaccactatatataaagaactaatcttttcttaataccagttctttccatagcatatgctttgcaaaggcagcatgcataaaatatttaaaatgagaggacagaatgttttcacatttgattcaattttaatataattcctaattgtggtaacacagttgagatatgtattatgagttatgggaactaattgagaaaaggaagttactctaatccacgtatgttaagagaatattgagttttcttagttgtaaagttggggagatggcaccttctcagaggattgtgaaaatatgaggaagaaacaaaacagtgcatgtaggagcacagggccacacaaaggcattctattgttatgctcattctgcttctgtaatgacttttcataggtcattcttgtgaaccattttgttttgcaagcaaccaaggaaagaacatcttaagtggaaaatcagtggtggttgtgaacacttagagaatagcaatccacaggcaagaataatggtattgtttgtagagctttattaattggatattttttaaaagacattttcattcacaggtcattactatggttctcagcgatccaaatatgtagatcattggtttttttttttacctgaagtagcttaagagtacttggatcagtagaataaatatttattgaatcaatcagtcagccaattaatatgatgttagtgatagacctgcctccttttatggaagaggtaacagatccagagaggtcaagtaatttagttgtagactgaaaaatatatcaaagcctttgctgcaatcatatgtaacaaaaagaaccaaaacaaacactttttagtggcacctgtggatttacaaagggttgcctctctgtcattccacaacttcagaaggtgtgacaggttttccctatttatcattaccaataataacaagtattgagagttttaaaatttctcccagaagataaactaacaaggatggaaggggagggcaaaggatatctaaacatgagaataaggacatgttagagggggggaaacagttgtaacaataaggaaagagaagagcaacagtggaagagacaggttgtgtgcccctaaagattctgcacccccagtttggaaacactgatacattttaggacacagagcactcctagatctctacgaaattttagaatgaataatgtgtaatttataggatcagaacgtatggttattaaaacttggatcaagatatgcccggtgtatacattcttagcacataggaatggcactgccatactggagaaggtcagcagtaaataggcattctgtacataagcctcatggaagggtaagatggagagactggcagaagtagcacctactctgctgggagcacttctctgagtacgctttagttcaattcaaatcactgtattctttccccattgctaacctaatatatgaaacaagcttagctgtctcagaagtttttcaagagatgatcaggaaaaattaatgcacattcaaaaggagaatcttcagtacaaatttgtttttttaaaaatagatttagggctgggcgcggtggctcacgcctgtaatcccagcactttgggaggccgaggcgggtggatcacgaggtcaagacttcgagaccagcctggccaacatggtgaaaccctgtctctactaaaaatacaaaacattagccaggcgtggtagtgggtgcctgtaatccctgctacttgggaggctgaggcaggagaatcacttgaacgcgggaggcagaggttgcagggagccgagatggcgccattgcactccatcctgggcaacaagagcgaaattccatctcaaaaaataaaatagatttagggggtacaagtgcagttttgttacatgggtatattgcatagtggtaaaatgtgggcttttagtgtacctaacacccagagaagcatacattgtgcccagtaggtaatttttcatccctaaaccttttctcagcctcccactttctggagtctccaatgtcggttattccactctttatgtccatatctacacattcaatcctaatttgtaccaagtagcatctcacctttaaatcacaggcttattagttgggtgttttctttttacttatgaaaattcatctagtcaaactgtcaattaatttttcctcatttcattaaaagtgtatatctaatgctttctctaaaaattgatgtactggaaatacaaataaataaatgctccctgtgtagaatttc

SEQ ID NO: 156851 - DNA, 8575 bp, Homo sapiens
  Payload ID: 10745
  Gene Symbol: MYO6
  Gene Name: myosin VI
  Uniprot ID: Q9UM54
  ENST ID: ENST00000369985
  CDS Start-End: 263-4051
ggggactcggcggggcgccggccggcgggcggagaccgactcgggatctgtccgagcaggaagccagcctcagcccggccgctgtcgccgccctgtcctggtgcccgtccgcgtcgtcgccctcttcactggccctcatcacttctcaccgcgccctccagcttcacccgtacaggtagccccgccgccgcgcacctgccttcgctcccgcaccggtgacagtggatagtggaaacaggagatcgtggatcctccttcaaaaatggaggatggaaagcccgtttgggcgccacaccctacagatggatttcagatgggcaatattgtggatattggccccgacagcttaacaattgaacccttgaatcagaaaggcaagacatttttggctctcataaaccaagtgtttcctgcagaagaggacagtaaaaaagatgtggaagataactgttcactaatgtatttaaatgaagccacactgctccataatatcaaagttcgatatagtaaagacagaatttatacatatgtcgccaacattctgattgcagtgaatccatactttgacatacctaaaatatattcttcagaagcaataaagtcatatcaaggaaaatctcttgggacaagaccacctcatgtctttgcaattgctgataaagcttttcgagacatgaaggtgctcaagatgagtcagtctatcattgtatctggagaatcaggagccggcaaaacagaaaatacaaaatttgttctaagatacctgactgaatcctatggaacaggtcaagatattgatgacagaattgttgaagctaacccactcctagaagcctttggaaatgcgaagactgttcgcaacaataatagcagtcgatttgggaaatttgtagaaatacattttaatgaaaagagctcagttgttggaggatttgtttcacattatctcctagagaaatctaggatctgtgttcaaggcaaagaggaaagaaattatcatatcttttataggttgtgtgctggtgcttctgaagatattagagaaaaacttcatttgagttcaccagataattttcggtatttaaaccgaggctgcactagatactttgctaacaaagaaactgacaaacagattttacagaaccgcaaaagtcctgagtaccttaaggcaggttctatgaaagatcctctgctagatgaccatggtgattttattagaatgtgcacggctatgaaaaaaattggtttggatgatgaagaaaagcttgatctcttccgggtagtagctggcgtcctgcaccttggaaatattgattttgaggaagctggcagcacttcaggtggttgtaatctgaagaataaatctgctcagtctttggaatattgtgctgaattactgggtttggaccaagatgatcttcgagtaagtttgaccacaagagtcatgctaacaacagcagggggcaccaaaggaacagttataaaggtacctctgaaagtggagcaagcaaacaatgctcgtgatgccctggcaaagacagtgtatagccatctttttgatcatgtggtaaacagagtaaatcagtgttttccttttgaaacatcatcctattttattggagtcctagatattgctggttttgagtactttgagcataacagttttgaacaattttgcatcaactattgcaatgaaaaacttcaacaattttttaatgaaaggattctgaaggaggaacaagaactctatcaaaaagaaggtttaggtgttaatgaagtgcattatgtggataatcaggactgtatagatttaattgaagccaaattagtgggaatactggatattttggatgaagaaaatcgccttccccagccaagtgatcaacactttacatctgcagttcaccaaaagcacaaggatcattttcgactcactattcccagaaaatctaagctggcagttcataggaatatcagagacgacgaaggcttcattatcaggcattttgcgggggcagtgtgctatgaaacaacccagtttgtggagaaaaataatgatgctttacatatgtctcttgaatccttaatatgtgaatccagagataagtttatacgggaattatttgaatcatccacaaataacaacaaagatactaaacaaaaagcaggaaaacttagcttcatcagcgtgggaaacaagtttaagacacagttaaatttgcttctggataaacttcgaagtactggagcaagctttattcgttgcatcaaacctaacttaaagatgacaagccaccactttgaaggtgctcaaattctgtctcagcttcagtgttcagggatggtgtctgttttggacttgatgcagggtggttacccatcacgagcttcatttcatgaactctacaacatgtacaaaaagtatatgccagataaacttgcaagattggatccaagactattttgtaaggctttgtttaaagctttgggcttaaatgaaaatgactacaagtttgggttaaccaaagtattttttagacctggcaagtttgcagaatttgatcagatcatgaagtctgaccctgaccacttagcagagttggttaaaagagtcaatcactggctcacatgcagtcgctggaagaaagttcagtggtgctcactctcagtcatcaaattgaaaaacaaaataaaatatcgagctgaagcctgcattaaaatgcaaaaaactattcgaatgtggctttgcaagaggagacacaaacctcgcattgatggtctggttaaggtgggcacactgaaaaaacgacttgataaatttaatgaggtagtcagtgtgttgaaagatggaaaacccgagatgaataaacagatcaagaatctggaaatttctattgatactttgatggccaaaattaagtccactatgatgacgcaggaacaaatccagaaagaatatgatgcactggttaaaagctcagaggaactcctcagtgcattacagaaaaaaaaacagcaggaagaggaagcagaaaggctgaggcgtattcaagaagaaatggaaaaggaaagaaaaagacgtgaagaagacgaaaaacgtcgaagaaaggaagaggaggaaaggcggatgaaacttgagatggaagcaaagagaaaacaagaagaagaagagagaaagaaaagggaagatgatgaaaaacgcattcaagctgaagtggaggcacagctggcccgacagaaggaggaggaatcccaacagcaagcagttctggagcaggagcgcagggaccgggagctggccctgaggattgcccagagtgaagccgagctcatcagtgatgaggcccaggccgacctggcgctgcggagaggtcctgctgtactagccaccaaagcagctgctggtactaagaaatatgatcttagtaaatggaaatatgcagaactacgtgataccatcaatacttcttgtgatattgagctcctggcagcttgcagagaagaatttcataggagactaaaagtgtatcatgcttggaaatctaagaacaagaagagaaatactgaaacagagcaacgtgctccaaagtctgttactgattatgattttgcaccatttttgaacaattcacctcagcaaaacccagcagctcagattcctgccaggcagcgggagattgaaatgaaccgacagcaacgcttcttccgcatcccattcatccgccctgccgaccagtacaaagaccctcagagtaagaaaaaaggctggtggtatgcccattttgatggaccatggattgcccggcaaatggaactccatcctgacaagccacccatcctacttgtggctggtaaggacgacatggagatgtgtgagctgaatcttgaggagactggcctgactcggaagcgtggtgctgagatcttgccaagacagtttgaagaaatctgggaacgctgtggaggcatccagtaccttcagaatgcgattgagagcagacaggctcggcccacctatgcaacagccatgctgcagagtctgttaaagtagatgttgcacaccagccttacagctgggagcctttgccatggtacttaggtagggtgtgtgcccccagatttaaccattccataatcatgttagagttacttctataaagtgaacagattttattaatcacggcttttggtgaatttgtttaaggttaattatggtagcaaattttggacctaaacattatttttctgtatcccgctgtaattcccaaaactctcattattctctaactattacacatgggcatattctgatgtttctcatcctttgccagaagactaccttacatccatcgtaattgttctctaggaaaagagaacttttttcaaaattcaaaatactttttaaggatggcacagtaccatataactggagtaataaaacatgagcttacattcttacaataactaaaccacttaaaatgatcaaggcactaatgttttggtctgaaaagctgtgtactttatagacattttcagacatttttggaaatttccattaaaggtggaaaatctatttttttcctcctttgcagtgtcttagtttgaatgaaacacttcgaagttctagaattctagaaagagccttaatgtatttgatgtattctgtgataagaggtactaatagtatccagcacagatttgcttttctttgctagcacaatgtgtgttgctgtcagaatattctttttatattctgtggaaaaataaaggaaattcagattgtttaaatgcctaaaagttttgagataagttttgtttcaattagaaaaggaaataggttttaggtggcatagtggcttaactggactgaattcaaatattctttcaacttcatctcaatagtgatttttgtatcagaatcttgtccaagttgtttcattgatttagtaagtgttctgcttccaacatctttctttttaagaaattcctagtgtcttttttggcctttgaggttttggtaattgtagacctgtttcataagctttgtaattcagaaatccttgtatttagtaagtgcttgttttacataactgataattttaaaatgttttctttgtgtgctgttagtattgattcaaatgtcagcagctttaagcctaatatttatgactttcacatttggaatttaaagacaaaaatacatcaaggagttatgctgacataattctaaggagttttgttgtattttagaataaaattataaagtaaaatgattctctgtactgctttttcccccagtttttagagaccctaacctttgaaatgaaattccagtgatttcttttttccctagaaagattacctcagttagggaagtatttcccagctgactagtgtttgtgagccacagacactgtcttcagaattgcttctctcatgtcttagtagagaaatatttatttattatgatacattcaaatgattgtcaagttaaattaaatggttgtgtctgtgctattgagaatgcaaatgtgattatcttttgaaggctgtattactgcatagcttcacccaccctcgggtcatttcgtccctgtgattggggacagaaggtgtagctactgaagtaaatgacctattctctctcttccatctctcgcctttaactggtgtttttatttgtgtaggatagtgaatgataagcttttttcctaaccagtagtgagtaaagttcttgaacaaaatttagtagccaaattgttttttaatgacatgtctctttagtacaatagttttgtgtatcttttagatacattaataggcactagatggaaaattaaagagttaaacatatttaaatgagagaatctaatgtttcagaaatttgtaagaaatgtatcacagcaaagggttgttataagtccttagtttttgactctaatagttaatacaattatagttaatcttaagccataatgtttctaatcatgtcacacagctgtcctagaacttatctatttaaaatagtttcctgagttaattttggccagcagggcaactgccctaattcagatagatttacagtaacctacgtacagtagatgcacatacacacagacacccctttgctggagaaacttaggaccctgtcagccttttaaaggaaacagcaggagtggtgtcctaaatgatgttcatgcagctgctttaccatgttcacagtcaagcccatgcatgccaggttaaaactgtggaaatcaaaagtaaattcactcatattttaatcattttaactgagatttaaaattagaagtttaaaccactatatataaagaactaatcttttcttaataccagttctttccatagcatatgctttgcaaaggcagcatgcataaaatatttaaaatgagaggacagaatgttttcacatttgattcaattttaatataattcctaattgtggtaacacagttgagatatgtattatgagttatgggaactaattgagaaaaggaagttactctaatccacgtatgttaagagaatattgagttttcttagttgtaaagttggggagatggcaccttctcagaggattgtgaaaatatgaggaagaaacaaaacagtgcatgtaggagcacagggccacacaaaggcattctattgttatgctcattctgcttctgtaatgacttttcataggtcattcttgtgaaccattttgttttgcaagcaaccaaggaaagaacatcttaagtggaaaatcagtggtggttgtgaacacttagagaatagcaatccacaggcaagaataatggtattgtttgtagagctttattaattggatattttttaaaagacattttcattcacaggtcattactatggttctcagcgatccaaatatgtagatcattggtttttttttttacctgaagtagcttaagagtacttggatcagtagaataaatatttattgaatcaatcagtcagccaattaatatgatgttagtgatagacctgcctccttttatggaagaggtaacagatccagagaggtcaagtaatttagttgtagactgaaaaatatatcaaagcctttgctgcaatcatatgtaacaaaaagaaccaaaacaaacactttttagtggcacctgtggatttacaaagggttgcctctctgtcattccacaacttcagaaggtgtgacaggttttccctatttatcattaccaataataacaagtattgagagttttaaaatttctcccagaagataaactaacaaggatggaaggggagggcaaaggatatctaaacatgagaataaggacatgttagagggggggaaacagttgtaacaataaggaaagagaagagcaacagtggaagagacaggttgtgtgcccctaaagattctgcacccccagtttggaaacactgatacattttaggacacagagcactcctagatctctacgaaattttagaatgaataatgtgtaatttataggatcagaacgtatggttattaaaacttggatcaagatatgcccggtgtatacattcttagcacataggaatggcactgccatactggagaaggtcagcagtaaataggcattctgtacataagcctcatggaagggtaagatggagagactggcagaagtagcacctactctgctgggagcacttctctgagtacgctttagttcaattcaaatcactgtattctttccccattgctaacctaatatatgaaacaagcttagctgtctcagaagtttttcaagagatgatcaggaaaaattaatgcacattcaaaaggagaatcttcagtacaaatttgtttttttaaaaatagatttagggctgggcgcggtggctcacgcctgtaatcccagcactttgggaggccgaggcgggtggatcacgaggtcaagacttcgagaccagcctggccaacatggtgaaaccctgtctctactaaaaatacaaaacattagccaggcgtggtagtgggtgcctgtaatccctgctacttgggaggctgaggcaggagaatcacttgaacgcgggaggcagaggttgcagggagccgagatggcgccattgcactccatcctgggcaacaagagcgaaattccatctcaaaaaataaaatagatttagggggtacaagtgcagttttgttacatgggtatattgcatagtggtaaaatgtgggcttttagtgtacctaacacccagagaagcatacattgtgcccagtaggtaatttttcatccctaaaccttttctcagcctcccactttctggagtctccaatgtcggttattccactctttatgtccatatctacacattcaatcctaatttgtaccaagtagcatctcacctttaaatcacaggcttattagttgggtgttttctttttacttatgaaaattcatctagtcaaactgtcaattaatttttcctcatttcattaaaagtgtatatctaatgctttctctaaaaattgatgtactggaaatacaaataaataaatgctccctgtgtagaattt

SEQ ID NO: 156852 - DNA, 522 bp, Homo sapiens
  Payload ID: 10745
  Gene Symbol: MYO6
  Gene Name: myosin VI
  ENST ID: ENST00000430435
  CDS Start-End: 1-522
aaaagacgtgaagaagacgaaaaacgtcgaagaaaggaagaggaggaaaggcggatgaaacttgagatggaagcaaagagaaaacaagaagaagaagagagaaagaaaagggaagatgatgaaaaacgcattcaagctgaagtggaggcacagctggcccgacagaaggaggaggaatcccaacagcaagcagttctggagcaggagcgcagggaccgggagctggccctgaggattgcccagagtgaagccgagctcatcagtgatgaggcccaggccgacctggcgctgcggagcttggattcctatccggtaacttctaaaaatgatggaacaagacccaaaatgacaccaggtcctgctgtactagccaccaaagcagctgctggtactaagaaatatgatcttagtaaatggaaatatgcagaactacgtgataccatcaatacttcttgtgatattgagctcctggcagcttgcagagaagaatttcataggagactaaaagtgtatcatgcttgg

SEQ ID NO: 156853 - DNA, 4026 bp, Homo sapiens
  Payload ID: 10745
  Gene Symbol: MYO6
  Gene Name: myosin VI
  Uniprot ID: Q9UM54
  ENST ID: ENST00000615563
  CDS Start-End: 33-3821
ggaaacaggagatcgtggatcctccttcaaaaatggaggatggaaagcccgtttgggcgccacaccctacagatggatttcagatgggcaatattgtggatattggccccgacagcttaacaattgaacccttgaatcagaaaggcaagacatttttggctctcataaaccaagtgtttcctgcagaagaggacagtaaaaaagatgtggaagataactgttcactaatgtatttaaatgaagccacactgctccataatatcaaagttcgatatagtaaagacagaatttatacatatgtcgccaacattctgattgcagtgaatccatactttgacatacctaaaatatattcttcagaagcaataaagtcatatcaaggaaaatctcttgggacaagaccacctcatgtctttgcaattgctgataaagcttttcgagacatgaaggtgctcaagatgagtcagtctatcattgtatctggagaatcaggagccggcaaaacagaaaatacaaaatttgttctaagatacctgactgaatcctatggaacaggtcaagatattgatgacagaattgttgaagctaacccactcctagaagcctttggaaatgcgaagactgttcgcaacaataatagcagtcgatttgggaaatttgtagaaatacattttaatgaaaagagctcagttgttggaggatttgtttcacattatctcctagagaaatctaggatctgtgttcaaggcaaagaggaaagaaattatcatatcttttataggttgtgtgctggtgcttctgaagatattagagaaaaacttcatttgagttcaccagataattttcggtatttaaaccgaggctgcactagatactttgctaacaaagaaactgacaaacagattttacagaaccgcaaaagtcctgagtaccttaaggcaggttctatgaaagatcctctgctagatgaccatggtgattttattagaatgtgcacggctatgaaaaaaattggtttggatgatgaagaaaagcttgatctcttccgggtagtagctggcgtcctgcaccttggaaatattgattttgaggaagctggcagcacttcaggtggttgtaatctgaagaataaatctgctcagtctttggaatattgtgctgaattactgggtttggaccaagatgatcttcgagtaagtttgaccacaagagtcatgctaacaacagcagggggcaccaaaggaacagttataaaggtacctctgaaagtggagcaagcaaacaatgctcgtgatgccctggcaaagacagtgtatagccatctttttgatcatgtggtaaacagagtaaatcagtgttttccttttgaaacatcatcctattttattggagtcctagatattgctggttttgagtactttgagcataacagttttgaacaattttgcatcaactattgcaatgaaaaacttcaacaattttttaatgaaaggattctgaaggaggaacaagaactctatcaaaaagaaggtttaggtgttaatgaagtgcattatgtggataatcaggactgtatagatttaattgaagccaaattagtgggaatactggatattttggatgaagaaaatcgccttccccagccaagtgatcaacactttacatctgcagttcaccaaaagcacaaggatcattttcgactcactattcccagaaaatctaagctggcagttcataggaatatcagagacgacgaaggcttcattatcaggcattttgcgggggcagtgtgctatgaaacaacccagtttgtggagaaaaataatgatgctttacatatgtctcttgaatccttaatatgtgaatccagagataagtttatacgggaattatttgaatcatccacaaataacaacaaagatactaaacaaaaagcaggaaaacttagcttcatcagcgtgggaaacaagtttaagacacagttaaatttgcttctggataaacttcgaagtactggagcaagctttattcgttgcatcaaacctaacttaaagatgacaagccaccactttgaaggtgctcaaattctgtctcagcttcagtgttcagggatggtgtctgttttggacttgatgcagggtggttacccatcacgagcttcatttcatgaactctacaacatgtacaaaaagtatatgccagataaacttgcaagattggatccaagactattttgtaaggctttgtttaaagctttgggcttaaatgaaaatgactacaagtttgggttaaccaaagtattttttagacctggcaagtttgcagaatttgatcagatcatgaagtctgaccctgaccacttagcagagttggttaaaagagtcaatcactggctcacatgcagtcgctggaagaaagttcagtggtgctcactctcagtcatcaaattgaaaaacaaaataaaatatcgagctgaagcctgcattaaaatgcaaaaaactattcgaatgtggctttgcaagaggagacacaaacctcgcattgatggtctggttaaggtgggcacactgaaaaaacgacttgataaatttaatgaggtagtcagtgtgttgaaagatggaaaacccgagatgaataaacagatcaagaatctggaaatttctattgatactttgatggccaaaattaagtccactatgatgacgcaggaacaaatccagaaagaatatgatgcactggttaaaagctcagaggaactcctcagtgcattacagaaaaaaaaacagcaggaagaggaagcagaaaggctgaggcgtattcaagaagaaatggaaaaggaaagaaaaagacgtgaagaagacgaaaaacgtcgaagaaaggaagaggaggaaaggcggatgaaacttgagatggaagcaaagagaaaacaagaagaagaagagagaaagaaaagggaagatgatgaaaaacgcattcaagctgaagtggaggcacagctggcccgacagaaggaggaggaatcccaacagcaagcagttctggagcaggagcgcagggaccgggagctggccctgaggattgcccagagtgaagccgagctcatcagtgatgaggcccaggccgacctggcgctgcggagaggtcctgctgtactagccaccaaagcagctgctggtactaagaaatatgatcttagtaaatggaaatatgcagaactacgtgataccatcaatacttcttgtgatattgagctcctggcagcttgcagagaagaatttcataggagactaaaagtgtatcatgcttggaaatctaagaacaagaagagaaatactgaaacagagcaacgtgctccaaagtctgttactgattatgattttgcaccatttttgaacaattcacctcagcaaaacccagcagctcagattcctgccaggcagcgggagattgaaatgaaccgacagcaacgcttcttccgcatcccattcatccgccctgccgaccagtacaaagaccctcagagtaagaaaaaaggctggtggtatgcccattttgatggaccatggattgcccggcaaatggaactccatcctgacaagccacccatcctacttgtggctggtaaggacgacatggagatgtgtgagctgaatcttgaggagactggcctgactcggaagcgtggtgctgagatcttgccaagacagtttgaagaaatctgggaacgctgtggaggcatccagtaccttcagaatgcgattgagagcagacaggctcggcccacctatgcaacagccatgctgcagagtctgttaaagtagatgttgcacaccagccttacagctgggagcctttgccatggtacttaggtagggtgtgtgcccccagatttaaccattccataatcatgttagagttacttctataaagtgaacagattttattaatcacggcttttggtgaatttgtttaaggttaattatggtagcaaattttggacctaaacattatttttctgtatcccgc

SEQ ID NO: 156854 - DNA, 4074 bp, Homo sapiens
  Payload ID: 10745
  Gene Symbol: MYO6
  Gene Name: myosin VI
  ENST ID: ENST00000627432
  CDS Start-End: 25-3909
gagatcgtggatcctccttcaaaaatggaggatggaaagcccgtttgggcgccacaccctacagatggatttcagatgggcaatattgtggatattggccccgacagcttaacaattgaacccttgaatcagaaaggcaagacatttttggctctcataaaccaagtgtttcctgcagaagaggacagtaaaaaagatgtggaagataactgttcactaatgtatttaaatgaagccacactgctccataatatcaaagttcgatatagtaaagacagaatttatacatatgtcgccaacattctgattgcagtgaatccatactttgacatacctaaaatatattcttcagaagcaataaagtcatatcaaggaaaatctcttgggacaagaccacctcatgtctttgcaattgctgataaagcttttcgagacatgaaggtgctcaagatgagtcagtctatcattgtatctggagaatcaggagccggcaaaacagaaaatacaaaatttgttctaagatacctgactgaatcctatggaacaggtcaagatattgatgacagaattgttgaagctaacccactcctagaagcctttggaaatgcgaagactgttcgcaacaataatagcagtcgatttgggaaatttgtagaaatacattttaatgaaaagagctcagttgttggaggatttgtttcacattatctcctagagaaatctaggatctgtgttcaaggcaaagaggaaagaaattatcatatcttttataggttgtgtgctggtgcttctgaagatattagagaaaaacttcatttgagttcaccagataattttcggtatttaaaccgaggctgcactagatactttgctaacaaagaaactgacaaacagattttacagaaccgcaaaagtcctgagtaccttaaggcaggttctatgaaagatcctctgctagatgaccatggtgattttattagaatgtgcacggctatgaaaaaaattggtttggatgatgaagaaaagcttgatctcttccgggtagtagctggcgtcctgcaccttggaaatattgattttgaggaagctggcagcacttcaggtggttgtaatctgaagaataaatctgctcagtctttggaatattgtgctgaattactgggtttggaccaagatgatcttcgagtaagtttgaccacaagagtcatgctaacaacagcagggggcaccaaaggaacagttataaaggtacctctgaaagtggagcaagcaaacaatgctcgtgatgccctggcaaagacagtgtatagccatctttttgatcatgtggtaaacagagtaaatcagtgttttccttttgaaacatcatcctattttattggagtcctagatattgctggttttgagtactttgagcataacagttttgaacaattttgcatcaactattgcaatgaaaaacttcaacaattttttaatgaaaggattctgaaggaggaacaagaactctatcaaaaagaaggtttaggtgttaatgaagtgcattatgtggataatcaggactgtatagatttaattgaagccaaattagtgggaatactggatattttggatgaagaaaatcgccttccccagccaagtgatcaacactttacatctgcagttcaccaaaagcacaaggatcattttcgactcactattcccagaaaatctaagctggcagttcataggaatatcagagacgacgaaggcttcattatcaggcattttgcgggggcagtgtgctatgaaacaacccagtttgtggagaaaaataatgatgctttacatatgtctcttgaatccttaatatgtgaatccagagataagtttatacgggaattatttgaatcatccacaaataacaacaaagatactaaacaaaaagcaggaaaacttagcttcatcagcgtgggaaacaagtttaagacacagttaaatttgcttctggataaacttcgaagtactggagcaagctttattcgttgcatcaaacctaacttaaagatgacaagccaccactttgaaggtgctcaaattctgtctcagcttcagtgttcagggatggtgtctgttttggacttgatgcagggtggttacccatcacgagcttcatttcatgaactctacaacatgtacaaaaagtatatgccagataaacttgcaagattggatccaagactattttgtaaggctttgtttaaagctttgggcttaaatgaaaatgactacaagtttgggttaaccaaagtattttttagacctggcaagtttgcagaatttgatcagatcatgaagtctgaccctgaccacttagcagagttggttaaaagagtcaatcactggctcacatgcagtcgctggaagaaagttcagtggtgctcactctcagtcatcaaattgaaaaacaaaataaaatatcgagctgaagcctgcattaaaatgcaaaaaactattcgaatgtggctttgcaagaggagacacaaacctcgcattgatggtctggttaaggtgggcacactgaaaaaacgacttgataaatttaatgaggtagtcagtgtgttgaaagatggaaaacccgagatgaataaacagatcaagaatctggaaatttctattgatactttgatggccaaaattaagtccactatgatgacgcaggaacaaatccagaaagaatatgatgcactggttaaaagctcagaggaactcctcagtgcattacagaaaaaaaaacagcaggaagaggaagcagaaaggctgaggcgtattcaagaagaaatggaaaaggaaagaaaaagacgtgaagaagacgaaaaacgtcgaagaaaggaagaggaggaaaggcggatgaaacttgagatggaagcaaagagaaaacaagaagaagaagagagaaagaaaagggaagatgatgaaaaacgcattcaagctgaagtggaggcacagctggcccgacagaaggaggaggaatcccaacagcaagcagttctggagcaggagcgcagggaccgggagctggccctgaggattgcccagagtgaagccgagctcatcagtgatgaggcccaggccgacctggcgctgcggagcttggattcctatccggtaacttctaaaaatgatggaacaagacccaaaatgacaccggaacaaatggccaaagaaatgtcagaatttttgagtagaggtcctgctgtactagccaccaaagcagctgctggtactaagaaatatgatcttagtaaatggaaatatgcagaactacgtgataccatcaatacttcttgtgatattgagctcctggcagcttgcagagaagaatttcataggagactaaaagtgtatcatgcttggaaatctaagaacaagaagagaaatactgaaacagagcaacgtgctccaaagtctgttactgattatgattttgcaccatttttgaacaattcacctcagcaaaacccagcagctcagattcctgccaggcagcgggagattgaaatgaaccgacagcaacgcttcttccgcatcccattcatccgccctgccgaccagtacaaagaccctcagagtaagaaaaaaggctggtggtatgcccattttgatggaccatggattgcccggcaaatggaactccatcctgacaagccacccatcctacttgtggctggtaaggacgacatggagatgtgtgagctgaatcttgaggagactggcctgactcggaagcgtggtgctgagatcttgccaagacagtttgaagaaatctgggaacgctgtggaggcatccagtaccttcagaatgcgattgagagcagacaggctcggcccacctatgcaacagccatgctgcagagtctgttaaagtagatgttgcacaccagccttacagctgggagcctttgccatggtacttaggtagggtgtgtgcccccagatttaaccattccataatcatgttagagttacttctataaagtgaacagattttattaatcacggcttttggtgaatttgtttaaggttaattatggt

SEQ ID NO: 156855 - DNA, 7462 bp, Homo sapiens
  Payload ID: 10746
  Gene Symbol: MYO7A
  Gene Name: myosin VIIA
  Uniprot ID: Q13402
  ENST ID: ENST00000409709
  CDS Start-End: 273-6920
gctctgggcaggagagagagggagagacaagagacacacacagagagacggcgaggaagggaaagacccagagggacgcctagaacgagacttggagccagacagaggaagaggggacgtgtgtttgcagactggctgggcccgtgacccagcttcctgagtcctccgtgcaggtggcagctgtaccaggctggcaggtcactgagagtgggcagctgggccccagaactgtgcctggcccagtgggcagcaggagctcctgacttgggaccatggtgattcttcagcagggggaccatgtgtggatggacctgagattggggcaggagttcgacgtgcccatcggggcggtggtgaagctctgcgactctgggcaggtccaggtggtggatgatgaagacaatgaacactggatctctccgcagaacgcaacgcacatcaagcctatgcaccccacgtcggtccacggcgtggaggacatgatccgcctgggggacctcaacgaggcgggcatcttgcgcaacctgcttatccgctaccgggaccacctcatctacacgtatacgggctccatcctggtggctgtgaacccctaccagctgctctccatctactcgccagagcacatccgccagtataccaacaagaagattggggagatgcccccccacatctttgccattgctgacaactgctacttcaacatgaaacgcaacagccgagaccagtgctgcatcatcagtggggaatctggggccgggaagacggagagcacaaagctgatcctgcagttcctggcagccatcagtgggcagcactcgtggattgagcagcaggtcttggaggccacccccattctggaagcatttgggaatgccaagaccatccgcaatgacaactcaagccgtttcggaaagtacatcgacatccacttcaacaagcggggcgccatcgagggcgcgaagattgagcagtacctgctggaaaagtcacgtgtctgtcgccaggccctggatgaaaggaactaccacgtgttctactgcatgctggagggtatgagtgaggatcagaagaagaagctgggcttgggccaggcctctgactacaactacttggccatgggtaactgcataacctgtgagggccgggtggacagccaggagtacgccaacatccgctccgccatgaaggtgctcatgttcactgacaccgagaactgggagatctcgaagctcctggctgccatcctgcacctgggcaacctgcagtatgaggcacgcacatttgaaaacctggatgcctgtgaggttctcttctccccatcgctggccacagctgcatccctgcttgaggtgaaccccccagacctgatgagctgcctgactagccgcaccctcatcacccgcggggagacggtgtccaccccactgagcagggaacaggcactggacgtgcgcgacgccttcgtaaaggggatctacgggcggctgttcgtgtggattgtggacaagatcaacgcagcaatttacaagcctccctcccaggatgtgaagaactctcgcaggtccatcggcctcctggacatctttgggtttgagaactttgctgtgaacagctttgagcagctctgcatcaacttcgccaatgagcacctgcagcagttctttgtgcggcacgtgttcaagctggagcaggaggaatatgacctggagagcattgactggctgcacatcgagttcactgacaaccaggatgccctggacatgattgccaacaagcccatgaacatcatctccctcatcgatgaggagagcaagttccccaagggcacagacaccaccatgttacacaagctgaactcccagcacaagctcaacgccaactacatcccccccaagaacaaccatgagacccagtttggcatcaaccattttgcaggcatcgtctactatgagacccaaggcttcctggagaagaaccgagacaccctgcatggggacattatccagctggtccactcctccaggaacaagttcatcaagcagatcttccaggccgatgtcgccatgggcgccgagaccaggaagcgctcgcccacacttagcagccagttcaagcggtcactggagctgctgatgcgcacgctgggtgcctgccagcccttctttgtgcgatgcatcaagcccaatgagttcaagaagcccatgctgttcgaccggcacctgtgcgtgcgccagctgcggtactcaggaatgatggagaccatccgaatccgccgagctggctaccccatccgctacagcttcgtagagtttgtggagcggtaccgtgtgctgctgccaggtgtgaagccggcctacaagcagggcgacctccgcgggacttgccagcgcatggctgaggctgtgctgggcacccacgatgactggcagataggcaaaaccaagatctttctgaaggaccaccatgacatgctgctggaagtggagcgggacaaagccatcaccgacagagtcatcctccttcagaaagtcatccggggattcaaagacaggtctaactttctgaagctgaagaacgctgccacactgatccagaggcactggcggggtcacaactgtaggaagaactacgggctgatgcgtctgggcttcctgcggctgcaggccctgcaccgctcccggaagctgcaccagcagtaccgcctggcccgccagcgcatcatccagttccaggcccgctgccgcgcctatctggtgcgcaaggccttccgccaccgcctctgggctgtgctcaccgtgcaggcctatgcccggggcatgatcgcccgcaggctgcaccaacgcctcagggctgagtatctgtggcgcctcgaggctgagaaaatgcggctggcggaggaagagaagcttcggaaggagatgagcgccaagaaggccaaggaggaggccgagcgcaagcatcaggagcgcctggcccagctggctcgtgaggacgctgagcgggagctgaaggagaaggaggccgctcggcggaagaaggagctcctggagcagatggaaagggcccgccatgagcctgtcaatcactcagacatggtggacaagatgtttggcttcctggggacttcaggtggcctgccaggccaggagggccaggcacctagtggctttgaggacctggagcgagggcggagggagatggtggaggaggacctggatgcagccctgcccctgcctgacgaggatgaggaggacctctctgagtataaatttgccaagttcgcggccacctacttccaggggacaaccacgcactcctacacccggcggccactcaaacagccactgctctaccatgacgacgagggtgaccagctggcagccctggcggtctggatcaccatcctccgcttcatgggggacctccctgagcccaagtaccacacagccatgagtgatggcagtgagaagatccctgtgatgaccaagatttatgagaccctgggcaagaagacgtacaagagggagctgcaggccctgcagggcgagggcgaggcccagctccccgagggccagaagaagagcagtgtgaggcacaagctggtgcatttgactctgaaaaagaagtccaagctcacagaggaggtgaccaagaggctgcatgacggggagtccacagtgcagggcaacagcatgctggaggaccggcccacctccaacctggagaagctgcacttcatcatcggcaatggcatcctgcggccagcactccgggacgagatctactgccagatcagcaagcagctgacccacaacccctccaagagcagctatgcccggggctggattctcgtgtctctctgcgtgggctgtttcgccccctccgagaagtttgtcaagtacctgcggaacttcatccacgggggcccgcccggctacgccccgtactgtgaggagcgcctgagaaggacctttgtcaatgggacacggacacagccgcccagctggctggagctgcaggccaccaagtccaagaagccaatcatgttgcccgtgacattcatggatgggaccaccaagaccctgctgacggactcggcaaccacggccaaggagctctgcaacgcgctggccgacaagatctctctcaaggaccggttcgggttctccctctacattgccctgtttgacaaggtgtcctccctgggcagcggcagtgaccacgtcatggacgccatctcccagtgcgagcagtacgccaaggagcagggcgcccaggagcgcaacgccccctggaggctcttcttccgcaaagaggtcttcacgccctggcacagcccctccgaggacaacgtggccaccaacctcatctaccagcaggtggtgcgaggagtcaagtttggggagtacaggtgtgagaaggaggacgacctggctgagctggcctcccagcagtactttgtagactatggctctgagatgatcctggagcgcctcctgaacctcgtgcccacctacatccccgaccgcgagatcacgcccctgaagacgctggagaagtgggcccagctggccatcgccgcccacaagaaggggatttatgcccagaggagaactgatgcccagaaggtcaaagaggatgtggtcagttatgcccgcttcaagtggcccttgctcttctccaggttttatgaagcctacaaattctcaggccccagtctccccaagaacgacgtcatcgtggccgtcaactggacgggtgtgtactttgtggatgagcaggagcaggtacttctggagctgtccttcccagagatcatggccgtgtccagcagcagggagtgccgtgtctggctctcactgggctgctctgatcttggctgtgctgcgcctcactcaggctgggcaggactgaccccggcggggccctgttctccgtgttggtcctgcaggggagcgaaaacgacggcccccagcttcacgctggccaccatcaagggggacgaatacaccttcacctccagcaatgctgaggacattcgtgacctggtggtcaccttcctagaggggctccggaagagatctaagtatgttgtggccctgcaggataaccccaaccccgcaggcgaggagtcaggcttcctcagctttgccaagggagacctcatcatcctggaccatgacacgggcgagcaggtcatgaactcgggctgggccaacggcatcaatgagaggaccaagcagcgtggggacttccccaccgacagtgtgtacgtcatgcccactgtcaccatgccaccgcgggagattgtggccctggtcaccatgactcccgatcagaggcaggacgttgtccggctcttgcagctgcgaacggcggagcccgaggtgcgtgccaagccctacacgctggaggagttttcctatgactacttcaggcccccacccaagcacacgctgagccgtgtcatggtgtccaaggcccgaggcaaggaccggctgtggagccacacgcgggaaccgctcaagcaggcgctgctcaagaagctcctgggcagtgaggagctctcgcaggaggcctgcctggccttcattgctgtgctcaagtacatgggcgactacccgtccaagaggacacgctccgtcaacgagctcaccgaccagatctttgagggtcccctgaaagccgagcccctgaaggacgaggcatatgtgcagatcctgaagcagctgaccgacaaccacatcaggtacagcgaggagcggggttgggagctgctctggctgtgcacgggccttttcccacccagcaacatcctcctgccccacgtgcagcgcttcctgcagtcccgaaagcactgcccactcgccatcgactgcctgcaacggctccagaaagccctgagaaacgggtcccggaagtaccctccgcacctggtggaggtggaggccatccagcacaagaccacccagattttccacaaagtctacttccctgatgacactgacgaggccttcgaagtggagtccagcaccaaggccaaggacttctgccagaacatcgccaccaggctgctcctcaagtcctcagagggattcagcctctttgtcaaaattgcagacaaggtcctcagcgttcctgagaatgacttcttctttgactttgttcgacacttgacagactggataaagaaagctcggcccatcaaggacggaattgtgccctcactcacctaccaggtgttcttcatgaagaagctgtggaccaccacggtgccagggaaggatcccatggccgattccatcttccactattaccaggagttgcccaagtatctccgaggctaccacaagtgcacgcgggaggaggtgctgcagctgggggcgctgatctacagggtcaagttcgaggaggacaagtcctacttccccagcatccccaagctgctgcgggagctggtgccccaggaccttatccggcaggtctcacctgatgactggaagcggtccatcgtcgcctacttcaacaagcacgcagggaagtccaaggaggaggccaagctggccttcctgaagctcatcttcaagtggcccacctttggctcagccttcttcgaggtgaagcaaactacggagccaaacttccctgagatcctcctaattgccatcaacaagtatggggtcagcctcatcgatcccaaaacgaaggatatcctcaccactcatcccttcaccaagatctccaactggagcagcggcaacacctacttccacatcaccattgggaacttggtgcgcgggagcaaactgctctgcgagacgtcactgggctacaagatggatgacctcctgacttcctacattagccagatgctcacagccatgagcaaacagcggggctccaggagcggcaagtgaacagtcacggggaggtgctggttccatgcctgctctcgaggcagcagtgggttcaggcccatcagctacccctgcagctggggaagacttatgccatcccggcagcgaggctgggctggccagccaccactgactataccaactgggcctctgatgttcttccagtgaggcatctctctgggatgcagaacttccctccatccacccctctggcacctgggttggtctaatcctagtttgctgtggccttcccggttgtgagagcctgtgatccttagatgtgtctcctgtttcagaccagccccaccatgcaacttcctttgactttctgtgtaccactgggatagaggaatcaagaggacaatctagctctccatactttgaacaaccaaatgtgcattgaatactctgaaaccgaagggactggatctgcaggtgggatgagggagacagaccacttttctatattgcagtgtgaatgctgggcccctgctcaagtctaccctgatcacctcagggcataaagcatgtttcattctctg

SEQ ID NO: 156856 - DNA, 7106 bp, Homo sapiens
  Payload ID: 10746
  Gene Symbol: MYO7A
  Gene Name: myosin VIIA
  Uniprot ID: Q13402
  ENST ID: ENST00000409619
  CDS Start-End: 348-6848
cacagagagacggcgaggaagggaaagacccagagggacgcctagaacgagacttggagccagacagaggaagaggggacgtgtgtttgcagactggctgggcccgtgacccagcttcctgagtcctccgtgcaggtggcagctgtaccaggctggcaggtcactgagagtgggcagctgggccccagaactgtgcctggcccagtgggcagcaggagctcctgacttgggaccatggtgattcttcagcaggagaaaagctgggacttgccccacgttacacagccacactgaggcatgtgtcgtgtcacaaacgagatcttccattcaagggggaccatgtgtggatggacctgagattggggcaggagttcgacgtgcccatcggggcggtggtgaagctctgcgactctgggcaggtccaggtggtggatgatgaagacaatgaacactggatctctccgcagaacgcaacgcacatcaagcctatgcaccccacgtcggtccacggcgtggaggacatgatccgcctgggggacctcaacgaggcgggcatcttgcgcaacctgcttatccgctaccgggaccacctcatctacacgtatacgggctccatcctggtggctgtgaacccctaccagctgctctccatctactcgccagagcacatccgccagtataccaacaagaagattggggagatgcccccccacatctttgccattgctgacaactgctacttcaacatgaaacgcaacagccgagaccagtgctgcatcatcagtggggaatctggggccgggaagacggagagcacaaagctgatcctgcagttcctggcagccatcagtgggcagcactcgtggattgagcagcaggtcttggaggccacccccattctggaagcatttgggaatgccaagaccatccgcaatgacaactcaagccgtttcggaaagtacatcgacatccacttcaacaagcggggcgccatcgagggcgcgaagattgagcagtacctgctggaaaagtcacgtgtctgtcgccaggccctggatgaaaggaactaccacgtgttctactgcatgctggagggtatgagtgaggatcagaagaagaagctgggcttgggccaggcctctgactacaactacttggccatgggtaactgcataacctgtgagggccgggtggacagccaggagtacgccaacatccgctccgccatgaaggtgctcatgttcactgacaccgagaactgggagatctcgaagctcctggctgccatcctgcacctgggcaacctgcagtatgaggcacgcacatttgaaaacctggatgcctgtgaggttctcttctccccatcgctggccacagctgcatccctgcttgaggtgaaccccccagacctgatgagctgcctgactagccgcaccctcatcacccgcggggagacggtgtccaccccactgagcagggaacaggcactggacgtgcgcgacgccttcgtaaaggggatctacgggcggctgttcgtgtggattgtggacaagatcaacgcagcaatttacaagcctccctcccaggatgtgaagaactctcgcaggtccatcggcctcctggacatctttgggtttgagaactttgctgtgaacagctttgagcagctctgcatcaacttcgccaatgagcacctgcagcagttctttgtgcggcacgtgttcaagctggagcaggaggaatatgacctggagagcattgactggctgcacatcgagttcactgacaaccaggatgccctggacatgattgccaacaagcccatgaacatcatctccctcatcgatgaggagagcaagttccccaagggcacagacaccaccatgttacacaagctgaactcccagcacaagctcaacgccaactacatcccccccaagaacaaccatgagacccagtttggcatcaaccattttgcaggcatcgtctactatgagacccaaggcttcctggagaagaaccgagacaccctgcatggggacattatccagctggtccactcctccaggaacaagttcatcaagcagatcttccaggccgatgtcgccatgggcgccgagaccaggaagcgctcgcccacacttagcagccagttcaagcggtcactggagctgctgatgcgcacgctgggtgcctgccagcccttctttgtgcgatgcatcaagcccaatgagttcaagaagcccatgctgttcgaccggcacctgtgcgtgcgccagctgcggtactcaggaatgatggagaccatccgaatccgccgagctggctaccccatccgctacagcttcgtagagtttgtggagcggtaccgtgtgctgctgccaggtgtgaagccggcctacaagcagggcgacctccgcgggacttgccagcgcatggctgaggctgtgctgggcacccacgatgactggcagataggcaaaaccaagatctttctgaaggaccaccatgacatgctgctggaagtggagcgggacaaagccatcaccgacagagtcatcctccttcagaaagtcatccggggattcaaagacaggtctaactttctgaagctgaagaacgctgccacactgatccagaggcactggcggggtcacaactgtaggaagaactacgggctgatgcgtctgggcttcctgcggctgcaggccctgcaccgctcccggaagctgcaccagcagtaccgcctggcccgccagcgcatcatccagttccaggcccgctgccgcgcctatctggtgcgcaaggccttccgccaccgcctctgggctgtgctcaccgtgcaggcctatgcccggggcatgatcgcccgcaggctgcaccaacgcctcagggctgagtatctgtggcgcctcgaggctgagaaaatgcggctggcggaggaagagaagcttcggaaggagatgagcgccaagaaggccaaggaggaggccgagcgcaagcatcaggagcgcctggcccagctggctcgtgaggacgctgagcgggagctgaaggagaaggaggccgctcggcggaagaaggagctcctggagcagatggaaagggcccgccatgagcctgtcaatcactcagacatggtggacaagatgtttggcttcctggggacttcaggtggcctgccaggccaggagggccaggcacctagtggctttgaggacctggagcgagggcggagggagatggtggaggaggacctggatgcagccctgcccctgcctgacgaggatgaggaggacctctctgagtataaatttgccaagttcgcggccacctacttccaggggacaaccacgcactcctacacccggcggccactcaaacagccactgctctaccatgacgacgagggtgaccagctggcagccctggcggtctggatcaccatcctccgcttcatgggggacctccctgagcccaagtaccacacagccatgagtgatggcagtgagaagatccctgtgatgaccaagatttatgagaccctgggcaagaagacgtacaagagggagctgcaggccctgcagggcgagggcgaggcccagctccccgagggccagaagaagagcagtgtgaggcacaagctggtgcatttgactctgaaaaagaagtccaagctcacagaggaggtgaccaagaggctgcatgacggggagtccacagtgcagggcaacagcatgctggaggaccggcccacctccaacctggagaagctgcacttcatcatcggcaatggcatcctgcggccagcactccgggacgagatctactgccagatcagcaagcagctgacccacaacccctccaagagcagctatgcccggggctggattctcgtgtctctctgcgtgggctgtttcgccccctccgagaagtttgtcaagtacctgcggaacttcatccacgggggcccgcccggctacgccccgtactgtgaggagcgcctgagaaggacctttgtcaatgggacacggacacagccgcccagctggctggagctgcaggccaccaagtccaagaagccaatcatgttgcccgtgacattcatggatgggaccaccaagaccctgctgacggactcggcaaccacggccaaggagctctgcaacgcgctggccgacaagatctctctcaaggaccggttcgggttctccctctacattgccctgtttgacaaggtgtcctccctgggcagcggcagtgaccacgtcatggacgccatctcccagtgcgagcagtacgccaaggagcagggcgcccaggagcgcaacgccccctggaggctcttcttccgcaaagaggtcttcacgccctggcacagcccctccgaggacaacgtggccaccaacctcatctaccagcaggtggtgcgaggagtcaagtttggggagtacaggtgtgagaaggaggacgacctggctgagctggcctcccagcagtactttgtagactatggctctgagatgatcctggagcgcctcctgaacctcgtgcccacctacatccccgaccgcgagatcacgcccctgaagacgctggagaagtgggcccagctggccatcgccgcccacaagaaggggatttatgcccagaggagaactgatgcccagaaggtcaaagaggatgtggtcagttatgcccgcttcaagtggcccttgctcttctccaggttttatgaagcctacaaattctcaggccccagtctccccaagaacgacgtcatcgtggccgtcaactggacgggtgtgtactttgtggatgagcaggagcaggtacttctggagctgtccttcccagagatcatggccgtgtccagcagcaggggagcgaaaacgacggcccccagcttcacgctggccaccatcaagggggacgaatacaccttcacctccagcaatgctgaggacattcgtgacctggtggtcaccttcctagaggggctccggaagagatctaagtatgttgtggccctgcaggataaccccaaccccgcaggcgaggagtcaggcttcctcagctttgccaagggagacctcatcatcctggaccatgacacgggcgagcaggtcatgaactcgggctgggccaacggcatcaatgagaggaccaagcagcgtggggacttccccaccgacagtgtgtacgtcatgcccactgtcaccatgccaccgcgggagattgtggccctggtcaccatgactcccgatcagaggcaggacgttgtccggctcttgcagctgcgaacggcggagcccgaggtgcgtgccaagccctacacgctggaggagttttcctatgactacttcaggcccccacccaagcacacgctgagccgtgtcatggtgtccaaggcccgaggcaaggaccggctgtggagccacacgcgggaaccgctcaagcaggcgctgctcaagaagctcctgggcagtgaggagctctcgcaggaggcctgcctggccttcattgctgtgctcaagtacatgggcgactacccgtccaagaggacacgctccgtcaacgagctcaccgaccagatctttgagggtcccctgaaagccgagcccctgaaggacgaggcatatgtgcagatcctgaagcagctgaccgacaaccacatcaggtacagcgaggagcggggttgggagctgctctggctgtgcacgggccttttcccacccagcaacatcctcctgccccacgtgcagcgcttcctgcagtcccgaaagcactgcccactcgccatcgactgcctgcaacggctccagaaagccctgagaaacgggtcccggaagtaccctccgcacctggtggaggtggaggccatccagcacaagaccacccagattttccacaaagtctacttccctgatgacactgacgaggccttcgaagtggagtccagcaccaaggccaaggacttctgccagaacatcgccaccaggctgctcctcaagtcctcagagggattcagcctctttgtcaaaattgcagacaaggtcctcagcgttcctgagaatgacttcttctttgactttgttcgacacttgacagactggataaagaaagctcggcccatcaaggacggaattgtgccctcactcacctaccaggtgttcttcatgaagaagctgtggaccaccacggtgccagggaaggatcccatggccgattccatcttccactattaccaggagttgcccaagtatctccgaggctaccacaagtgcacgcgggaggaggtgctgcagctgggggcgctgatctacagggtcaagttcgaggaggacaagtcctacttccccagcatccccaagctgctgcgggagctggtgccccaggaccttatccggcaggtctcacctgatgactggaagcggtccatcgtcgcctacttcaacaagcacgcagggaagtccaaggaggaggccaagctggccttcctgaagctcatcttcaagtggcccacctttggctcagccttcttcgaggtgaagcaaactacggagccaaacttccctgagatcctcctaattgccatcaacaagtatggggtcagcctcatcgatcccaaaacgaaggatatcctcaccactcatcccttcaccaagatctccaactggagcagcggcaacacctacttccacatcaccattgggaacttggtgcgcgggagcaaactgctctgcgagacgtcactgggctacaagatggatgacctcctgacttcctacattagccagatgctcacagccatgagcaaacagcggggctccaggagcggcaagtgaacagtcacggggaggtgctggttccatgcctgctctcgaggcagcagtgggttcaggcccatcagctacccctgcagctggggaagacttatgccatcccggcagcgaggctgggctggccagccaccactgactataccaactgggcctctgatgttcttccagtgaggcatctctctgggatgcagaacttccctccatccacccctctggcacctgggttggtctaatcctagtttgctgtggccttcccggttg

SEQ ID NO: 156857 - DNA, 4050 bp, Homo sapiens
  Payload ID: 10746
  Gene Symbol: MYO7A
  Gene Name: myosin VIIA
  ENST ID: ENST00000409893
  CDS Start-End: 267-3803
ggcaggagagagagggagagacaagagacacacacagagagacggcgaggaagggaaagacccagagggacgcctagaacgagacttggagccagacagaggaagaggggacgtgtgtttgcagactggctgggcccgtgacccagcttcctgagtcctccgtgcaggtggcagctgtaccaggctggcaggtcactgagagtgggcagctgggccccagaactgtgcctggcccagtgggcagcaggagctcctgacttgggaccatggtgattcttcagcagggggaccatgtgtggatggacctgagattggggcaggagttcgacgtgcccatcggggcggtggtgaagctctgcgactctgggcaggtccaggtggtggatgatgaagacaatgaacactggatctctccgcagaacgcaacgcacatcaagcctatgcaccccacgtcggtccacggcgtggaggacatgatccgcctgggggacctcaacgaggcgggcatcttgcgcaacctgcttatccgctaccgggaccacctcatctacacgtatacgggctccatcctggtggctgtgaacccctaccagctgctctccatctactcgccagagcacatccgccagtataccaacaagaagattggggagatgcccccccacatctttgccattgctgacaactgctacttcaacatgaaacgcaacagccgagaccagtgctgcatcatcagtggggaatctggggccgggaagacggagagcacaaagctgatcctgcagttcctggcagccatcagtgggcagcactcgtggattgagcagcaggtcttggaggccacccccattctggaagcatttgggaatgccaagaccatccgcaatgacaactcaagccgtttcggaaagtacatcgacatccacttcaacaagcggggcgccatcgagggcgcgaagattgagcagtacctgctggaaaagtcacgtgtctgtcgccaggccctggatgaaaggaactaccacgtgttctactgcatgctggagggtatgagtgaggatcagaagaagaagctgggcttgggccaggcctctgactacaactacttggccatgggtaactgcataacctgtgagggccgggtggacagccaggagtacgccaacatccgctccgccatgaaggtgctcatgttcactgacaccgagaactgggagatctcgaagctcctggctgccatcctgcacctgggcaacctgcagtatgaggcacgcacatttgaaaacctggatgcctgtgaggttctcttctccccatcgctggccacagctgcatccctgcttgaggtgaaccccccagacctgatgagctgcctgactagccgcaccctcatcacccgcggggagacggtgtccaccccactgagcagggaacaggcactggacgtgcgcgacgccttcgtaaaggggatctacgggcggctgttcgtgtggattgtggacaagatcaacgcagcaatttacaagcctccctcccaggatgtgaagaactctcgcaggtccatcggcctcctggacatctttgggtttgagaactttgctgtgaacagctttgagcagctctgcatcaacttcgccaatgagcacctgcagcagttctttgtgcggcacgtgttcaagctggagcaggaggaatatgacctggagagcattgactggctgcacatcgagttcactgacaaccaggatgccctggacatgattgccaacaagcccatgaacatcatctccctcatcgatgaggagagcaagttccccaagggcacagacaccaccatgttacacaagctgaactcccagcacaagctcaacgccaactacatcccccccaagaacaaccatgagacccagtttggcatcaaccattttgcaggcatcgtctactatgagacccaaggcttcctggagaagaaccgagacaccctgcatggggacattatccagctggtccactcctccaggaacaagttcatcaagcagatcttccaggccgatgtcgccatgggcgccgagaccaggaagcgctcgcccacacttagcagccagttcaagcggtcactggagctgctgatgcgcacgctgggtgcctgccagcccttctttgtgcgatgcatcaagcccaatgagttcaagaagcccatgctgttcgaccggcacctgtgcgtgcgccagctgcggtactcaggaatgatggagaccatccgaatccgccgagctggctaccccatccgctacagcttcgtagagtttgtggagcggtaccgtgtgctgctgccaggtgtgaagccggcctacaagcagggcgacctccgcgggacttgccagcgcatggctgaggctgtgctgggcacccacgatgactggcagataggcaaaaccaagatctttctgaaggaccaccatgacatgctgctggaagtggagcgggacaaagccatcaccgacagagtcatcctccttcagaaagtcatccggggattcaaagacaggtctaactttctgaagctgaagaacgctgccacactgatccagaggcactggcggggtcacaactgtaggaagaactacgggctgatgcgtctgggcttcctgcggctgcaggccctgcaccgctcccggaagctgcaccagcagtaccgcctggcccgccagcgcatcatccagttccaggcccgctgccgcgcctatctggtgcgcaaggccttccgccaccgcctctgggctgtgctcaccgtgcaggcctatgcccggggcatgatcgcccgcaggctgcaccaacgcctcagggctgagtatctgtggcgcctcgaggctgagaaaatgcggctggcggaggaagagaagcttcggaaggagatgagcgccaagaaggccaaggaggaggccgagcgcaagcatcaggagcgcctggcccagctggctcgtgaggacgctgagcgggagctgaaggagaaggaggccgctcggcggaagaaggagctcctggagcagatggaaagggcccgccatgagcctgtcaatcactcagacatggtggacaagatgtttggcttcctggggacttcaggtggcctgccaggccaggagggccaggcacctagtggctttgaggacctggagcgagggcggagggagatggtggaggaggacctggatgcagccctgcccctgcctgacgaggatgaggaggacctctctgagtataaatttgccaagttcgcggccacctacttccaggggacaaccacgcactcctacacccggcggccactcaaacagccactgctctaccatgacgacgagggtgaccagctggcagccctggcggtctggatcaccatcctccgcttcatgggggacctccctgagcccaagtaccacacagccatgagtgatggcagtgagaagatccctgtgatgaccaagatttatgagaccctgggcaagaagacgtacaagagggagctgcaggccctgcagggcgagggcgaggcccagctccccgagggccagaagaagagcagtgtgaggcacaagctggtgcatttgactctgaaaaagaagtccaagctcacagaggaggtgaccaagaggctgcatgacggggagtccacagtgcagggcaacagcatgctggaggaccggcccacctccaacctggagaagctgcacttcatcatcggcaatggcatcctgcggccagcactccggtcagtgccgggaggcggggacaccagggcctgaaagtcttttggtggctgagtggtgcctctgtcaacctagcaagagattaagccaagcaggcctgggtttggcttcgctgctagctagttggtggagttaggaccttggtggagttatttcatctttctaagcctctgattccttgtctgtaaagggggaatcctaaaacaggcatcccttggagatattgcaggttcagttgaaggccacagaaataaatatcacaataaagagagctgcagaaata

SEQ ID NO: 156858 - DNA, 7336 bp, Homo sapiens
  Payload ID: 10746
  Gene Symbol: MYO7A
  Gene Name: myosin VIIA
  Uniprot ID: Q13402
  ENST ID: ENST00000458637
  CDS Start-End: 267-6794
ggcaggagagagagggagagacaagagacacacacagagagacggcgaggaagggaaagacccagagggacgcctagaacgagacttggagccagacagaggaagaggggacgtgtgtttgcagactggctgggcccgtgacccagcttcctgagtcctccgtgcaggtggcagctgtaccaggctggcaggtcactgagagtgggcagctgggccccagaactgtgcctggcccagtgggcagcaggagctcctgacttgggaccatggtgattcttcagcagggggaccatgtgtggatggacctgagattggggcaggagttcgacgtgcccatcggggcggtggtgaagctctgcgactctgggcaggtccaggtggtggatgatgaagacaatgaacactggatctctccgcagaacgcaacgcacatcaagcctatgcaccccacgtcggtccacggcgtggaggacatgatccgcctgggggacctcaacgaggcgggcatcttgcgcaacctgcttatccgctaccgggaccacctcatctacacgtatacgggctccatcctggtggctgtgaacccctaccagctgctctccatctactcgccagagcacatccgccagtataccaacaagaagattggggagatgcccccccacatctttgccattgctgacaactgctacttcaacatgaaacgcaacagccgagaccagtgctgcatcatcagtggggaatctggggccgggaagacggagagcacaaagctgatcctgcagttcctggcagccatcagtgggcagcactcgtggattgagcagcaggtcttggaggccacccccattctggaagcatttgggaatgccaagaccatccgcaatgacaactcaagccgtttcggaaagtacatcgacatccacttcaacaagcggggcgccatcgagggcgcgaagattgagcagtacctgctggaaaagtcacgtgtctgtcgccaggccctggatgaaaggaactaccacgtgttctactgcatgctggagggtatgagtgaggatcagaagaagaagctgggcttgggccaggcctctgactacaactacttggccatgggtaactgcataacctgtgagggccgggtggacagccaggagtacgccaacatccgctccgccatgaaggtgctcatgttcactgacaccgagaactgggagatctcgaagctcctggctgccatcctgcacctgggcaacctgcagtatgaggcacgcacatttgaaaacctggatgcctgtgaggttctcttctccccatcgctggccacagctgcatccctgcttgaggtgaaccccccagacctgatgagctgcctgactagccgcaccctcatcacccgcggggagacggtgtccaccccactgagcagggaacaggcactggacgtgcgcgacgccttcgtaaaggggatctacgggcggctgttcgtgtggattgtggacaagatcaacgcagcaatttacaagcctccctcccaggatgtgaagaactctcgcaggtccatcggcctcctggacatctttgggtttgagaactttgctgtgaacagctttgagcagctctgcatcaacttcgccaatgagcacctgcagcagttctttgtgcggcacgtgttcaagctggagcaggaggaatatgacctggagagcattgactggctgcacatcgagttcactgacaaccaggatgccctggacatgattgccaacaagcccatgaacatcatctccctcatcgatgaggagagcaagttccccaagggcacagacaccaccatgttacacaagctgaactcccagcacaagctcaacgccaactacatcccccccaagaacaaccatgagacccagtttggcatcaaccattttgcaggcatcgtctactatgagacccaaggcttcctggagaagaaccgagacaccctgcatggggacattatccagctggtccactcctccaggaacaagttcatcaagcagatcttccaggccgatgtcgccatgggcgccgagaccaggaagcgctcgcccacacttagcagccagttcaagcggtcactggagctgctgatgcgcacgctgggtgcctgccagcccttctttgtgcgatgcatcaagcccaatgagttcaagaagcccatgctgttcgaccggcacctgtgcgtgcgccagctgcggtactcaggaatgatggagaccatccgaatccgccgagctggctaccccatccgctacagcttcgtagagtttgtggagcggtaccgtgtgctgctgccaggtgtgaagccggcctacaagcagggcgacctccgcgggacttgccagcgcatggctgaggctgtgctgggcacccacgatgactggcagataggcaaaaccaagatctttctgaaggaccaccatgacatgctgctggaagtggagcgggacaaagccatcaccgacagagtcatcctccttcagaaagtcatccggggattcaaagacaggtctaactttctgaagctgaagaacgctgccacactgatccagaggcactggcggggtcacaactgtaggaagaactacgggctgatgcgtctgggcttcctgcggctgcaggccctgcaccgctcccggaagctgcaccagcagtaccgcctggcccgccagcgcatcatccagttccaggcccgctgccgcgcctatctggtgcgcaaggccttccgccaccgcctctgggctgtgctcaccgtgcaggcctatgcccggggcatgatcgcccgcaggctgcaccaacgcctcagggctgagtatctgtggcgcctcgaggctgagaaaatgcggctggcggaggaagagaagcttcggaaggagatgagcgccaagaaggccaaggaggaggccgagcgcaagcatcaggagcgcctggcccagctggctcgtgaggacgctgagcgggagctgaaggagaaggaggccgctcggcggaagaaggagctcctggagcagatggaaagggcccgccatgagcctgtcaatcactcagacatggtggacaagatgtttggcttcctggggacttcaggtggcctgccaggccaggagggccaggcacctagtggctttgaggacctggagcgagggcggagggagatggtggaggaggacctggatgcagccctgcccctgcctgacgaggatgaggaggacctctctgagtataaatttgccaagttcgcggccacctacttccaggggacaaccacgcactcctacacccggcggccactcaaacagccactgctctaccatgacgacgagggtgaccagctggcagccctggcggtctggatcaccatcctccgcttcatgggggacctccctgagcccaagtaccacacagccatgagtgatggcagtgagaagatccctgtgatgaccaagatttatgagaccctgggcaagaagacgtacaagagggagctgcaggccctgcagggcgagggcgaggcccagctccccgagggccagaagaagagcagtgtgaggcacaagctggtgcatttgactctgaaaaagaagtccaagctcacagaggaggtgaccaagaggctgcatgacggggagtccacagtgcagggcaacagcatgctggaggaccggcccacctccaacctggagaagctgcacttcatcatcggcaatggcatcctgcggccagcactccgggacgagatctactgccagatcagcaagcagctgacccacaacccctccaagagcagctatgcccggggctggattctcgtgtctctctgcgtgggctgtttcgccccctccgagaagtttgtcaagtacctgcggaacttcatccacgggggcccgcccggctacgccccgtactgtgaggagcgcctgagaaggacctttgtcaatgggacacggacacagccgcccagctggctggagctgcaggccaccaagtccaagaagccaatcatgttgcccgtgacattcatggatgggaccaccaagaccctgctgacggactcggcaaccacggccaaggagctctgcaacgcgctggccgacaagatctctctcaaggaccggttcgggttctccctctacattgccctgtttgacaaggtgtcctccctgggcagcggcagtgaccacgtcatggacgccatctcccagtgcgagcagtacgccaaggagcagggcgcccaggagcgcaacgccccctggaggctcttcttccgcaaagaggtcttcacgccctggcacagcccctccgaggacaacgtggccaccaacctcatctaccagcaggtggtgcgaggagtcaagtttggggagtacaggtgtgagaaggaggacgacctggctgagctggcctcccagcagtactttgtagactatggctctgagatgatcctggagcgcctcctgaacctcgtgcccacctacatccccgaccgcgagatcacgcccctgaagacgctggagaagtgggcccagctggccatcgccgcccacaagaaggggatttatgcccagaggagaactgatgcccagaaggtcaaagaggatgtggtcagttatgcccgcttcaagtggcccttgctcttctccaggttttatgaagcctacaaattctcaggccccagtctccccaagaacgacgtcatcgtggccgtcaactggacgggtgtgtactttgtggatgagcaggagcaggtacttctggagctgtccttcccagagatcatggccgtgtccagcagcaggggagcgaaaacgacggcccccagcttcacgctggccaccatcaagggggacgaatacaccttcacctccagcaatgctgaggacattcgtgacctggtggtcaccttcctagaggggctccggaagagatctaagtatgttgtggccctgcaggataaccccaaccccgcaggcgaggagtcaggcttcctcagctttgccaagggagacctcatcatcctggaccatgacacgggcgagcaggtcatgaactcgggctgggccaacggcatcaatgagaggaccaagcagcgtggggacttccccaccgacagtgtgtacgtcatgcccactgtcaccatgccaccgcgggagattgtggccctggtcaccatgactcccgatcagaggcaggacgttgtccggctcttgcagctgcgaacggcggagcccgaggtgcgtgccaagccctacacgctggaggagttttcctatgactacttcaggcccccacccaagcacacgctgagccgtgtcatggtgtccaaggcccgaggcaaggaccggctgtggagccacacgcgggaaccgctcaagcaggcgctgctcaagaagctcctgggcagtgaggagctctcgcaggaggcctgcctggccttcattgctgtgctcaagtacatgggcgactacccgtccaagaggacacgctccgtcaacgagctcaccgaccagatctttgagggtcccctgaaagccgagcccctgaaggacgaggcatatgtgcagatcctgaagcagctgaccgacaaccacatcaggtacagcgaggagcggggttgggagctgctctggctgtgcacgggccttttcccacccagcaacatcctcctgccccacgtgcagcgcttcctgcagtcccgaaagcactgcccactcgccatcgactgcctgcaacggctccagaaagccctgagaaacgggtcccggaagtaccctccgcacctggtggaggtggaggccatccagcacaagaccacccagattttccacaaagtctacttccctgatgacactgacgaggccttcgaagtggagtccagcaccaaggccaaggacttctgccagaacatcgccaccaggctgctcctcaagtcctcagagggattcagcctctttgtcaaaattgcagacaaggtcctcagcgttcctgagaatgacttcttctttgactttgttcgacacttgacagactggataaagaaagctcggcccatcaaggacggaattgtgccctcactcacctaccaggtgttcttcatgaagaagctgtggaccaccacggtgccagggaaggatcccatggccgattccatcttccactattaccaggagttgcccaagtatctccgaggctaccacaagtgcacgcgggaggaggtgctgcagctgggggcgctgatctacagggtcaagttcgaggaggacaagtcctacttccccagcatccccaagctgctgcgggagctggtgccccaggaccttatccggcaggtctcacctgatgactggaagcggtccatcgtcgcctacttcaacaagcacgcagggaagtccaaggaggaggccaagctggccttcctgaagctcatcttcaagtggcccacctttggctcagccttcttcgagcaaactacggagccaaacttccctgagatcctcctaattgccatcaacaagtatggggtcagcctcatcgatcccaaaacgaaggatatcctcaccactcatcccttcaccaagatctccaactggagcagcggcaacacctacttccacatcaccattgggaacttggtgcgcgggagcaaactgctctgcgagacgtcactgggctacaagatggatgacctcctgacttcctacattagccagatgctcacagccatgagcaaacagcggggctccaggagcggcaagtgaacagtcacggggaggtgctggttccatgcctgctctcgaggcagcagtgggttcaggcccatcagctacccctgcagctggggaagacttatgccatcccggcagcgaggctgggctggccagccaccactgactataccaactgggcctctgatgttcttccagtgaggcatctctctgggatgcagaacttccctccatccacccctctggcacctgggttggtctaatcctagtttgctgtggccttcccggttgtgagagcctgtgatccttagatgtgtctcctgtttcagaccagccccaccatgcaacttcctttgactttctgtgtaccactgggatagaggaatcaagaggacaatctagctctccatactttgaacaaccaaatgtgcattgaatactctgaaaccgaagggactggatctgcaggtgggatgagggagacagaccacttttctatattgcagtgtgaatgctgggcccctgctcaagtctaccctgatcacctcagggcataaagcatgtttcattctctg

SEQ ID NO: 156859 - DNA, 4616 bp, Homo sapiens
  Payload ID: 10746
  Gene Symbol: MYO7A
  Gene Name: myosin VIIA
  ENST ID: ENST00000458169
  CDS Start-End: 1-4074
ttccaggcccgctgccgcgcctatctggtgcgcaaggccttccgccaccgcctctgggctgtgctcaccgtgcaggcctatgcccggggcatgatcgcccgcaggctgcaccaacgcctcagggctgagtatctgtggcgcctcgaggctgagaaaatgcggctggcggaggaagagaagcttcggaaggagatgagcgccaagaaggccaaggaggaggccgagcgcaagcatcaggagcgcctggcccagctggctcgtgaggacgctgagcgggagctgaaggagaaggaggccgctcggcggaagaaggagctcctggagcagatggaaagggcccgccatgagcctgtcaatcactcagacatggtggacaagatgtttggcttcctggggacttcaggtggcctgccaggccaggagggccaggcacctagtggctttgaggacctggagcgagggcggagggagatggtggaggaggacctggatgcagccctgcccctgcctgacgaggatgaggaggacctctctgagtataaatttgccaagttcgcggccacctacttccaggggacaaccacgcactcctacacccggcggccactcaaacagccactgctctaccatgacgacgagggtgaccagctggcagccctggcggtctggatcaccatcctccgcttcatgggggacctccctgagcccaagtaccacacagccatgagtgatggcagtgagaagatccctgtgatgaccaagatttatgagaccctgggcaagaagacgtacaagagggagctgcaggccctgcagggcgagggcgaggcccagctccccgagggccagaagaagagcagtgtgaggcacaagctggtgcatttgactctgaaaaagaagtccaagctcacagaggaggtgaccaagaggctgcatgacggggagtccacagtgcagggcaacagcatgctggaggaccggcccacctccaacctggagaagctgcacttcatcatcggcaatggcatcctgcggccagcactccgggacgagatctactgccagatcagcaagcagctgacccacaacccctccaagagcagctatgcccggggctggattctcgtgtctctctgcgtgggctgtttcgccccctccgagaagtttgtcaagtacctgcggaacttcatccacgggggcccgcccggctacgccccgtactgtgaggagcgcctgagaaggacctttgtcaatgggacacggacacagccgcccagctggctggagctgcaggccaccaagtccaagaagccaatcatgttgcccgtgacattcatggatgggaccaccaagaccctgctgacggactcggcaaccacggccaaggagctctgcaacgcgctggccgacaagatctctctcaaggaccggttcgggttctccctctacattgccctgtttgacaaggtgtcctccctgggcagcggcagtgaccacgtcatggacgccatctcccagtgcgagcagtacgccaaggagcagggcgcccaggagcgcaacgccccctggaggctcttcttccgcaaagaggtcttcacgccctggcacagcccctccgaggacaacgtggccaccaacctcatctaccagcaggtggtgcgaggagtcaagtttggggagtacaggtgtgagaaggaggacgacctggctgagctggcctcccagcagtactttgtagactatggctctgagatgatcctggagcgcctcctgaacctcgtgcccacctacatccccgaccgcgagatcacgcccctgaagacgctggagaagtgggcccagctggccatcgccgcccacaagaaggggatttatgcccagaggagaactgatgcccagaaggtcaaagaggatgtggtcagttatgcccgcttcaagtggcccttgctcttctccaggttttatgaagcctacaaattctcaggccccagtctccccaagaacgacgtcatcgtggccgtcaactggacgggtgtgtactttgtggatgagcaggagcaggtacttctggagctgtccttcccagagatcatggccgtgtccagcagcaggggagcgaaaacgacggcccccagcttcacgctggccaccatcaagggggacgaatacaccttcacctccagcaatgctgaggacattcgtgacctggtggtcaccttcctagaggggctccggaagagatctaagtatgttgtggccctgcaggataaccccaaccccggcgaggagtcaggcttcctcagctttgccaagggagacctcatcatcctggaccatgacacgggcgagcaggtcatgaactcgggctgggccaacggcatcaatgagaggaccaagcagcgtggggacttccccaccgacagtgtgtacgtcatgcccactgtcaccatgccaccgcgggagattgtggccctggtcaccatgactcccgatcagaggcaggacgttgtccggctcttgcagctgcgaacggcggagcccgaggtgcgtgccaagccctacacgctggaggagttttcctatgactacttcaggcccccacccaagcacacgctgagccgtgtcatggtgtccaaggcccgaggcaaggaccggctgtggagccacacgcgggaaccgctcaagcaggcgctgctcaagaagctcctgggcagtgaggagctctcgcaggaggcctgcctggccttcattgctgtgctcaagtacatgggcgactacccgtccaagaggacacgctccgtcaacgagctcaccgaccagatctttgagggtcccctgaaagccgagcccctgaaggacgaggcatatgtgcagatcctgaagcagctgaccgacaaccacatcaggtacagcgaggagcggggttgggagctgctctggctgtgcacgggccttttcccacccagcaacatcctcctgccccacgtgcagcgcttcctgcagtcccgaaagcactgcccactcgccatcgactgcctgcaacggctccagaaagccctgagaaacgggtcccggaagtaccctccgcacctggtggaggtggaggccatccagcacaagaccacccagattttccacaaagtctacttccctgatgacactgacgaggccttcgaagtggagtccagcaccaaggccaaggacttctgccagaacatcgccaccaggctgctcctcaagtcctcagagggattcagcctctttgtcaaaattgcagacaaggtcctcagcgttcctgagaatgacttcttctttgactttgttcgacacttgacagactggataaagaaagctcggcccatcaaggacggaattgtgccctcactcacctaccaggtgttcttcatgaagaagctgtggaccaccacggtgccagggaaggatcccatggccgattccatcttccactattaccaggagttgcccaagtatctccgaggctaccacaagtgcacgcgggaggaggtgctgcagctgggggcgctgatctacagggtcaagttcgaggaggacaagtcctacttccccagcatccccaagctgctgcgggagctggtgccccaggaccttatccggcaggtctcacctgatgactggaagcggtccatcgtcgcctacttcaacaagcacgcagggaagtccaaggaggaggccaagctggccttcctgaagctcatcttcaagtggcccacctttggctcagccttcttcgaggtgaagcaaactacggagccaaacttccctgagatcctcctaattgccatcaacaagtatggggtcagcctcatcgatcccaaaacgaaggatatcctcaccactcatcccttcaccaagatctccaactggagcagcggcaacacctacttccacatcaccattgggaacttggtgcgcgggagcaaactgctctgcgagacgtcactgggctacaagatggatgacctcctgacttcctacattagccagatgctcacagccatgagcaaacagcggggctccaggagcggcaagtgaacagtcacggggaggtgctggttccatgcctgctctcgaggcagcagtgggttcaggcccatcagctacccctgcagctggggaagacttatgccatcccggcagcgaggctgggctggccagccaccactgactataccaactgggcctctgatgttcttccagtgaggcatctctctgggatgcagaacttccctccatccacccctctggcacctgggttggtctaatcctagtttgctgtggccttcccggttgtgagagcctgtgatccttagatgtgtctcctgtttcagaccagccccaccatgcaacttcctttgactttctgtgtaccactgggatagaggaatcaagaggacaatctagctctccatactttgaacaaccaaatgtgcattgaatactctgaaaccgaagggactggatctgcaggtgggatgagggagacagaccacttttctatattgcagtgtgaatgctgggcccctgctcaagtctaccctgatcacctcagggcataaagcatgtttcattctctg

SEQ ID NO: 156860 - DNA, 4016 bp, Homo sapiens
  Payload ID: 10746
  Gene Symbol: MYO7A
  Gene Name: myosin VIIA
  ENST ID: ENST00000620575
  CDS Start-End: 267-3863
ggcaggagagagagggagagacaagagacacacacagagagacggcgaggaagggaaagacccagagggacgcctagaacgagacttggagccagacagaggaagaggggacgtgtgtttgcagactggctgggcccgtgacccagcttcctgagtcctccgtgcaggtggcagctgtaccaggctggcaggtcactgagagtgggcagctgggccccagaactgtgcctggcccagtgggcagcaggagctcctgacttgggaccatggtgattcttcagcagggggaccatgtgtggatggacctgagattggggcaggagttcgacgtgcccatcggggcggtggtgaagctctgcgactctgggcaggtccaggtggtggatgatgaagacaatgaacactggatctctccgcagaacgcaacgcacatcaagcctatgcaccccacgtcggtccacggcgtggaggacatgatccgcctgggggacctcaacgaggcgggcatcttgcgcaacctgcttatccgctaccgggaccacctcatctacacgtatacgggctccatcctggtggctgtgaacccctaccagctgctctccatctactcgccagagcacatccgccagtataccaacaagaagattggggagatgcccccccacatctttgccattgctgacaactgctacttcaacatgaaacgcaacagccgagaccagtgctgcatcatcagtggggaatctggggccgggaagacggagagcacaaagctgatcctgcagttcctggcagccatcagtgggcagcactcgtggattgagcagcaggtcttggaggccacccccattctggaagcatttgggaatgccaagaccatccgcaatgacaactcaagccgtttcggaaagtacatcgacatccacttcaacaagcggggcgccatcgagggcgcgaagattgagcagtacctgctggaaaagtcacgtgtctgtcgccaggccctggatgaaaggaactaccacgtgttctactgcatgctggagggtatgagtgaggatcagaagaagaagctgggcttgggccaggcctctgactacaactacttggccatgggtaactgcataacctgtgagggccgggtggacagccaggagtacgccaacatccgctccgccatgaaggtgctcatgttcactgacaccgagaactgggagatctcgaagctcctggctgccatcctgcacctgggcaacctgcagtatgaggcacgcacatttgaaaacctggatgcctgtgaggttctcttctccccatcgctggccacagctgcatccctgcttgaggtgaaccccccagacctgatgagctgcctgactagccgcaccctcatcacccgcggggagacggtgtccaccccactgagcagggaacaggcactggacgtgcgcgacgccttcgtaaaggggatctacgggcggctgttcgtgtggattgtggacaagatcaacgcagcaatttacaagcctccctcccaggatgtgaagaactctcgcaggtccatcggcctcctggacatctttgggtttgagaactttgctgtgaacagctttgagcagctctgcatcaacttcgccaatgagcacctgcagcagttctttgtgcggcacgtgttcaagctggagcaggaggaatatgacctggagagcattgactggctgcacatcgagttcactgacaaccaggatgccctggacatgattgccaacaagcccatgaacatcatctccctcatcgatgaggagagcaagttccccaagggcacagacaccaccatgttacacaagctgaactcccagcacaagctcaacgccaactacatcccccccaagaacaaccatgagacccagtttggcatcaaccattttgcaggcatcgtctactatgagacccaaggcttcctggagaagaaccgagacaccctgcatggggacattatccagctggtccactcctccaggaacaagttcatcaagcagatcttccaggccgatgtcgccatgggcgccgagaccaggaagcgctcgcccacacttagcagccagttcaagcggtcactggagctgctgatgcgcacgctgggtgcctgccagcccttctttgtgcgatgcatcaagcccaatgagttcaagaagcccatgctgttcgaccggcacctgtgcgtgcgccagctgcggtactcaggaatgatggagaccatccgaatccgccgagctggctaccccatccgctacagcttcgtagagtttgtggagcggtaccgtgtgctgctgccaggtgtgaagccggcctacaagcagggcgacctccgcgggacttgccagcgcatggctgaggctgtgctgggcacccacgatgactggcagataggcaaaaccaagatctttctgaaggaccaccatgacatgctgctggaagtggagcgggacaaagccatcaccgacagagtcatcctccttcagaaagtcatccggggattcaaagacaggtctaactttctgaagctgaagaacgctgccacactgatccagaggcactggcggggtcacaactgtaggaagaactacgggctgatgcgtctgggcttcctgcggctgcaggccctgcaccgctcccggaagctgcaccagcagtaccgcctggcccgccagcgcatcatccagttccaggcccgctgccgcgcctatctggtgcgcaaggccttccgccaccgcctctgggctgtgctcaccgtgcaggcctatgcccggggcatgatcgcccgcaggctgcaccaacgcctcagggctgagtatctgtggcgcctcgaggctgagaaaatgcggctggcggaggaagagaagcttcggaaggagatgagcgccaagaaggccaaggaggaggccgagcgcaagcatcaggagcgcctggcccagctggctcgtgaggacgctgagcgggagctgaaggagaaggaggccgctcggcggaagaaggagctcctggagcagatggaaagggcccgccatgagcctgtcaatcactcagacatggtggacaagatgtttggcttcctggggacttcaggtggcctgccaggccaggagggccaggcacctagtggctttgaggacctggagcgagggcggagggagatggtggaggaggacctggatgcagccctgcccctgcctgacgaggatgaggaggacctctctgagtataaatttgccaagttcgcggccacctacttccaggggacaaccacgcactcctacacccggcggccactcaaacagccactgctctaccatgacgacgagggtgaccagctggcagccctggcggtctggatcaccatcctccgcttcatgggggacctccctgagcccaagtaccacacagccatgagtgatggcagtgagaagatccctgtgatgaccaagatttatgagaccctgggcaagaagacgtacaagagggagctgcaggccctgcagggcgagggcgaggtcctgcaggcccagctccccgagggccagaagaagagcagtgtgaggcacaagctggtgcatttgactctgaaaaagaagtccaagctcacagaggaggtgaccaagaggctgcatgacggggagtccacagtgcagggcaacagcatgctggaggaccggcccacctccaacctggagaagctgcacttcatcatcggcaatggcatcctgcggacaccagggcctgaaagtcttttggtggctgagtggtgcctctgtcaacctagcaagagattaagcaggcctgggtttggcttcgctgctagctagttggtggagttaggaccttggtggagttatttcatctttctaagcctctgattccttgtctgtaaagggggaatcctaaaacaggcatcccttggagatattgcaggttcagttgaaggccacagaaataaatatcacaataaagagagctgc

SEQ ID NO: 156861 - DNA, 5077 bp, Homo sapiens
  Payload ID: 10747
  Gene Symbol: MYRIP
  Gene Name: myosin VIIA and Rab interacting protein
  Uniprot ID: Q8NFW9
  ENST ID: ENST00000302541
  CDS Start-End: 343-2922
ggccaggctggccctggctgcctgcggcgcgggcgcctccctcgcagccgctgctgccgacgccgctgcgctcccgcctcctgtcggttcccgggttcccgctgcggctgcggttctggcagccgagcccccgcggtgctgcagcccagctttagcgcgcagaccgacccgcgccccttcttcgccgccggcagcctctaatccacgcggcgcgttgcggcaggtgccctgggcgtactgaggcgcggtggcctgagcccggccgccatcgatgaccccggtcgcggacttgcttcaggctggccaccccccgtcttgtttcatcatctgtgttgagtaaccatggggaggaagctggacctgtctggtttgactgatgatgaaacagagcatgttcttcaggtggttcaaagagacttcaatcttcgcaaaaaagaagaagaacgactaagtgagctgaagcagaagctggatgaggaaggcagcaagtgcagcatcctctcgaagcaccagcagtttgtggagcactgctgcatgcgctgctgctcgcccttcaccttcctcgtcaacaccaagcgccagtgtggagattgcaaattcaatgtctgcaagagctgctgctcctaccagaagcacgaaaaggcctgggtctgctgcgtctgccagcaagcgaggcttctgagggcccaatctctggaatggttctacaataatgtgaagagccgcttcaagcgctttggcagtgccaaggttctgaagaacctgtacaggaagcaccggctggagagtggcgcgtgcttcgacattctaggaggaagcctttttgagtcaaacctggagaatgaaggaagcatttctggcagtgattcaacattttataggcagtcagaaggacatagtgtgatggacaccttggctgtggccctacgggtggctgaagaggccattgaggaagcaatttccaaagcagaggcatatggggacagcctggacaagcaaaatgaggccagttacctgcgggaccacaaggaggagctaactgaggaactggccacgacaatcctgcagaagattatacgaaaacagaagagcaaaagtgagcagcaagtggaagaagagccaggatggccacatccccagagttgcagcacaaaggtggcagatgaggggacctcagcatcccctggaggctaccgtgctcccgctgccctctggaggtcccagtctgccttctcaatcactggagaagaagccctgaagacccctccagtggaggctccatcgaggcagccaagggaccaaggccaacacccgagagcagagtctgctctgcccagctggaagagtgtggacaggctggatgaaacaaacctggccccagttttgcagagccccgacgggaactgggtggccctgaaggatggcgctccaccccccacccgactactggccaaacctaagagcgggacgtttcaggccctggaggtggcctccagtgtggcatctgcctacgatgagatgggctccgatagcgaggaagactttgactggagtgaggccttgagcaagctgtgtcccaggtcccgggccctgcccaggaacccccagcctcagcccacacaggcccagagctctgaccaaggccccatagctgcctccccatcctctgcactctcccccaaccctgaggccatgtgctctgactcggagacctcctccgcaggctcttcccgagaagttgggcaccaggccagactgtcctggttgcagaggaaggcccccaggaaccctgcagctgagaagatgcgcttgcatggagagctggacgtgaacttcaacccccagttggccagcagggagacctcggacagcagcgagccggaggaggccccccacaccacagaccggcgggccaggaggtggagaagagcccgactgggctcagaagagccaagcaaagaaccatcttcccccagcgcccagctccgggatctagacacacatcaggtgtcggatgatttatcagagacagacatcagcaatgaggctcgggatccccagactctcacagacaccacagaggagaaacggagaaacaggctgtacgagttagcaatgaaaatgagtgaaaaggagacttcttcaggggaggatcaggagtctgagcccaagacagaatctgagaaccagaaggaaagtctgtcctctgaagacaacagccagagtgtccaggaagagctgaagaagaagttttctgctgtttctctctgcaacatctccacagaagtcctgaaagtcatcaatgccacagaggagttgatagcaggatctacagggccctgggagtccccacaagtccctcctgacagacagaaggggatgtttcctcgtgggacagaccaagtgagactggatgagcagctgacttccctggaagaaaatgtatacctggcagcaggcactgtgtatggactggagacccagctgactgagctagaagatgccgcccgctgcatccacagtggcactgatgagacccatctggcggatctggaggaccaggtggccacggctgcagcccaagtccaccatgctgaactccagatttcagatattgagagccggatttcagccctgaccattgcaggattaaacatagcaccatgtgtgcgcttcacaagaagacgggatcagaagcaaaggacccaggtacaaaccatagatacatcaaggcagcaaaggaggaaactgcctgctccaccggtgaaagctgaaaaaattgagacatcttcagtgactaccattaaaacatttaaccacaacttcattctccaaggctcctcaacaaacaggactaaggaaaggaaaggcaccaccaaggatttgatggagcctgctctggagtcagctgtgatgtactgacaccatggaattccactgccagtgacccactgcctccggccgtacacgacagtgccttgacccaacagccatcgagtactgtatgtatttccacctgaggagaaggcctggggaggccacagtgcaccattgcacagggctgtcctgatacctcatccagaaagccgtctcagacttcagcactgcggtcttgcccactctctgccttaggctcccaggggaatccaagacagaaaatgaagacactggcttccaacagcagcgctccatgtttaagatacatattttccctgtttgctttgctactgtatgttgactttaagatctttttttaaatacatttgattcagctagtattccatgtcaacaatttgtccaaaggaaaactgctggagggaggtggagggaggaaggtgggaattattatttaatacatcattaatgcttattaatctctcacaagcatctttgtcttgcaaatcctaagggaaaagcaagtccctgcagtgagcactagggacagtctaatttggggattgctcaaccatcaagactgcaggtctcccttcagccacctccttcctgctaaaagcttagcctaccacactaccagtcattcccatcgctttgcaatcacaagccacaggatgagaagttctgactcactcatgccatgcccagggctatctgaaacaatgtctcattaagaatttagggttcttccatgggcttactgacagttgcccagatctgaaggggaaagggtcttgagaaagaccatcactggctcaactttagggcactgtccagagtcaacatgatgtggtttagcagtgatcacatctaaacaaagtttaggtaaatgaattatcgcagagaaaaaccacatgagaaaatttttgtactccaaatttacttcccaataaatattcagcaaagtagtaaaatgaccttaaagataaaaatgattagggaatagccttagaaaatttataggtataaaaaattcaaggacaaactgtgcatttaatggacacaagaattgactctaactccatgtctgtggtttctttgaacccatatcaaatgtatgactatttagagtgtttataagagataatggaactgaactttcactcaattaattgggcattaacaaccttcttttatgtttgttcctgatatagtctgaatcttaggaagaaggtaaaagaaaggaggcaagagaatagttatgatgaatatgtgttaagtgcctgctctgaaggaggcaatgttcttctcatttgaatccttatggcaaccttattcaataggttttcccatatttcagatttaataactgaaggccagagagattaatttgccaaagccacacctttatgctaattatgattggaatgcatcacaaaagcctaactctgttgttttcaacctctacgttattttgctgctatgtgcatttccagatctgattttctgctaacttgtgtgctatgatccactcctgatgggggtctacattaatcttccagtactccttgctgatgctgtgttatgtgtcatctaacagaaatgactcctttgaaataagtaaatctttggctttttgttctgttggtgtgattcaaagcaaaacaaacaaacaaaaacaaattttaagaacacaacaaaaaagatttgacttccgaatagaatgttttctttaagaggcatgaaaagcaactattgttgtgttacagtgttaaaaatattcagttttctttgacaaaaatgtgtactgtgtaagccttgcaaacaaaaaacaacaaaaaagaagcagcagcagcagcctgctgtgtggcatctgaacttttataaaggtttccttgtgccaaataagtgcaaagatttaatttactattaaaaaccataagcatatgttatagttccagaagaattattttgtcatcaagtgattttgatctttagtgtcaatatttatatttagattaatttttataaatgaaaatattttaatggtttaagaaaatgaggacaacaggataatatctttgatgacttctgaaagttatgcttcccttcatgttatatgcacattgccaagaattactgtcaagagaaatgataagtaaaagtcatttatgaaaataaa

SEQ ID NO: 156862 - DNA, 4877 bp, Homo sapiens
  Payload ID: 10747
  Gene Symbol: MYRIP
  Gene Name: myosin VIIA and Rab interacting protein
  Uniprot ID: Q8NFW9
  ENST ID: ENST00000396217
  CDS Start-End: 418-2730
gccgacgccgctgcgctcccgcctcctgtcggttcccgggttcccgctgcggctgcggttctggcagccgagcccccgcggtgctgcagcccagctttagcgcgcagaccgacccgcgccccttcttcgccgccggcagcctctaatccacgcggcgcgttgcggcaggtgccctgggcgtactgaggcgcggtggcctgagcccggccgccatcgatgaccccggtcgcggacttgcttcaggctggccaccccccgtcttgtttcatcatctgtgttgagtaaccatggggaggaagctggacctgtctggtttgactgatgatgaaacagagcatgttcttcaggtggttcaaagagacttcaatcttcgcaaaaaagaagaagaacgactaagtgagctgaagcagaagctggatgaggaaggcagcaagtgcagcatcctctcgaagcaccagcagtttgtggagcactgctgcatgcgctgctgctcgcccttcaccttcctcgtcaacaccaagcgccagtgtggagattgcaaattcaatgtctgcaagagctgctgctcctaccagaagcacgaaaaggcctgggtctgctgcgtctgccagcaagcgaggaggaagcctttttgagtcaaacctggagaatgaaggaagcatttctggcagtgattcaacattttataggcagtcagaaggacatagtgtgatggacaccttggctgtggccctacgggtggctgaagaggccattgaggaagcaatttccaaagcagaggcatatggggacagcctggacaagcaaaatgaggccagttacctgcgggaccacaaggaggagctaactgaggaactggccacgacaatcctgcagaagattatacgaaaacagaagagcaaaagtgagcagcaagtggaagaagagccaggatggccacatccccagagttgcagcacaaaggtggcagatgaggggacctcagcatcccctggaggctaccgtgctcccgctgccctctggaggtcccagtctgccttctcaatcactggagaagaagccctgaagacccctccagtggaggctccatcgaggcagccaagggaccaaggccaacacccgagagcagagtctgctctgcccagctggaagagtgtggacaggctggatgaaacaaacctggccccagttttgcagagccccgacgggaactgggtggccctgaaggatggcgctccaccccccacccgactactggccaaacctaagagcgggacgtttcaggccctggaggtggcctccagtgtggcatctgcctacgatgagatgggctccgatagcgaggaagactttgactggagtgaggccttgagcaagctgtgtcccaggtcccgggccctgcccaggaacccccagcctcagcccacacaggcccagagctctgaccaaggccccatagctgcctccccatcctctgcactctcccccaaccctgaggccatgtgctctgactcggagacctcctccgcaggctcttcccgagaagttgggcaccaggccagactgtcctggttgcagaggaaggcccccaggaaccctgcagctgagaagatgcgcttgcatggagagctggacgtgaacttcaacccccagttggccagcagggagacctcggacagcagcgagccggaggaggccccccacaccacagaccggcgggccaggaggtggagaagagcccgactgggctcagaagagccaagcaaagaaccatcttcccccagcgcccagctccgggatctagacacacatcaggtgtcggatgatttatcagagacagacatcagcaatgaggctcgggatccccagactctcacagacaccacagaggagaaacggagaaacaggctgtacgagttagcaatgaaaatgagtgaaaaggagacttcttcaggggaggatcaggagtctgagcccaagacagaatctgagaaccagaaggaaagtctgtcctctgaagacaacagccagagtgtccaggaagagctgaagaagaagttttctgctgtttctctctgcaacatctccacagaagtcctgaaagtcatcaatgccacagaggagttgatagcaggatctacagggccctgggagtccccacaagtccctcctgacagacagaaggggatgtttcctcgtgggacagaccaagtgagactggatgagcagctgacttccctggaagaaaatgtatacctggcagcaggcactgtgtatggactggagacccagctgactgagctagaagatgccgcccgctgcatccacagtggcactgatgagacccatctggcggatctggaggaccaggtggccacggctgcagcccaagtccaccatgctgaactccagatttcagatattgagagccggatttcagccctgaccattgcaggattaaacatagcaccatgtgtgcgcttcacaagaagacgggatcagaagcaaaggacccaggtacaaaccatagatacatcaaggcagcaaaggaggaaactgcctgctccaccggtgaaagctgaaaaaattgagacatcttcagtgactaccattaaaacatttaaccacaacttcattctccaaggctcctcaacaaacaggactaaggaaaggaaaggcaccaccaaggatttgatggagcctgctctggagtcagctgtgatgtactgacaccatggaattccactgccagtgacccactgcctccggccgtacacgacagtgccttgacccaacagccatcgagtactgtatgtatttccacctgaggagaaggcctggggaggccacagtgcaccattgcacagggctgtcctgatacctcatccagaaagccgtctcagacttcagcactgcggtcttgcccactctctgccttaggctcccaggggaatccaagacagaaaatgaagacactggcttccaacagcagcgctccatgtttaagatacatattttccctgtttgctttgctactgtatgttgactttaagatctttttttaaatacatttgattcagctagtattccatgtcaacaatttgtccaaaggaaaactgctggagggaggtggagggaggaaggtgggaattattatttaatacatcattaatgcttattaatctctcacaagcatctttgtcttgcaaatcctaagggaaaagcaagtccctgcagtgagcactagggacagtctaatttggggattgctcaaccatcaagactgcaggtctcccttcagccacctccttcctgctaaaagcttagcctaccacactaccagtcattcccatcgctttgcaatcacaagccacaggatgagaagttctgactcactcatgccatgcccagggctatctgaaacaatgtctcattaagaatttagggttcttccatgggcttactgacagttgcccagatctgaaggggaaagggtcttgagaaagaccatcactggctcaactttagggcactgtccagagtcaacatgatgtggtttagcagtgatcacatctaaacaaagtttaggtaaatgaattatcgcagagaaaaaccacatgagaaaatttttgtactccaaatttacttcccaataaatattcagcaaagtagtaaaatgaccttaaagataaaaatgattagggaatagccttagaaaatttataggtataaaaaattcaaggacaaactgtgcatttaatggacacaagaattgactctaactccatgtctgtggtttctttgaacccatatcaaatgtatgactatttagagtgtttataagagataatggaactgaactttcactcaattaattgggcattaacaaccttcttttatgtttgttcctgatatagtctgaatcttaggaagaaggtaaaagaaaggaggcaagagaatagttatgatgaatatgtgttaagtgcctgctctgaaggaggcaatgttcttctcatttgaatccttatggcaaccttattcaataggttttcccatatttcagatttaataactgaaggccagagagattaatttgccaaagccacacctttatgctaattatgattggaatgcatcacaaaagcctaactctgttgttttcaacctctacgttattttgctgctatgtgcatttccagatctgattttctgctaacttgtgtgctatgatccactcctgatgggggtctacattaatcttccagtactccttgctgatgctgtgttatgtgtcatctaacagaaatgactcctttgaaataagtaaatctttggctttttgttctgttggtgtgattcaaagcaaaacaaacaaacaaaaacaaattttaagaacacaacaaaaaagatttgacttccgaatagaatgttttctttaagaggcatgaaaagcaactattgttgtgttacagtgttaaaaatattcagttttctttgacaaaaatgtgtactgtgtaagccttgcaaacaaaaaacaacaaaaaagaagcagcagcagcagcctgctgtgtggcatctgaacttttataaaggtttccttgtgccaaataagtgcaaagatttaatttactattaaaaaccataagcatatgttatagttccagaagaattattttgtcatcaagtgattttgatctttagtgtcaatatttatatttagattaatttttataaatgaaaatattttaatggtttaagaaaatgaggacaacaggataatatctttgatgacttctgaaagttatgcttcccttcatgttatatgcacattgccaagaattactgtcaagagaaatgataagtaaaagtcatttatg

SEQ ID NO: 156863 - DNA, 2981 bp, Homo sapiens
  Payload ID: 10747
  Gene Symbol: MYRIP
  Gene Name: myosin VIIA and Rab interacting protein
  Uniprot ID: Q8NFW9
  ENST ID: ENST00000425621
  CDS Start-End: 242-2626
ctgcggctgcggttctggcagccgagcccccgcggtgctgcagcccagctttagcgcgcagaccgacccgcgccccttcttcgccgccggcagcctctaatccacgcggcgcgttgcggcaggtgccctgggcgtactgaggcgcggtggcctgagcccggccgccatcgatgaccccggtcgcggacttgcttcaggctggccaccccccgtcttgtttcatcatctgtgttgagtaaccatggggaggaagctggacctgtctggtttgactgatgatgaaacagagcatgttcttcaggtggttcaaagagacttcaatcttcgcaaaaaagaagaagaacgactaagtgagctgaagcagaagctggatgaggaaggcagcaagtgcagcatcctctcgaagcaccagcagtttgtggagcactgctgcatgcgctgctgctcgcccttcaccttcctcgtcaacaccaagcgccagtgtggagattgcaaattcaatgtctgcaagagctgctgctcctaccagaagcacgaaaaggcctgggtctgctgcgtctgccagcaagcgaggcttctgagggcccaatctctggaatggttctacaataatgtgaagagccgcttcaagcgctttggcagtgccaaggttctgaagaacctgtacaggaagcaccggctggagagtggcgcgtgcttcgacattctaggaggaagcctttttgagtcaaacctggagaatgaaggaagcatttctggcagtgattcaacattttataggcagtcagaaggacatagtgtgatggacaccttggctgtggccctacgggtggctgaagaggccattgaggaagcaatttccaaagcagaggcatatggggacagcctggacaagcaaaatgaggccagttacctgcgggaccacaaggaggagctaactgaggaactggccacgacaatcctgcagaagattatacgaaaacagaagagcaaaagtgagcagcaagtggaagaagagccaggatggccacatccccagagttgcagcacaaaggtggcagatgaggggacctcagcatcccctggaggctaccgtgctcccgctgccctctggaggtcccagtctgccttctcaatcactggagaagaagccctgaagacccctccagtggaggctccatcgaggcagccaagggaccaaggccaacacccgagagcagagtctgctctgcccagctggaagagtgtggacaggctggatgaaacaaacctggccccagttttgcagagccccgacgggaactgggtggccctgaaggatggcgctccaccccccacccgactactggccaaacctaagagcgggacgtttcaggccctggaggtggcctccagtgtggcatctgcctacgatgagatgggctccgatagcgaggaagactttgactggagtgaggccttgagcaagctgtgtcccaggtcccgggccctgcccaggaacccccagcctcagcccacacaggcccagagctctgaccaaggccccatagctgcctccccatcctctgcactctcccccaaccctgaggccatgtgctctgactcggagacctcctccgcaggctcttcccgagaagttgggcaccaggccagactgtcctggttgcagaggaaggcccccaggaaccctgcagctgagaagatgcgcttgcatggagagctggacgtgaacttcaacccccagttggccagcagggagacctcggacagcagcgagccggaggaggccccccacaccacagaccggcgggccaggaggtggagaagagcccgactgggctcagaagagccaagcaaagaaccatcttcccccagcgcccagctccgggatctagacacacatcaggtgtcggatgatttatcagagacagacatcagcaatgaggctcgggatccccagactctcacagacaccacagaggagaaacggagaaacaggctgtacgagttagcaatgaaaatgagtgaaaaggagacttcttcaggggaggatcaggagtctgagcccaagacagaatctgagaaccagaaggaaagtctgtcctctgaagacaacagccagagtgtccaggaagagctgaagaaggtatacctggcagcaggcactgtgtatggactggagacccagctgactgagctagaagatgccgcccgctgcatccacagtggcactgatgagacccatctggcggatctggaggaccaggtggccacggctgcagcccaagtccaccatgctgaactccagatttcagatattgagagccggatttcagccctgaccattgcaggattaaacatagcaccatgtgtgcgcttcacaagaagacgggatcagaagcaaaggacccaggtacaaaccatagatacatcaaggcagcaaaggaggaaactgcctgctccaccggtgaaagctgaaaaaattgagacatcttcagtgactaccattaaaacatttaaccacaacttcattctccaaggctcctcaacaaacaggactaaggaaaggaaaggcaccaccaaggatttgatggagcctgctctggagtcagctgtgatgtactgacaccatggaattccactgccagtgacccactgcctccggccgtacacgacagtgccttgacccaacagccatcgagtactgtatgtatttccacctgaggagaaggcctggggaggccacagtgcaccattgcacagggctgtcctgatacctcatccagaaagccgtctcagacttcagcactgcggtcttgcccactctctgccttaggctcccaggggaatccaagacagaaaatgaagacactggcttccaacagcagcgctccatgtttaagatacatattttccctgtttgctttgctactgtatgttgactttaagatctttttttaaatacatttgattcagctagt

SEQ ID NO: 156864 - DNA, 2678 bp, Homo sapiens
  Payload ID: 10747
  Gene Symbol: MYRIP
  Gene Name: myosin VIIA and Rab interacting protein
  Uniprot ID: Q8NFW9
  ENST ID: ENST00000444716
  CDS Start-End: 99-2678
aacccggcggttccgcagctgtgtttgggagacttgggggcgcattagcctggacagctccctgatcggtcttgtttcatcatctgtgttgagtaaccatggggaggaagctggacctgtctggtttgactgatgatgaaacagagcatgttcttcaggtggttcaaagagacttcaatcttcgcaaaaaagaagaagaacgactaagtgagctgaagcagaagctggatgaggaaggcagcaagtgcagcatcctctcgaagcaccagcagtttgtggagcactgctgcatgcgctgctgctcgcccttcaccttcctcgtcaacaccaagcgccagtgtggagattgcaaattcaatgtctgcaagagctgctgctcctaccagaagcacgaaaaggcctgggtctgctgcgtctgccagcaagcgaggcttctgagggcccaatctctggaatggttctacaataatgtgaagagccgcttcaagcgctttggcagtgccaaggttctgaagaacctgtacaggaagcaccggctggagagtggcgcgtgcttcgacattctaggaggaagcctttttgagtcaaacctggagaatgaaggaagcatttctggcagtgattcaacattttataggcagtcagaaggacatagtgtgatggacaccttggctgtggccctacgggtggctgaagaggccattgaggaagcaatttccaaagcagaggcatatggggacagcctggacaagcaaaatgaggccagttacctgcgggaccacaaggaggagctaactgaggaactggccacgacaatcctgcagaagattatacgaaaacagaagagcaaaagtgagcagcaagtggaagaagagccaggatggccacatccccagagttgcagcacaaaggtggcagatgaggggacctcagcatcccctggaggctaccgtgctcccgctgccctctggaggtcccagtctgccttctcaatcactggagaagaagccctgaagacccctccagtggaggctccatcgaggcagccaagggaccaaggccaacacccgagagcagagtctgctctgcccagctggaagagtgtggacaggctggatgaaacaaacctggccccagttttgcagagccccgacgggaactgggtggccctgaaggatggcgctccaccccccacccgactactggccaaacctaagagcgggacgtttcaggccctggaggtggcctccagtgtggcatctgcctacgatgagatgggctccgatagcgaggaagactttgactggagtgaggccttgagcaagctgtgtcccaggtcccgggccctgcccaggaacccccagcctcagcccacacaggcccagagctctgaccaaggccccatagctgcctccccatcctctgcactctcccccaaccctgaggccatgtgctctgactcggagacctcctccgcaggctcttcccgagaagttgggcaccaggccagactgtcctggttgcagaggaaggcccccaggaaccctgcagctgagaagatgcgcttgcatggagagctggacgtgaacttcaacccccagttggccagcagggagacctcggacagcagcgagccggaggaggccccccacaccacagaccggcgggccaggaggtggagaagagcccgactgggctcagaagagccaagcaaagaaccatcttcccccagcgcccagctccgggatctagacacacatcaggtgtcggatgatttatcagagacagacatcagcaatgaggctcgggatccccagactctcacagacaccacagaggagaaacggagaaacaggctgtacgagttagcaatgaaaatgagtgaaaaggagacttcttcaggggaggatcaggagtctgagcccaagacagaatctgagaaccagaaggaaagtctgtcctctgaagacaacagccagagtgtccaggaagagctgaagaagaagttttctgctgtttctctctgcaacatctccacagaagtcctgaaagtcatcaatgccacagaggagttgatagcaggatctacagggccctgggagtccccacaagtccctcctgacagacagaaggggatgtttcctcgtgggacagaccaagtgagactggatgagcagctgacttccctggaagaaaatgtatacctggcagcaggcactgtgtatggactggagacccagctgactgagctagaagatgccgcccgctgcatccacagtggcactgatgagacccatctggcggatctggaggaccaggtggccacggctgcagcccaagtccaccatgctgaactccagatttcagatattgagagccggatttcagccctgaccattgcaggattaaacatagcaccatgtgtgcgcttcacaagaagacgggatcagaagcaaaggacccaggtacaaaccatagatacatcaaggcagcaaaggaggaaactgcctgctccaccggtgaaagctgaaaaaattgagacatcttcagtgactaccattaaaacatttaaccacaacttcattctccaaggctcctcaacaaacaggactaaggaaaggaaaggcaccaccaaggatttgatggagcctgctctggagtcagctgtgatgtactga

SEQ ID NO: 156865 - DNA, 3144 bp, Homo sapiens
  Payload ID: 10747
  Gene Symbol: MYRIP
  Gene Name: myosin VIIA and Rab interacting protein
  ENST ID: ENST00000458441
  CDS Start-End: 116-463
cctgggcgtactgaggcgcggtggcctgagcccggccgccatcgatgaccccggtcgcggacttgcttcaggctggccaccccccgtcttgtttcatcatctgtgttgagtaaccatggggaggaagctggacctgtctggtttgactgatgatgaaacagagcatgttcttcaggtggttcaaagagacttcaatcttcgcaaaaaagaagaagaacgactaagtgagctgaagcagaagctggatgaggaaggcagcaagtgcagcatcctctcgaagcaccagcagtttgtggagcactgctgcatgcgctgctgctcgcccttcaccttcctcgtcaacaccaagcgccagtgtggagattgcaaattcaatgtctgcaagagctgctgctcctaccagaagcacgaaaaggcctgggtctgctgcgtctgccagcaagcgaggaggaagcctttttgagtcaaacctggagaatgaaggaagcatttctggcagtgattcaacattttataggcagtcagaaggacatagtgtgatggacaccttggctgtggccctacgggtggctgaagaggccattgaggaagcaatttccaaagcagaggcatatggggacagcctggacaagcaaaatgaggccagttacctgcgggaccacaaggaggagctaactgaggaactggccacgacaatcctgcagaagattatacgaaaacagaagagcaaaagtgagcagcaagtggaagaagagccaggatggccacatccccagagttgcagcacaaaggtggcagatgaggggacctcagcatcccctggaggctaccgtgctcccgctgccctctggaggtcccagtctgccttctcaatcactggagaagaagccctgaagacccctccagtggaggctccatcgaggcagccaagggaccaaggccaacacccgagagcagagtctgctctgcccagctggaagagtgtggacaggctggatgaaacaaacctggccccagttttgcagagccccgacgggaactgggtggccctgaaggatggcgctccaccccccacccgactactggccaaacctaagagcgggacgtttcaggccctggaggtggcctccagtgtggcatctgcctacgatgagatgggctccgatagcgaggaagactttgactggagtgaggccttgagcaagctgtgtcccaggtcccgggccctgcccaggaacccccagcctcagcccacacaggcccagagctctgaccaaggccccatagctgcctccccatcctctgcactctcccccaaccctgaggccatgtgctctgactcggagacctcctccgcaggctcttcccgagaagttgggcaccaggccagactgtcctggttgcagaggaaggcccccaggaaccctgcagctgagaagatgcgcttgcatggagagctggacgtgaacttcaacccccagttggccagcagggagacctcggacagcagcgagccggaggaggccccccacaccacagaccggcgggccaggaggtggagaagagcccgactgggctcagaagagccaagcaaagaaccatcttcccccagcgcccagctccgggatctagacacacatcaggtgtcggatgatttatcagagacagacatcagcaatgaggctcgggatccccagactctcacagacaccacagaggagaaacggagaaacaggctgtacgagttagcaatgaaaatgagtgaaaaggagacttcttcaggggaggatcaggagtctgagcccaagacagaatctgagaaccagaaggaaagtctgtcctctgaagacaacagccagagtgtccaggaagagctgaagaagaagttttctgctgtttctctctgcaacatctccacagaagtcctgaaagtcatcaatgccacagaggagttgatagcaggatctacagggccctgggagtccccacaagtccctcctgacagacagaaggggatgtttcctcgtgggacagaccaagtgagactggatgagcagctgacttccctggaagaaaatgtatacctggcagcaggcactgtgtatggactggagacccagctgactgagctagaagatgccgcccgctgcatccacagtggcactgatgagacccatctggcggatctggaggaccaggtggccacggctgcagcccaagtccaccatgctgaactccagatttcagatattgagagccggatttcagccctgaccattgcaggattaaacatagcaccatgtgtgcgcttcacaagaagacgggatcagaagcaaaggacccaggtacaaaccatagatacatcaaggcagcaaaggaggaaactgcctgctccaccggtgaaagctgaaaaaattgagacatcttcagtgactaccattaaaacatttaaccacaacttcattctccaaggctcctcaacaaacaggactaaggaaaggaaaggcaccaccaaggatttgatggagcctgctctggagtcagctgtgatgtactgacaccatggaattccactgccagtgacccactgcctccggccgtacacgacagtgccttgacccaacagccatcgagtactgtatgtatttccacctgaggagaaggcctggggaggccacagtgcaccattgcacagggctgtcctgatacctcatccagaaagccgtctcagacttcagcactgcggtcttgcccactctctgccttaggctcccaggggaatccaagacagaaaatgaagacactggcttccaacagcagcgctccatgtttaagatacatattttccctgtttgctttgctactgtatgttgactttaagatctttttttaaatacatttgattcagctagtattccatgtcaacaatttgtccaaaggaaaactgctggagggaggtggagggaggaaggtgggaattattatttaatacatcattaatgcttattaatctctcacaagcatctttgtcttgcaaatcctaagggaaaagcaagtccctgcagtgagcactagggacagtctaatttggggattgctcaaccatcaagactgcaggtctcccttcagccacctccttcctgc

SEQ ID NO: 156866 - DNA, 3244 bp, Homo sapiens
  Payload ID: 10747
  Gene Symbol: MYRIP
  Gene Name: myosin VIIA and Rab interacting protein
  Uniprot ID: Q8NFW9
  ENST ID: ENST00000458292
  CDS Start-End: 116-2029
cctgggcgtactgaggcgcggtggcctgagcccggccgccatcgatgaccccggtcgcggacttgcttcaggctggccaccccccgtcttgtttcatcatctgtgttgagtaaccatggggaggaagctggacctgtctggtttgactgatgatgaaacagagcatgttcttcaggtggttcaaagagacttcaatcttcgcaaaaaagaagaagaacgactaagtgagctgaagcagaagctggatgaggaaggcagcaagtgcagcatcctctcgaagcaccagcagtttgtggagcactgctgcatgcgctgctgctcgcccttcaccttcctcgtcaacaccaagcgccagtgtggagattgcaaattcaatgtctgcaagagctgctgctcctaccagaagcacgaaaaggcctgggtctgctgcgtctgccagcaagcgaggcttctgagggcccaatctctggaatggttctacaataatgtgaagagccgcttcaagcgctttggcagtgccaaggttctgaagaacctgtacaggaagcaccggctggagagtggcgcgtgcttcgacattctaggaggaagcctttttgagtcaaacctggagaatgaaggaagcatttctggcagtgattcaacattttataggcagtcagaaggacatagtgtgatggacaccttggctgtggccctacgggtggctgaagaggccattgaggaagcaatttccaaagcagaggcatatggggacagcctggacaagcaaaatgaggccagttacctgcgggaccacaaggaggagctaactgaggaactggccacgacaatcctgcagaagattatacgaaaacagaagagcaaaagtgagcagcaagtggaagaagagccaggatggccacatccccagagttgcagcacaaaggtggcagatgaggggacctcagcatcccctggaggctaccgtgctcccgctgccctctggaggtcccagtctgccttctcaatcactggagaagaagccctgaagacccctccagtggaggctccatcgaggcagccaagggaccaaggccaacacccgagagcagagtctgctctgcccagctggaagagtgtggacaggctggatgaaacaaacctggccccagttttgcagagccccgacgggaactgggtggccctgaaggatggcgctccaccccccacccgactactggccaaacctaagagcgggacgtttcaggccctggaggtggcctccagtgtggcatctgcctacgatgagatgggctccgatagcgaggaagactttgactggagtgaggccttgagcaagctgtgtcccaggtcccgggccctgcccaggaacccccagcctcagcccacacaggcccagagctctgaccaaggccccatagctgcctccccatcctctgcactctcccccaaccctgaggccatgtgctctgactcggagacctcctccgcaggctcttcccgagaagttgggcaccaggccagactgtcctggttgcagaggaaggcccccaggaaccctgcagctgagaagatgcgcttgcatggagagctggacgtgaacttcaacccccagttggccagcagggagacctcggacagcagcgagccggaggaggccccccacaccacagaccggcgggccaggaggtggagaagagcccgactgggctcagaagagccaagcaaagaaccatcttcccccagcgcccagctccgggatctagacacacatcaggtgtcggatgatttatcagagacagacatcagcaatgaggctcgggatccccagactctcacagacaccacagaggagaaacggagaaacaggctgtacgagttagcaatgaaaatgagtgaaaaggagacttcttcaggggaggatcaggagtctgagcccaagacagaatctgagaaccagaaggaaagtctgtcctctgaagacaacagccagagtgtccaggaagagctgaagaagaagtcctgaaagtcatcaatgccacagaggagttgatagcaggatctacagggccctgggagtccccacaagtccctcctgacagacagaaggggatgtttcctcgtgggacagaccaagtgagactggatgagcagctgacttccctggaagaaaatgtatacctggcagcaggcactgtgtatggactggagacccagctgactgagctagaagatgccgcccgctgcatccacagtggcactgatgagacccatctggcggatctggaggaccaggtggccacggctgcagcccaagtccaccatgctgaactccagatttcagatattgagagccggatttcagccctgaccattgcaggattaaacatagcaccatgtgtgcgcttcacaagaagacgggatcagaagcaaaggacccaggtacaaaccatagatacatcaaggcagcaaaggaggaaactgcctgctccaccggtgaaagctgaaaaaattgagacatcttcagtgactaccattaaaacatttaaccacaacttcattctccaaggctcctcaacaaacaggactaaggaaaggaaaggcaccaccaaggatttgatggagcctgctctggagtcagctgtgatgtactgacaccatggaattccactgccagtgacccactgcctccggccgtacacgacagtgccttgacccaacagccatcgagtactgtatgtatttccacctgaggagaaggcctggggaggccacagtgcaccattgcacagggctgtcctgatacctcatccagaaagccgtctcagacttcagcactgcggtcttgcccactctctgccttaggctcccaggggaatccaagacagaaaatgaagacactggcttccaacagcagcgctccatgtttaagatacatattttccctgtttgctttgctactgtatgttgactttaagatctttttttaaatacatttgattcagctagtattccatgtcaacaatttgtccaaaggaaaactgctggagggaggtggagggaggaaggtgggaattattatttaatacatcattaatgcttattaatctctcacaagcatctttgtcttgcaaatcctaagggaaaagcaagtccctgcagtgagcactagggacagtctaatttggggattgctcaaccatcaagactgcaggtctcccttcagccacctccttcctgc

SEQ ID NO: 156867 - DNA, 4635 bp, Homo sapiens
  Payload ID: 10747
  Gene Symbol: MYRIP
  Gene Name: myosin VIIA and Rab interacting protein
  Uniprot ID: Q8NFW9
  ENST ID: ENST00000539167
  CDS Start-End: 470-2488
agaaacgagcagtagcactgtgctgttccttcactctggtattgctctctacccagagccctgtgtcttttcttaagaagactacctggcttatcctctgtctgggcttttctggccatgaggacatggagtgaagattttggagctctgtgccctgtgtcctggcgtttaattatttctcaagacacgtgagctaaatttgagtagaagagcttggcagaaagaaaaccaccagttacggcttctgagggcccaatctctggaatggttctacaataatgtgaagagccgcttcaagcgctttggcagtgccaaggttctgaagaacctgtacaggaagcaccggctggagagtggcgcgtgcttcgacattctaggaggaagcctttttgagtcaaacctggagaatgaaggaagcatttctggcagtgattcaacattttataggcagtcagaaggacatagtgtgatggacaccttggctgtggccctacgggtggctgaagaggccattgaggaagcaatttccaaagcagaggcatatggggacagcctggacaagcaaaatgaggccagttacctgcgggaccacaaggaggagctaactgaggaactggccacgacaatcctgcagaagattatacgaaaacagaagagcaaaagtgagcagcaagtggaagaagagccaggatggccacatccccagagttgcagcacaaaggtggcagatgaggggacctcagcatcccctggaggctaccgtgctcccgctgccctctggaggtcccagtctgccttctcaatcactggagaagaagccctgaagacccctccagtggaggctccatcgaggcagccaagggaccaaggccaacacccgagagcagagtctgctctgcccagctggaagagtgtggacaggctggatgaaacaaacctggccccagttttgcagagccccgacgggaactgggtggccctgaaggatggcgctccaccccccacccgactactggccaaacctaagagcgggacgtttcaggccctggaggtggcctccagtgtggcatctgcctacgatgagatgggctccgatagcgaggaagactttgactggagtgaggccttgagcaagctgtgtcccaggtcccgggccctgcccaggaacccccagcctcagcccacacaggcccagagctctgaccaaggccccatagctgcctccccatcctctgcactctcccccaaccctgaggccatgtgctctgactcggagacctcctccgcaggctcttcccgagaagttgggcaccaggccagactgtcctggttgcagaggaaggcccccaggaaccctgcagctgagaagatgcgcttgcatggagagctggacgtgaacttcaacccccagttggccagcagggagacctcggacagcagcgagccggaggaggccccccacaccacagaccggcgggccaggaggtggagaagagcccgactgggctcagaagagccaagcaaagaaccatcttcccccagcgcccagctccgggatctagacacacatcaggtgtcggatgatttatcagagacagacatcagcaatgaggctcgggatccccagactctcacagacaccacagaggagaaacggagaaacaggctgtacgagttagcaatgaaaatgagtgaaaaggagacttcttcaggggaggatcaggagtctgagcccaagacagaatctgagaaccagaaggaaagtctgtcctctgaagacaacagccagagtgtccaggaagagctgaagaagaagttttctgctgtttctctctgcaacatctccacagaagtcctgaaagtcatcaatgccacagaggagttgatagcaggatctacagggccctgggagtccccacaagtccctcctgacagacagaaggggatgtttcctcgtgggacagaccaagtgagactggatgagcagctgacttccctggaagaaaatgtatacctggcagcaggcactgtgtatggactggagacccagctgactgagctagaagatgccgcccgctgcatccacagtggcactgatgagacccatctggcggatctggaggaccaggtggccacggctgcagcccaagtccaccatgctgaactccagatttcagatattgagagccggatttcagccctgaccattgcaggattaaacatagcaccatgtgtgcgcttcacaagaagacgggatcagaagcaaaggacccaggtacaaaccatagatacatcaaggcagcaaaggaggaaactgcctgctccaccggtgaaagctgaaaaaattgagacatcttcagtgactaccattaaaacatttaaccacaacttcattctccaaggctcctcaacaaacaggactaaggaaaggaaaggcaccaccaaggatttgatggagcctgctctggagtcagctgtgatgtactgacaccatggaattccactgccagtgacccactgcctccggccgtacacgacagtgccttgacccaacagccatcgagtactgtatgtatttccacctgaggagaaggcctggggaggccacagtgcaccattgcacagggctgtcctgatacctcatccagaaagccgtctcagacttcagcactgcggtcttgcccactctctgccttaggctcccaggggaatccaagacagaaaatgaagacactggcttccaacagcagcgctccatgtttaagatacatattttccctgtttgctttgctactgtatgttgactttaagatctttttttaaatacatttgattcagctagtattccatgtcaacaatttgtccaaaggaaaactgctggagggaggtggagggaggaaggtgggaattattatttaatacatcattaatgcttattaatctctcacaagcatctttgtcttgcaaatcctaagggaaaagcaagtccctgcagtgagcactagggacagtctaatttggggattgctcaaccatcaagactgcaggtctcccttcagccacctccttcctgctaaaagcttagcctaccacactaccagtcattcccatcgctttgcaatcacaagccacaggatgagaagttctgactcactcatgccatgcccagggctatctgaaacaatgtctcattaagaatttagggttcttccatgggcttactgacagttgcccagatctgaaggggaaagggtcttgagaaagaccatcactggctcaactttagggcactgtccagagtcaacatgatgtggtttagcagtgatcacatctaaacaaagtttaggtaaatgaattatcgcagagaaaaaccacatgagaaaatttttgtactccaaatttacttcccaataaatattcagcaaagtagtaaaatgaccttaaagataaaaatgattagggaatagccttagaaaatttataggtataaaaaattcaaggacaaactgtgcatttaatggacacaagaattgactctaactccatgtctgtggtttctttgaacccatatcaaatgtatgactatttagagtgtttataagagataatggaactgaactttcactcaattaattgggcattaacaaccttcttttatgtttgttcctgatatagtctgaatcttaggaagaaggtaaaagaaaggaggcaagagaatagttatgatgaatatgtgttaagtgcctgctctgaaggaggcaatgttcttctcatttgaatccttatggcaaccttattcaataggttttcccatatttcagatttaataactgaaggccagagagattaatttgccaaagccacacctttatgctaattatgattggaatgcatcacaaaagcctaactctgttgttttcaacctctacgttattttgctgctatgtgcatttccagatctgattttctgctaacttgtgtgctatgatccactcctgatgggggtctacattaatcttccagtactccttgctgatgctgtgttatgtgtcatctaacagaaatgactcctttgaaataagtaaatctttggctttttgttctgttggtgtgattcaaagcaaaacaaacaaacaaaaacaaattttaagaacacaacaaaaaagatttgacttccgaatagaatgttttctttaagaggcatgaaaagcaactattgttgtgttacagtgttaaaaatattcagttttctttgacaaaaatgtgtactgtgtaagccttgcaaacaaaaaacaacaaaaaagaagcagcagcagcagcctgctgtgtggcatctgaacttttataaaggtttccttgtgccaaataagtgcaaagatttaatttactattaaaaaccataagcatatgttatagttccagaagaattattttgtcatcaagtgattttgatctttagtgtcaatatttatatttagattaatttttataaatgaaaatattttaatggtttaagaaaatgaggacaacaggataatatctttgatgacttctgaaagttatgcttcccttcatgttatatgcacattgccaagaattactgtcaagagaaatgataagtaaaagtcatttatg

SEQ ID NO: 156868 - DNA, 6694 bp, Homo sapiens
  Payload ID: 10748
  Gene Symbol: MYO7B
  Gene Name: myosin VIIB
  Uniprot ID: Q6PIF6
  ENST ID: ENST00000409816
  CDS Start-End: 33-6383
tccatacaggcttgtggaactgctgactcaggatgtcggggttcaggctgggtgaccacgtgtggctggagcctccctccacccacaagaccggcgtggccatcgggggcatcatcaaagaggcaaagccaggcaaagtcttggttgaagatgacgagggcaaggaacactggatccgagcagaggactttggtgtcctcagtcccatgcaccccaactcagtccagggtgtggacgacatgatccgcctgggggacctgaacgaggcaggcatggtgcacaacctcctgatccgctaccagcagcacaagatctatacatacacaggctccatcctggtggccgtcaacccgttccaggtgctgccgctctacaccctggagcaggtacagctctactacagccgccatatgggcgagctgcccccgcatgtctttgccatcgccaacaactgctacttcagcatgaagaggaacaagagggaccagtgctgcatcatcagcggcgagtctggggctggcaagacggagaccaccaagctcatcctgcagttcctggccaccatcagtggccagcattcgtggattgagcagcaggtcctggaagccaaccccatcctggaggcctttggaaatgccaagacaatccgcaacgacaactcaagccgctttgggaagtacattgacatctactttaaccccagcggggtgatcgagggcgcgcgcatcgagcaatttctcctggagaagtcccgggtctgccggcaggctcccgaggagcggaactaccatatcttctactgcatgctcatgggggtgagtgctgaggacaagcagctgctgagcctgggcacgccctccgagtaccactacctgaccatggggaactgcacttcctgtgaggggctcaacgacgccaaggactacgcccacatccgctcggccatgaagatcctccagttctccgactccgagagctgggacgtcatcaagctgctggctgccattctccacctggggaatgtggggttcatggcttcggtcttcgagaacctggacgcctcagacgtgatggagacgcccgcctttcccaccgtgatgaagttactggaggtgcagcaccaggagctccgggactgtctgatcaagcacaccatcctcatccgaggggaatttgtcaccaggtccctgaacattgcccaggctgctgaccggagggacgcctttgtcaagggcatctatgggcacctcttcctgtggattgtcaagaagatcaatgccgccatcttcacaccaccagcccaggaccccaaaaatgtgcggagggccatcggcctcctggacatatttggctttgaaaatttcgagaacaatagcttcgagcagctctgcatcaacttcgccaacgagcacctgcagcagttctttgtgcagcacgtgttcaccatggagcaagaggagtaccgctcggagaacatctcctgggactatatccactacaccgacaatcggcccaccctggacctgctggccctcaagcccatgagcatcatctccctcctggacgaagaaagccgcttcccgcaggggacagatctcaccatgctgcaaaagctgaacagcgtccatgccaacaacaaggccttcctacagcccaagaacatccacgatgccagatttggcattgcccattttgccggcgaggtgtactaccaagcagaaggcttcctggagaagaaccgagacgtgctgagcacagatatcctcaccctggtttactcctccaaaaacaagtttctgagggagatattcaacttggagttagcagagaccaagctgggccatgggaccatccgccaggcaaaggcaggaaaccatctcttcaagtctgcagactcaaataaacggccctccaccttaggaagccagttcaaacagtctctggaccagctgatgaaaatcctgaccaactgccagccttacttcatccgctgcatcaaacctaatgagtacaagaagccgctgctgttcgaccgggagctgtgcctgcggcagctgcgatactcgggcatgatggagaccgtgcacatccgcaagtcgggcttccccatccgctacacgttcgaggagttctcgcagaggttcggcgtgttgctgcccaacgccatgcggatgcagctgcaaggcaagctccgccagatgaccctgggcatcactgacgtgtggctgcggacagacaaagactggaaagcggggaagacaaaaattttcctgagggatcatcaggacactctgctggaggtacagagaagccaggtgctagacagagcggcgctcagcatccagaaagtccttcggggctacagatacaggaaggagttcctgaggcagaggcgggcagctgtgaccctgcaggcctggtggagaggctactgcaacaggaggaatttcaagctgatcctcgtgggctttgagcgcctgcaggctattgcccggagccagccgctggcgaggcagtaccaggccatgcggcagaggacagtccagctgcaggccctgtgcaggggatacctggtgcgccagcaagtccaggccaagaggagggcagtggtggtcattcaggcccatgccaggggcatggctgcccggcgcaacttccagcaaaggaaggccaatgcgccgctggtcatcccggccgaggggcagaaaagccaaggcgctctccctgccaagaagcgcagatccatctacgacaccgtcactgacacggagatggtggagaaggtgttcggcttcctccctgccatgattgggggccaggagggccaggcctcgccgcactttgaggatctggaatcgaagacccagaagctgcttgaggttgacctggacacagtccccatggcggaggagcctgaggaggatgtggatggcctggccgagtacaccttccccaagtttgctgtgacttacttccagaaatcagccagccacacacacatccggcggcccctccgatacccgttgctttaccacgaagatgacactgactgcttggccgccctggtcatatggaacgtcatcctgaggttcatgggtgatctcccagagccagtgctgtatgccaggagcagccagcagggcagctcagtgatgcggcagatccatgacacgctgggcagggagcacggtgcccaggttccacagcacagtagatctgcacaggtggccagccagctgaacattggagaggaggcattggagcctgatggccttggtgcagaccggcccatgtccaacctggagaaggtgcacttcatcgtgggctacgccatcctgcggcccagcctcagggatgagatttactgccagatctgcaagcagctctcggagaacttcaaaacaagcagcctggcccggggctggatcctgctcagcctctgcctcggctgcttcccaccctcagagaggttcatgaagtatctactgaacttcatcggccaagggccggcgacctacggccccttctgtgccgagcgcctgagacgcacctatgccaatggggtgcgtgcggagccccccacctggctggagctgcaggctgtcaagtccaagaagcacatccccatccaagtcatcttggccactggagagagcctaaccgtccccgtggactcagcctccacatctcgggaaatgtgcatgcacatcgctcacaagcagggcctcagcgaccacctgggcttctccctccaggtcgccgtgtacgacaagttctggtccctgggcagcgggcgcgaccacatgatggatgccatcgcccggtgtgagcagatggcccaggagaggggcgagagccagcgccagtcaccctggcgcatctacttccggaaggaattcttcaccccctggcacgactcccgggaggaccctgtcagcaccgagcttatttaccgccaagtcctccgaggagtctggtctggcgagtacagcttcgagaaggaggaagagctggttgagctgctggcccggcactgctacgtgcagctcggcgcctcagcagagagcaaggctgtccaggagctgctgcccagctgcatcccccacaagctgtacaggaccaagcccccagacaggtgggcgagcctcgtcactgccgcctgcgccaaggccccatacactcagaagcaagtcacaccactggccgtgcgagagcaggtggtggacgccgcccgcctgcagtggccgctgctcttctcccggctcttcgaagtcatcacactctcaggcccccgcctgcccaagacgcagctgatcttggctgttaactggaaggggctttgcttcctggaccagcaggagaagatgctgctggaactctctttcccagaggtcatgggtctggccaccaacagggaggcccagggcgggcagaggctgctgctctccacgatgcatgaggagtacgagtttgtgtcacccagcagtgtggccatcgctgagctggtggccctgttcctggagggcctgaaggagaggtccattttcgccatggccctgcaggacaggaaggccacagatgacaccaccctcctggccttcaagaagggggacctgttggtcctcacaaagaagcaggggctgctggcctctgagaactggaccctcggccagaacgacaggacaggcaagacggggctggtgcccatggcctgcctctacaccatccccacggtcactaagccctcggcacagctgctgagcttgcttgccatgtcaccagagaagaggaagctggcggctcaggaggggcagttcacagagccacgtcctgaggagccacccaaggaaaagctgcacaccctggaggagttctcctatgagttcttcagggctccagagaaggacatggtgagcatggccgtgctgcccctggcccgtgcccgtggccacctgtgggcctattcctgcgagccgctgcgacagccgctgctcaagcgagtccacgccaacgtcgacctctgggacatcgcctgccagatctttgtcgccatcctccggtacatgggcgactacccttctcggcaggcctggcccaccctggagctcaccgaccagatcttcacactggccctgcagcacccggccctccaggacgaggtctactgccagatcctgaagcagctgacgcacaactccaacaggcacagcgaagagcggggctggcagctgctgtggctgtgcacgggcctcttcccgcccagcaaggggctgctgccccatgcccagaagtttatagacactcggagggggaagctgctggcccccgactgcagccgccgaatccagaaggtcctgaggacggggccccggaagcagcccccgcaccaggtggaggtggaggccgcagagcagaacgtctcccgcatctgccacaagatctacttccccaatgacaccagtgagatgctggaggtggttgccaacacacgggtgcgggatgtgtgtgacagcattgccaccaggctgcagctggcctcctgggagggctgcagcctcttcatcaagatttcagacaaggtcatcagccagaaggagggagacttcttctttgattccttgagggaggtgtctgactgggtgaagaagaacaagccccagaaagaaggggcccccgtgacgctcccctaccaggtgtacttcatgcggaaattgtggctcaacatatctccagggaaggatgtgaatgcagacaccatactccattaccaccaggagctgcccaagtacctgcgcggattccacaagtgttcgcgggaggatgccatccacctggcgggcctcatctacaaggcccagttcaacaacgaccggtcccagctggctagtgtccccaagatcctgagggaactggtgcctgagaacctcacacgcctgatgtcctcggaggagtggaaaaagagcatccttctagcctatgacaagcataaggacaagacagtggaggaggccaaggtggccttcctgaagtggatctgccggtggcccaccttcggatccgccttcttcgaggtgaagcaaacctcggagccttcctacccggacgtcatcctcatcgccatcaaccgacatggggttctgctcatccaccccaagaccaaggacctgctcaccacctatcccttcaccaagatctccagctggagcagcggcagcacctacttccacatggcgctggggagcctgggccgtggcagccgcctgctgtgcgagacctccctgggctataagatggatgacctgctgacctcatatgtgcagcagctcctgagtgccatgaacaagcagcggggctccaaggccccagccctggccagcacctagcagcggatgctggcgtgtctgctcaggcgcccttcccgacctctagcctggcggcaccttcccaggccctctcaacccagggcctgtccttggcgggcagccttccatgctgccccccatacaaagcccactcagccccgcaggcggccccctctgtcctgggcgctgcccagggaggccaaaagacgggcccagaatggggtcgggagtctcggacccccaggctattggtggatgactgactgacaggacacctcccaaccccaccccaccccaccagaatgttcaataaaaactcctggagcaggaga

SEQ ID NO: 156869 - DNA, 3567 bp, Homo sapiens
  Payload ID: 10748
  Gene Symbol: MYO7B
  Gene Name: myosin VIIB
  ENST ID: ENST00000409090
  CDS Start-End: 349-3258
ctgggagcagatgggctgtgcaaagggcgcggctgctgaggacagggctgtggctggagaacctgctgcttcctgaagccgagccccaccctaaaggaccgagagcacaggccatgggagaggaatcgagtagggatgcagagcctggtggcactgtcctgagagaggaggaggctgggcagggccccggcgctggagaggtgccctgcatatgggacctctcagagggatgagatttactgccagatctgcaagcagctctcggagaacttcaaaacaagcagcctggcccggggctggatcctgctcagcctctgcctcggctgcttcccaccctcagagaggttcatgaagtatctactgaacttcatcggccaagggccggcgacctacggccccttctgtgccgagcgcctgagacgcacctatgccaatggggtgcgtgcggagccccccacctggctggagctgcaggctgtcaagtccaagaagcacatccccatccaagtcatcttggccactggagagagcctaaccgtccccgtggactcagcctccacatctcgggaaatgtgcatgcacatcgctcacaagcagggcctcagcgaccacctgggcttctccctccaggtcgccgtgtacgacaagttctggtccctgggcagcgggcgcgaccacatgatggatgccatcgcccggtgtgagcagatggcccaggagaggggcgagagccagcgccagtcaccctggcgcatctacttccggaaggaattcttcaccccctggcacgactcccgggaggaccctgtcagcaccgagcttatttaccgccaagtcctccgaggagtctggtctggcgagtacagcttcgagaaggaggaagagctggttgagctgctggcccggcactgctacgtgcagctcggcgcctcagcagagagcaaggctgtccaggagctgctgcccagctgcatcccccacaagctgtacaggaccaagcccccagacaggtgggcgagcctcgtcactgccgcctgcgccaaggccccatacactcagaagcaagtcacaccactggccgtgcgagagcaggtggtggacgccgcccgcctgcagtggccgctgctcttctcccggctcttcgaagtcatcacactctcaggcccccgcctgcccaagacgcagctgatcttggctgttaactggaaggggctttgcttcctggaccagcaggagaagatgctgctggaactctctttcccagaggtcatgggtctggccaccaacagggaggcccagggcgggcagaggctgctgctctccacgatgcatgaggagtacgagtttgtgtcacccagcagtgtggccatcgctgagctggtggccctgttcctggagggcctgaaggagaggtccattttcgccatggccctgcaggacaggaaggccacagatgacaccaccctcctggccttcaagaagggggacctgttggtcctcacaaagaagcaggggctgctggcctctgagaactggaccctcggccagaacgacaggacaggcaagacggggctggtgcccatggcctgcctctacaccatccccacggtcactaagccctcggcacagctgctgagcttgcttgccatgtcaccagagaagaggaagctggcggctcaggaggggcagttcacagagccacgtcctgaggagccacccaaggaaaagctgcacaccctggaggagttctcctatgagttcttcagggctccagagaaggacatggtgagcatggccgtgctgcccctggcccgtgcccgtggccacctgtgggcctattcctgcgagccgctgcgacagccgctgctcaagcgagtccacgccaacgtcgacctctgggacatcgcctgccagatctttgtcgccatcctccggtacatgggcgactacccttctcggcaggcctggcccaccctggagctcaccgaccagatcttcacactggccctgcagcacccggccctccaggacgaggtctactgccagatcctgaagcagctgacgcacaactccaacaggcacagcgaagagcggggctggcagctgctgtggctgtgcacgggcctcttcccgcccagcaaggggctgctgccccatgcccagaagtttatagacactcggagggggaagctgctggcccccgactgcagccgccgaatccagaaggtcctgaggacggggccccggaagcagcccccgcaccaggtggaggtggaggccgcagagcagaacgtctcccgcatctgccacaagatctacttccccaatgacaccagtgagatgctggaggtggttgccaacacacgggtgcgggatgtgtgtgacagcattgccaccaggctgcagctggcctcctgggagggctgcagcctcttcatcaagatttcagacaaggtcatcagccagaaggagggagacttcttctttgattccttgagggaggtgtctgactgggtgaagaagaacaagccccagaaagaaggggcccccgtgacgctcccctaccaggtgtacttcatgcggaaattgtggctcaacatatctccagggaaggatgtgaatgcagacaccatactccattaccaccaggagctgcccaagtacctgcgcggattccacaagtgttcgcgggaggatgccatccacctggcgggcctcatctacaaggcccagttcaacaacgaccggtcccagctggctagtgtccccaagatcctgagggaactggtgcctgagaacctcacacgcctgatgtcctcggaggagtggaaaaagagcatccttctagcctatgacaagcataaggacaagacagtggaggaggccaaggtggccttcctgaagtggatctgccggtggcccaccttcggatccgccttcttcgaggtgaagcaaacctcggagccttcctacccggacgtcatcctcatcgccatcaaccgacatggggttctgctcatccaccccaagaccaaggacctgctcaccacctatcccttcaccaagatctccagctggagcagcggcagcacctacttccacatggcgctggggagcctgggccgtggcagccgcctgctgtgcgagacctccctgggctataagatggatgacctgctgacctcatatgtgcagcagctcctgagtgccatgaacaagcagcggggctccaaggccccagccctggccagcacctagcagcggatgctggcgtgtctgctcaggcgcccttcccgacctctagcctggcggcaccttcccaggccctctcaacccagggcctgtccttggcgggcagccttccatgctgccccccatacaaagcccactcagccccgcaggcggccccctctgtcctgggcgctgcccagggaggccaaaagacgggcccagaatggggtcgggagtctcggacccccaggctattggtggatgactgactgacaggacacctcccaaccccaccccaccccaccagaatgttcaataaaaactcctggagcagga

SEQ ID NO: 156870 - DNA, 822 bp, Homo sapiens
  Payload ID: 10748
  Gene Symbol: MYO7B
  Gene Name: myosin VIIB
  ENST ID: ENST00000437387
  CDS Start-End: 295-822
agagaaatgactgtaatcaccgtgagactggggatcccgcacatctgggagcagatgggctgtgcaaagggcgcggctgctgaggacagggctgtggctggagaacctgctgcttcctgaagccgagccccaccctaaaggaccgagagcacaggccatgggagaggaatcgaggatgagatttactgccagatctgcaagcagctctcggagaacttcaaaacaagcagcctggcccggggctggatcctgctcagcctctgcctcggctgcttcccaccctcagagaggttcatgaagtatctactgaacttcatcggccaagggccggcgacctacggccccttctgtgccgagcgcctgagacgcacctatgccaatggggtgcgtgcggagccccccacctggctggagctgcaggctgtcaagtccaagaagcacatccccatccaagtcatcttggccactggagagagcctaaccgtccccgtggactcagcctccacatctcgggaaatgtgcatgcacatcgctcacaagcagggcctcagcgaccacctgggcttctccctccaggtcgccgtgtacgacaagttctggtccctgggcagcgggcgcgaccacatgatggatgccatcgcccggtgtgagcagatggcccaggagaggggcgagagccagcgccagtcaccctggcgcatctacttccggaaggaattcttcaccccctggcacgactcccgggaggaccctgtcagcaccgagcttatttaccgccaagtcctccgaggagtctggtctggcgagtacagcttcgagaag

SEQ ID NO: 156871 - DNA, 6715 bp, Homo sapiens
  Payload ID: 10748
  Gene Symbol: MYO7B
  Gene Name: myosin VIIB
  Uniprot ID: Q6PIF6
  ENST ID: ENST00000428314
  CDS Start-End: 54-6404
gggagtcagccagacccccatcctgacaaggcttgtggaactgctgactcaggatgtcggggttcaggctgggtgaccacgtgtggctggagcctccctccacccacaagaccggcgtggccatcgggggcatcatcaaagaggcaaagccaggcaaagtcttggttgaagatgacgagggcaaggaacactggatccgagcagaggactttggtgtcctcagtcccatgcaccccaactcagtccagggtgtggacgacatgatccgcctgggggacctgaacgaggcaggcatggtgcacaacctcctgatccgctaccagcagcacaagatctatacatacacaggctccatcctggtggccgtcaacccgttccaggtgctgccgctctacaccctggagcaggtacagctctactacagccgccatatgggcgagctgcccccgcatgtctttgccatcgccaacaactgctacttcagcatgaagaggaacaagagggaccagtgctgcatcatcagcggcgagtctggggctggcaagacggagaccaccaagctcatcctgcagttcctggccaccatcagtggccagcattcgtggattgagcagcaggtcctggaagccaaccccatcctggaggcctttggaaatgccaagacaatccgcaacgacaactcaagccgctttgggaagtacattgacatctactttaaccccagcggggtgatcgagggcgcgcgcatcgagcaatttctcctggagaagtcccgggtctgccggcaggctcccgaggagcggaactaccatatcttctactgcatgctcatgggggtgagtgctgaggacaagcagctgctgagcctgggcacgccctccgagtaccactacctgaccatggggaactgcacttcctgtgaggggctcaacgacgccaaggactacgcccacatccgctcggccatgaagatcctccagttctccgactccgagagctgggacgtcatcaagctgctggctgccattctccacctggggaatgtggggttcatggcttcggtcttcgagaacctggacgcctcagacgtgatggagacgcccgcctttcccaccgtgatgaagttactggaggtgcagcaccaggagctccgggactgtctgatcaagcacaccatcctcatccgaggggaatttgtcaccaggtccctgaacattgcccaggctgctgaccggagggacgcctttgtcaagggcatctatgggcacctcttcctgtggattgtcaagaagatcaatgccgccatcttcacaccaccagcccaggaccccaaaaatgtgcggagggccatcggcctcctggacatatttggctttgaaaatttcgagaacaatagcttcgagcagctctgcatcaacttcgccaacgagcacctgcagcagttctttgtgcagcacgtgttcaccatggagcaagaggagtaccgctcggagaacatctcctgggactatatccactacaccgacaatcggcccaccctggacctgctggccctcaagcccatgagcatcatctccctcctggacgaagaaagccgcttcccgcaggggacagatctcaccatgctgcaaaagctgaacagcgtccatgccaacaacaaggccttcctacagcccaagaacatccacgatgccagatttggcattgcccattttgccggcgaggtgtactaccaagcagaaggcttcctggagaagaaccgagacgtgctgagcacagatatcctcaccctggtttactcctccaaaaacaagtttctgagggagatattcaacttggagttagcagagaccaagctgggccatgggaccatccgccaggcaaaggcaggaaaccatctcttcaagtctgcagactcaaataaacggccctccaccttaggaagccagttcaaacagtctctggaccagctgatgaaaatcctgaccaactgccagccttacttcatccgctgcatcaaacctaatgagtacaagaagccgctgctgttcgaccgggagctgtgcctgcggcagctgcgatactcgggcatgatggagaccgtgcacatccgcaagtcgggcttccccatccgctacacgttcgaggagttctcgcagaggttcggcgtgttgctgcccaacgccatgcggatgcagctgcaaggcaagctccgccagatgaccctgggcatcactgacgtgtggctgcggacagacaaagactggaaagcggggaagacaaaaattttcctgagggatcatcaggacactctgctggaggtacagagaagccaggtgctagacagagcggcgctcagcatccagaaagtccttcggggctacagatacaggaaggagttcctgaggcagaggcgggcagctgtgaccctgcaggcctggtggagaggctactgcaacaggaggaatttcaagctgatcctcgtgggctttgagcgcctgcaggctattgcccggagccagccgctggcgaggcagtaccaggccatgcggcagaggacagtccagctgcaggccctgtgcaggggatacctggtgcgccagcaagtccaggccaagaggagggcagtggtggtcattcaggcccatgccaggggcatggctgcccggcgcaacttccagcaaaggaaggccaatgcgccgctggtcatcccggccgaggggcagaaaagccaaggcgctctccctgccaagaagcgcagatccatctacgacaccgtcactgacacggagatggtggagaaggtgttcggcttcctccctgccatgattgggggccaggagggccaggcctcgccgcactttgaggatctggaatcgaagacccagaagctgcttgaggttgacctggacacagtccccatggcggaggagcctgaggaggatgtggatggcctggccgagtacaccttccccaagtttgctgtgacttacttccagaaatcagccagccacacacacatccggcggcccctccgatacccgttgctttaccacgaagatgacactgactgcttggccgccctggtcatatggaacgtcatcctgaggttcatgggtgatctcccagagccagtgctgtatgccaggagcagccagcagggcagctcagtgatgcggcagatccatgacacgctgggcagggagcacggtgcccaggttccacagcacagtagatctgcacaggtggccagccagctgaacattggagaggaggcattggagcctgatggccttggtgcagaccggcccatgtccaacctggagaaggtgcacttcatcgtgggctacgccatcctgcggcccagcctcagggatgagatttactgccagatctgcaagcagctctcggagaacttcaaaacaagcagcctggcccggggctggatcctgctcagcctctgcctcggctgcttcccaccctcagagaggttcatgaagtatctactgaacttcatcggccaagggccggcgacctacggccccttctgtgccgagcgcctgagacgcacctatgccaatggggtgcgtgcggagccccccacctggctggagctgcaggctgtcaagtccaagaagcacatccccatccaagtcatcttggccactggagagagcctaaccgtccccgtggactcagcctccacatctcgggaaatgtgcatgcacatcgctcacaagcagggcctcagcgaccacctgggcttctccctccaggtcgccgtgtacgacaagttctggtccctgggcagcgggcgcgaccacatgatggatgccatcgcccggtgtgagcagatggcccaggagaggggcgagagccagcgccagtcaccctggcgcatctacttccggaaggaattcttcaccccctggcacgactcccgggaggaccctgtcagcaccgagcttatttaccgccaagtcctccgaggagtctggtctggcgagtacagcttcgagaaggaggaagagctggttgagctgctggcccggcactgctacgtgcagctcggcgcctcagcagagagcaaggctgtccaggagctgctgcccagctgcatcccccacaagctgtacaggaccaagcccccagacaggtgggcgagcctcgtcactgccgcctgcgccaaggccccatacactcagaagcaagtcacaccactggccgtgcgagagcaggtggtggacgccgcccgcctgcagtggccgctgctcttctcccggctcttcgaagtcatcacactctcaggcccccgcctgcccaagacgcagctgatcttggctgttaactggaaggggctttgcttcctggaccagcaggagaagatgctgctggaactctctttcccagaggtcatgggtctggccaccaacagggaggcccagggcgggcagaggctgctgctctccacgatgcatgaggagtacgagtttgtgtcacccagcagtgtggccatcgctgagctggtggccctgttcctggagggcctgaaggagaggtccattttcgccatggccctgcaggacaggaaggccacagatgacaccaccctcctggccttcaagaagggggacctgttggtcctcacaaagaagcaggggctgctggcctctgagaactggaccctcggccagaacgacaggacaggcaagacggggctggtgcccatggcctgcctctacaccatccccacggtcactaagccctcggcacagctgctgagcttgcttgccatgtcaccagagaagaggaagctggcggctcaggaggggcagttcacagagccacgtcctgaggagccacccaaggaaaagctgcacaccctggaggagttctcctatgagttcttcagggctccagagaaggacatggtgagcatggccgtgctgcccctggcccgtgcccgtggccacctgtgggcctattcctgcgagccgctgcgacagccgctgctcaagcgagtccacgccaacgtcgacctctgggacatcgcctgccagatctttgtcgccatcctccggtacatgggcgactacccttctcggcaggcctggcccaccctggagctcaccgaccagatcttcacactggccctgcagcacccggccctccaggacgaggtctactgccagatcctgaagcagctgacgcacaactccaacaggcacagcgaagagcggggctggcagctgctgtggctgtgcacgggcctcttcccgcccagcaaggggctgctgccccatgcccagaagtttatagacactcggagggggaagctgctggcccccgactgcagccgccgaatccagaaggtcctgaggacggggccccggaagcagcccccgcaccaggtggaggtggaggccgcagagcagaacgtctcccgcatctgccacaagatctacttccccaatgacaccagtgagatgctggaggtggttgccaacacacgggtgcgggatgtgtgtgacagcattgccaccaggctgcagctggcctcctgggagggctgcagcctcttcatcaagatttcagacaaggtcatcagccagaaggagggagacttcttctttgattccttgagggaggtgtctgactgggtgaagaagaacaagccccagaaagaaggggcccccgtgacgctcccctaccaggtgtacttcatgcggaaattgtggctcaacatatctccagggaaggatgtgaatgcagacaccatactccattaccaccaggagctgcccaagtacctgcgcggattccacaagtgttcgcgggaggatgccatccacctggcgggcctcatctacaaggcccagttcaacaacgaccggtcccagctggctagtgtccccaagatcctgagggaactggtgcctgagaacctcacacgcctgatgtcctcggaggagtggaaaaagagcatccttctagcctatgacaagcataaggacaagacagtggaggaggccaaggtggccttcctgaagtggatctgccggtggcccaccttcggatccgccttcttcgaggtgaagcaaacctcggagccttcctacccggacgtcatcctcatcgccatcaaccgacatggggttctgctcatccaccccaagaccaaggacctgctcaccacctatcccttcaccaagatctccagctggagcagcggcagcacctacttccacatggcgctggggagcctgggccgtggcagccgcctgctgtgcgagacctccctgggctataagatggatgacctgctgacctcatatgtgcagcagctcctgagtgccatgaacaagcagcggggctccaaggccccagccctggccagcacctagcagcggatgctggcgtgtctgctcaggcgcccttcccgacctctagcctggcggcaccttcccaggccctctcaacccagggcctgtccttggcgggcagccttccatgctgccccccatacaaagcccactcagccccgcaggcggccccctctgtcctgggcgctgcccagggaggccaaaagacgggcccagaatggggtcgggagtctcggacccccaggctattggtggatgactgactgacaggacacctcccaaccccaccccaccccaccagaatgttcaataaaaactcctggagcaggaga

SEQ ID NO: 156872 - DNA, 270 bp, Homo sapiens
  Payload ID: 10748
  Gene Symbol: MYO7B
  Gene Name: myosin VIIB
  ENST ID: ENST00000563538
  CDS Start-End: 1-270
cctggtcatatggaacgtcatcctgaggttcatgggtgatctcccagagccagtgctgtatgccaggagcagccagcagggcagctcagtgatgcggcagatccatgacacgctgggcagggagcacggtgcccaggttccacagcacagtagatctgcacagagatctggctgcaaggacaaggggaccaaggatatctcctccatgaagctgaagcggtcctcccggatcacaggccaggtggccagccagctgaacattggagagga

SEQ ID NO: 156873 - DNA, 11456 bp, Homo sapiens
  Payload ID: 10749
  Gene Symbol: MYO10
  Gene Name: myosin X
  ENST ID: ENST00000274203
  CDS Start-End: 469-6678
gagagctggctgagccgcggcgcgggactgctcacctccaagcgctcgcgcggggatcgcggctcctgctcactttgcggcccgctgtcctcctgcccgccccgagggcccccggccggagcgcagagggagggggccgcgctcgccagcaccccgccgccttcccccgcctgggggaagaatgtgccaccagctgttctccgcttgcgagcgctgcgcccagtagtgaggaacttggaggaagaagagacaaaggctgccgtcgggacgggcgagttagggacttgggtttgggcgaacaaaaggtgagaaggacaagaagggaccgggcgatggcagcaggggagccccgcgggcgcgcgtcctcgggagtggcgccgtgacacgcatggtttccccggacccgcggcggcgctgacttccgcgagtcggagcggcactcggcgagtccgggactgcgctggaacaatggataacttcttcaccgagggaacacgggtctggctgagagaaaatggccagcattttccaagtactgtaaattcctgtgcagaaggcatcgtcgtcttccggacagactatggtcaggtattcacttacaagcagagcacaattacccaccagaaggtgactgctatgcaccccacgaacgaggagggcgtggatgacatggcgtccttgacagagctccatggcggctccatcatgtataacttattccagcggtataagagaaatcaaatatatacctacatcggctccatcctggcctccgtgaacccctaccagcccatcgccgggctgtacgagcctgccaccatggagcagtacagccggcgccacctgggcgagctgcccccgcacatcttcgccatcgccaacgagtgctaccgctgcctgtggaagcgccacgacaaccagtgcatcctcatcagtggtgaaagtggggcaggtaaaaccgaaagcactaaattgatcctcaagtttctgtcagtcatcagtcaacagtctttggaattgtccttaaaggagaagacatcctgtgttgaacgagctattcttgaaagcagccccatcatggaagctttcggcaatgcgaagaccgtgtacaacaacaactctagtcgctttgggaagtttgttcagctgaacatctgtcagaaaggaaatattcagggcgggagaattgtagattatttattagaaaaaaaccgagtagtaaggcaaaatcccggggaaaggaattatcacatattttatgcactgctggcagggctggaacatgaagaaagagaagaattttatttatctacgccagaaaactaccactacttgaatcagtctggatgtgtagaagacaagacaatcagtgaccaggaatcctttagggaagttattacggcaatggacgtgatgcagttcagcaaggaggaagttcgggaagtgtcgaggctgcttgctggtatactgcatcttgggaacatagaatttatcactgctggtggggcacaggtttccttcaaaacagctttgggcagatctgcggagttacttgggctggacccaacacagctcacagatgctttgacccagagatcaatgttcctcaggggagaagagatcctcacgcctctcaatgttcaacaggcagtagacagcagggactccctggccatggctctgtatgcgtgctgctttgagtgggtaatcaagaagatcaacagcaggatcaaaggcaatgaggacttcaagtctattggcatcctcgacatctttggatttgaaaactttgaggttaatcactttgaacagttcaatataaactatgcaaacgagaaacttcaggagtacttcaacaagcatattttttctttagaacaactagaatatagccgggaaggattagtgtgggaagatattgactggatagacaatggagaatgcctggacttgattgagaagaaacttggcctcctagcccttatcaatgaagaaagccattttcctcaagccacagacagcaccttattggagaagctacacagtcagcatgcgaataaccacttttatgtgaagcccagagttgcagttaacaattttggagtgaagcactatgctggagaggtgcaatatgatgtccgaggtatcttggagaagaacagagatacatttcgagatgaccttctcaatttgctaagagaaagccgatttgactttatctacgatctttttgaacatgtttcaagccgcaacaaccaggataccttgaaatgtggaagcaaacatcggcggcctacagtcagctcacagttcaaggactcactgcattccttaatggcaacgctaagctcctctaatcctttctttgttcgctgtatcaagccaaacatgcagaagatgccagaccagtttgaccaggcggttgtgctgaaccagctgcggtactcagggatgctggagactgtgagaatccgcaaagctgggtatgcggtccgaagaccctttcaggacttttacaaaaggcaagagggagctgaattggattctctttcttttcaaagggtgctgatgaggaatctggctctgcctgaggacgtccgagggaagtgcacgagcctgctgcagctctatgatgcctccaacagcgagtggcagctggggaagaccaaggtctttcttcgagaatccttggaacagaaactggagaagcggagggaagaggaagtgagccacgcggccatggtgattcgggcccatgtcttgggcttcttagcacgaaaacaatacagaaaggtcctttattgtgtggtgataatacagaagaattacagagcattccttctgaggaggagatttttgcacctgaaaaaggcagccatagttttccagaagcaactcagaggtcagattgctcggagagtttacagacaattgctggcagagaaaagggagcaagaagaaaagaagaaacaggaagaggaagaaaagaagaaacgggaggaagaagaaagagaaagagagagagagcgaagagaagccgagctccgcgcccagcaggaagaagaaacgaggaagcagcaagaactcgaagccttgcagaagagccagaaggaagctgaactgacccgtgaactggagaaacagaaggaaaataagcaggtggaagagatcctccgtctggagaaagaaatcgaggacctgcagcgcatgaaggagcagcaggagctgtcgctgaccgaggcttccctgcagaagctgcaggagcggcgggaccaggagctccgcaggctggaggaggaagcgtgcagggcggcccaggagttcctcgagtccctcaatttcgacgagatcgacgagtgtgtccggaatatcgagcggtccctgtcggtgggaagcgaattttccagcgagctggctgagagcgcatgcgaggagaagcccaacttcaacttcagccagccctacccagaggaggaggtcgatgagggcttcgaagccgacgacgacgccttcaaggactcccccaaccccagcgagcacggccactcagaccagcgaacaagtggcatccggaccagcgatgactcttcagaggaggacccatacatgaacgacacggtggtgcccaccagccccagtgcggacagcacggtgctgctcgccccatcagtgcaggactccgggagcctacacaactcctccagcggcgagtccacctactgcatgccccagaacgctggggacttgccctccccagacggcgactacgactacgaccaggatgactatgaggacggtgccatcacttccggcagcagcgtgaccttctccaactcctacggcagccagtggtcccccgactaccgctgctctgtggggacctacaacagctcgggtgcctaccggttcagctctgagggggcgcagtcctcgtttgaagatagtgaagaggactttgattccaggtttgatacagatgatgagctttcataccggcgtgactctgtgtacagctgtgtcactctgccgtatttccacagctttctgtacatgaaaggtggcctgatgaactcttggaaacgccgctggtgcgtcctcaaggatgaaaccttcttgtggttccgctccaagcaggaggccctcaagcaaggctggctccacaaaaaaggggggggctcctccacgctgtccaggagaaattggaagaagcgctggtttgtcctccgccagtccaagctgatgtactttgaaaacgacagcgaggagaagctcaagggcaccgtagaagtgcgaacggcaaaagagatcatagataacaccaccaaggagaatgggatcgacatcattatggccgataggactttccacctgattgcagagtccccagaagatgccagccagtggttcagcgtgctgagtcaggtccacgcgtccacggaccaggagatccaggagatgcatgatgagcaggcaaacccacagaatgctgtgggcaccttggatgtggggctgattgattctgtgtgtgcctctgacagccctgatagacccaactcgtttgtgatcatcacggccaaccgggtgctgcactgcaacgccgacacgccggaggagatgcaccactggataaccctgctgcagaggtccaaaggggacaccagagtggagggccaggaattcatcgtgagaggatggttgcacaaagaggtgaagaacagtccaaagatgtcttcactgaaactgaagaaacggtggtttgtactcacccacaattccctggattactacaagagttcagagaagaacgcgctcaaactggggaccctggtcctcaacagcctctgctctgtcgtccccccagatgagaagatattcaaagagacaggctactggaacgtcaccgtgtacgggcgcaagcactgttaccggctctacaccaagctgctcaacgaggccacccggtggtccagtgccattcaaaacgtgactgacaccaaggccccgatcgacacccccacccagcagctgattcaagatatcaaggagaactgcctgaactcggatgtggtggaacagatttacaagcggaacccgatccttcgatacacccatcaccccttgcactccccgctcctgccccttccgtatggggacataaatctcaacttgctcaaagacaaaggctataccacccttcaggatgaggccatcaagatattcaattccctgcagcaactggagtccatgtctgacccaattccaataatccagggcatcctacagacagggcatgacctgcgacctctgcgggacgagctgtactgccagcttatcaaacagaccaacaaagtgccccaccccggcagtgtgggcaacctgtacagctggcagatcctgacatgcctgagctgcaccttcctgccgagtcgagggattctcaagtatctcaagttccatctgaaaaggatacgggaacagtttccaggaagcgagatggaaaaatacgctctcttcacttacgaatctcttaagaaaaccaaatgccgagagtttgtgccttcccgagatgaaatagaagctctgatccacaggcaggaaatgacatccacggtctattgccatggcggcggctcctgcaagatcaccatcaactcccacaccaccgctggggaggtggtggagaagctgatccgaggcctggccatggaggacagcaggaacatgtttgctttgtttgaatacaacggccacgtcgacaaagccattgaaagtcgaaccgtcgtagctgatgtcttagccaagtttgaaaagctggctgccacatccgaggttggggacctgccatggaaattctacttcaaactttactgcttcctggacacagacaacgtgccaaaagacagtgtggagtttgcatttatgtttgaacaggcccacgaagcggttatccatggccaccatccagccccggaagaaaacctccaggttcttgctgccctgcgactccagtatctgcagggggattatactctgcacgctgccatcccacctctcgaagaggtttattccctgcagagactcaaggcccgcatcagccagtcaaccaaaaccttcaccccttgtgaacggctggagaagaggcggacgagcttcctagaggggaccctgaggcggagcttccggacaggatccgtggtccggcagaaggtcgaggaggagcagatgctggacatgtggattaaggaagaagtctcctctgctcgagccagtatcattgacaagtggaggaaatttcagggaatgaaccaggaacaggccatggccaagtacatggccttgatcaaggagtggcctggctatggctcgacgctgtttgatgtggagtgcaaggaaggtggcttccctcaggaactctggttgggtgtcagcgcggacgccgtctccgtctacaagcgtggagagggaagaccactggaagtcttccagtatgaacacatcctctcttttggggcacccctggcgaatacgtataagatcgtggtcgatgagagggagctgctctttgaaaccagtgaggtggtggatgtggccaagctcatgaaagcctacatcagcatgatcgtgaagaagcgctacagcacgacacgctccgccagcagccagggcagctccaggtgaaggcgggacagagcccacctgtctttgctacctgaacgcaccaccctctggcctaggctggctccagtgtgccatgcccagccaaaacaaacacagagctgcccaggctttctggaagcttctggtctgagggaggtgtctccgaggatccttttgcctgccgccttcattgatcctgtattaagctgtcaactttaacagtctgcacagtttccaaagctttactactcttagaggacacatgccttaaaaaaggaggggaggaaccacgctgccaccaaagcagccggaagtgccttaacttgtggaaccaacactaatcgaccgtaactgtgctactgaagggaactgcctttcccccttctgggggagacttaacagagcgtggaaggggggcattctctgtcaatgatgcactaacctcccaacctgatttccccgaatctgagggaaggtgagggagtgggaagggggatggagagctcgaggggacagtgtgtttgagctggagtgctgcgggcagcctttctcatggaatgacatgaatcaacttttttctttgtttcatcttttaagtgtacgtgcttgcctgttcgtgcatgtgttcataaactcaacactttaatcatggtttcatgagcattaaaaagcaaagggaaaaaggatgtgtaatggtgtacacagtctgtatattttaataatgcagagctatagtctcaattgttactttataaggtggttttattaacaaacccaaatcctggattttcctgtctttgctgtattttgaaaaacacgtgttgactccattgttttacatgtagcaaagtctgccatctgtgtctgctgtattataaacagataagcagcctacaagataactgtatttataaaccactcttcaacagctggctccagtgctggttttagaacaagaatgaagtcattttggagtctttcatgtctaaaagatttaagttaaaaacaaagtgttacttggaaggttagcttctatcattctggatagattacagatataataaccatgttgactatgggggagagacgctgcattccagaaacgtcttaacacttgagtgaatcttcaaaggaccctgacattaaatgctgaggctttaatacacacatattttatcccaagtttataatggtggtctgaacaaggcacctgtaaataaatcagcatttatgaccagaagaaaaataatctggtcttggactttttatttttatatggaaaagttttaaggacttgggccaactaagtctacccacacgaaaaaagaaatttgccttgtccctttgtgtacaaccatgcaaaactgtttgttggctcacagaagttctgacaataaaagatactagctaacacgctgtgtgtttcctttatcagaggaggctctaaaaaccatggaggggaggcttatttttgttttggctttttggtggttttttttttttttctttagagacagagtctcactctgttacccaggctggagtacagtggcgtgatctcggctcactgcagcctctgcctcctgggttctagcgattctcctgcctcagcctcccaaggagttgggagtacaggcatgcatcaccacgcctggctaggttttgtatttttagtagagatggggtttcaccatgttggccaggctggtctcgatccacctgcctcagcctcccaaagtgctgggattacaggtgtgagctaccgcacccggccggctttttggtgttaatgctatggtttcagtgtctgggctttgtgtttgtttcatggacttgctcatcaggtctaaacacagatctgcagctgtctccactgctcttgtagacactgagtgtgacttcaagaaagcaaaagaagggactggtaaatgaagtcacacacagctgaggacttgaaatgtgtttatgtcagacagtcccctatgtcagccccaaagtgtgcctgatcttgcaaccctggatcctagaacctgcctgcacctccctgtggaccagaacacacaggtaggcagtttggttgccaatgtacccaaaccaccaggccaggcgtctagcatgagcaagcgccacttctcttgcagaccactgactcccaccctctgctcatgctcacggatggcttcttcccattctgcagggattgggatggaacctgaagccaggtgctgcctgaagcctgtggccccgccaggcacccaaggaaagccggcaaagacttggatgtgtgttgtctttgtttttattttaggctcagaaagaatttgacagaagtcttctttctactgctcacctctcaggattccctctgtgacttaatttactctggaaggctgtcgcccgccctcaattatagatggggaaataggcaaggaaaggcatgactcagattgggggggttagagcagcaccatagttagaacatagatttacatgtgagcctttacatggcatagttgtggttttgttttagccttttatttagaaataattacagactcagagaaagttgcaacagaacgtacagggaggcctgcgtgcccttcagtttccccagtggtagcatcccccatcactgtagagcagcatcacagctgacaaagtaccgttgagcttcccctagccacagaacctattccaattttactgcttttacatgcactcattggtgtgtgtgatgtcagttgctttcaacaaggtcagtgaagtgcagtcgtcccttggtatccaagggagattggttccaggaccccctccccccacccctgaggatacaaaattcacagatgctcaagtccctgctatacagtggtataatatttgcatagaacctgcacacatctttccttaccctttaaatcatctccaggttacagatacctagcacaacataaatgctgcataaatagctgttataccgtgtgtgtctgtgttttaaacattgtttatttgagacagggtctcactctgtcaccaggctacagtgcagaggcacagtcacagctcattgcagcctcaacctcctgggctcaagcagtcctccacctcagcctcccaaagtgctaggatgacaggtgtgagccactgtgccccaccaaaaaaagttttttcaaatattttctatctgtggttggattcagaccacatgaacactgagggctgactgtagttttgaatgtctgttactgaggaggcaccagcataaagtattttatcacttcagacgctgacaatctagtatttttaatttttaaatcttttgaaagctaatacatataggtgatttgtaaaaaaaaaaaaaaaaaaaaaaaaaaaaaaaaaaaaaaacaactagaagtaaaatgttacttttttccagctgtagccctaattacccattttcctttcccagaaacagctatttttactgttttattgaatattctctcaaaaataatttaagctgtccaatcatttactcatacatacatatatatccccatcctcatttttaatagatggaaacaaactgttgtagcttacttttttctcagcatagtattttagctctaatcctacattaatacctatagaattgccttattctttttgatgattatatagtacctcagatagctctgtggaaaaacaggataaggccatctgtattagtccattctcacactgctagaaggacatgcctgagactgggtaatttataaagaaaaagaagttgaatggactcagtctcacatgcctggggaggcctcacaatcatggtggacagcaaaggaggagaaaaggcacatcttatatggcagcaggcaagagagcttgcacaggggaactcccttttataaaaccattagctcttccgagacatactcactatggacaagaacagcatgggaaaacccacccccatgattcaattacctcccatcaggtccctcccgtgacaggtggggattatgggagctataattcaagatgagatttgggtggggacagagccaaaccatatcaccacctaagttctctgtaaaaatagtttcagccaggcatgctggctcacgcctgtaatcccagcatgttggaaggccgaggcaagaggatcgcttgagctccggagttcaagaccagtctgggcaacatgacaagaccctgtctccacagaaaattaacattagccaggtgtggtggtgcgcatctgtagtcccagctactggggaggctgagatgagaaaatcgtttgaacccaggaggtcaaagctgcagggagccatgatggtgccactgcattctggtgtgggtgacagagcaagactctgtctccaaaaaaaaaaaaaaaaaaaaaaaatagttcagaaatctaagacagcactttttttagttactaagccttttattcagatagcacactaaattggggtcaaaaatctgctatagtaaagttctgtatttgtgtgtattgggtataaaaataagcgctttaattaatttgaaaatccctattcaccaaaagtttatactgtaataggggacaaaacaagtgcataaagctaaatttagccagtacatttataactgtttcattcagttgatcagagaagcatcacgattgctggaaaatatcggacctggattcaaggtttggcattgctgttttcaaagtatgtaatcttttagatcaggggtcagtgaactacagtacagagaccaaatctaccctgccacctgtttttgtgaataaagttttattg

SEQ ID NO: 156874 - DNA, 4803 bp, Homo sapiens
  Payload ID: 10749
  Gene Symbol: MYO10
  Gene Name: myosin X
  ENST ID: ENST00000505695
  CDS Start-End: 480-4673
agcaaagagtgctgttcttgttctctgggtggattttccaagatcacaactaaactgcttgattttgtcctgggactttttttaaaaaaaaattattgattggcttttaaaatcaagaatctttgggccctgaaatgtaattacacatttgttgatgcgtgcatgatggttagtttgcccctgcagtcaaaagtgtcttcagcagttcctatcacgtcagcctcgccaggctggacttcctttgagtagaatcaggaatgaattaagcagcacagcccgagacgcaccacataaaaggctgggaacaccagccagccgaagaaagcccatttttgtgtctgtcagcttagatgcccttgcccggactgctaaagatgcagctatttacagtggacagaaactgaaggggtgaaagaaaacccaagatgccagaccagtttgaccaggcggttgtgctgaaccagctgcggtactcagggatgctggagactgtgagaatccgcaaagctgggtatgcggtccgaagaccctttcaggacttttacaaaaggtataaagtgctgatgaggaatctggctctgcctgaggacgtccgagggaagtgcacgagcctgctgcagctctatgatgcctccaacagcgagtggcagctggggaagaccaaggtctttcttcgagaatccttggaacagaaactggagaagcggagggaagaggaagtgagccacgcggccatggtgattcgggcccatgtcttgggcttcttagcacgaaaacaatacagaaaggtcctttattgtgtggtgataatacagaagaattacagagcattccttctgaggaggagatttttgcacctgaaaaaggcagccatagttttccagaagcaactcagaggtcagattgctcggagagtttacagacaattgctggcagagaaaagggagcaagaagaaaagaagaaacaggaagaggaagaaaagaagaaacgggaggaagaagaaagagaaagagagagagagcgaagagaagccgagctccgcgcccagcaggaagaagaaacgaggaagcagcaagaactcgaagccttgcagaagagccagaaggaagctgaactgacccgtgaactggagaaacagaaggaaaataagcaggtggaagagatcctccgtctggagaaagaaatcgaggacctgcagcgcatgaaggagcagcaggagctgtcgctgaccgaggcttccctgcagaagctgcaggagcggcgggaccaggagctccgcaggctggaggaggaagcgtgcagggcggcccaggagttcctcgagtccctcaatttcgacgagatcgacgagtgtgtccggaatatcgagcggtccctgtcggtgggaagcgaattttccagcgagctggctgagagcgcatgcgaggagaagcccaacttcaacttcagccagccctacccagaggaggaggtcgatgagggcttcgaagccgacgacgacgccttcaaggactcccccaaccccagcgagcacggccactcagaccagcgaacaagtggcatccggaccagcgatgactcttcagaggaggacccatacatgaacgacacggtggtgcccaccagccccagtgcggacagcacggtgctgctcgccccatcagtgcaggactccgggagcctacacaactcctccagcggcgagtccacctactgcatgccccagaacgctggggacttgccctccccagacggcgactacgactacgaccaggatgactatgaggacggtgccatcacttccggcagcagcgtgaccttctccaactcctacggcagccagtggtcccccgactaccgctgctctgtggggacctacaacagctcgggtgcctaccggttcagctctgagggggcgcagtcctcgtttgaagatagtgaagaggactttgattccaggtttgatacagatgatgagctttcataccggcgtgactctgtgtacagctgtgtcactctgccgtatttccacagctttctgtacatgaaaggtggcctgatgaactcttggaaacgccgctggtgcgtcctcaaggatgaaaccttcttgtggttccgctccaagcaggaggccctcaagcaaggctggctccacaaaaaaggggggggctcctccacgctgtccaggagaaattggaagaagcgctggtttgtcctccgccagtccaagctgatgtactttgaaaacgacagcgaggagaagctcaagggcaccgtagaagtgcgaacggcaaaagagatcatagataacaccaccaaggagaatgggatcgacatcattatggccgataggactttccacctgattgcagagtccccagaagatgccagccagtggttcagcgtgctgagtcaggtccacgcgtccacggaccaggagatccaggagatgcatgatgagcaggcaaacccacagaatgctgtgggcaccttggatgtggggctgattgattctgtgtgtgcctctgacagccctgatagacccaactcgtttgtgatcatcacggccaaccgggtgctgcactgcaacgccgacacgccggaggagatgcaccactggataaccctgctgcagaggtccaaaggggacaccagagtggagggccaggaattcatcgtgagaggatggttgcacaaagaggtgaagaacagtccaaagatgtcttcactgaaactgaagaaacggtggtttgtactcacccacaattccctggattactacaagagttcagagaagaacgcgctcaaactggggaccctggtcctcaacagcctctgctctgtcgtccccccagatgagaagatattcaaagagacaggctactggaacgtcaccgtgtacgggcgcaagcactgttaccggctctacaccaagctgctcaacgaggccacccggtggtccagtgccattcaaaacgtgactgacaccaaggccccgatcgacacccccacccagcagctgattcaagatatcaaggagaactgcctgaactcggatgtggtggaacagatttacaagcggaacccgatccttcgatacacccatcaccccttgcactccccgctcctgccccttccgtatggggacataaatctcaacttgctcaaagacaaaggctataccacccttcaggatgaggccatcaagatattcaattccctgcagcaactggagtccatgtctgacccaattccaataatccagggcatcctacagacagggcatgacctgcgacctctgcgggacgagctgtactgccagcttatcaaacagaccaacaaagtgccccaccccggcagtgtgggcaacctgtacagctggcagatcctgacatgcctgagctgcaccttcctgccgagtcgagggattctcaagtatctcaagttccatctgaaaaggatacgggaacagtttccaggaagcgagatggaaaaatacgctctcttcacttacgaatctcttaagaaaaccaaatgccgagagtttgtgccttcccgagatgaaatagaagctctgatccacaggcaggaaatgacatccacggtctattgccatggcggcggctcctgcaagatcaccatcaactcccacaccaccgctggggaggtggtggagaagctgatccgaggcctggccatggaggacagcaggaacatgtttgctttgtttgaatacaacggccacgtcgacaaagccattgaaagtcgaaccgtcgtagctgatgtcttagccaagtttgaaaagctggctgccacatccgaggttggggacctgccatggaaattctacttcaaactttactgcttcctggacacagacaacgtgccaaaagacagtgtggagtttgcatttatgtttgaacaggcccacgaagcggttatccatggccaccatccagccccggaagaaaacctccaggttcttgctgccctgcgactccagtatctgcagggggattatactctgcacgctgccatcccacctctcgaagaggtttattccctgcagagactcaaggcccgcatcagccagtcaaccaaaaccttcaccccttgtgaacggctggagaagaggcggacgagcttcctagaggggaccctgaggcggagcttccggacaggatccgtggtccggcagaaggtcgaggaggagcagatgctggacatgtggattaaggaagaagtctcctctgctcgagccagtatcattgacaagtggaggaaatttcagggaatgaaccaggaacaggccatggccaagtacatggccttgatcaaggagtggcctggctatggctcgacgctgtttgatgtggagtgcaaggaaggtggcttccctcaggaactctggttgggtgtcagcgcggacgccgtctccgtctacaagcgtggagagggaagaccactggaagtcttccagtatgaacacatcctctcttttggggcacccctggcgaatacgtataagatcgtggtcgatgagagggagctgctctttgaaaccagtgaggtggtggatgtggccaagctcatgaaagcctacatcagcatgatcgtgaagaagcgctacagcacgacacgctccgccagcagccagggcagctccaggtgaaggcgggacagagcccacctgtctttgctacctgaacgcaccaccctctggcctaggctggctccagtgtgccatgcccagccaaaacaaacacagagctgcccaggctttctggaagcttctggtctga

SEQ ID NO: 156875 - DNA, 8038 bp, Homo sapiens
  Payload ID: 10749
  Gene Symbol: MYO10
  Gene Name: myosin X
  Uniprot ID: Q9HD67
  ENST ID: ENST00000513610
  CDS Start-End: 456-6632
gccgcggcgcgggactgctcacctccaagcgctcgcgcggggatcgcggctcctgctcactttgcggcccgctgtcctcctgcccgccccgagggcccccggccggagcgcagagggagggggccgcgctcgccagcaccccgccgccttcccccgcctgggggaagaatgtgccaccagctgttctccgcttgcgagcgctgcgcccagtagtgaggaacttggaggaagaagagacaaaggctgccgtcgggacgggcgagttagggacttgggtttgggcgaacaaaaggtgagaaggacaagaagggaccgggcgatggcagcaggggagccccgcgggcgcgcgtcctcgggagtggcgccgtgacacgcatggtttccccggacccgcggcggcgctgacttccgcgagtcggagcggcactcggcgagtccgggactgcgctggaacaatggataacttcttcaccgagggaacacgggtctggctgagagaaaatggccagcattttccaagtactgtaaattcctgtgcagaaggcatcgtcgtcttccggacagactatggtcaggtattcacttacaagcagagcacaattacccaccagaaggtgactgctatgcaccccacgaacgaggagggcgtggatgacatggcgtccttgacagagctccatggcggctccatcatgtataacttattccagcggtataagagaaatcaaatatatacctacatcggctccatcctggcctccgtgaacccctaccagcccatcgccgggctgtacgagcctgccaccatggagcagtacagccggcgccacctgggcgagctgcccccgcacatcttcgccatcgccaacgagtgctaccgctgcctgtggaagcgccacgacaaccagtgcatcctcatcagtggtgaaagtggggcaggtaaaaccgaaagcactaaattgatcctcaagtttctgtcagtcatcagtcaacagtctttggaattgtccttaaaggagaagacatcctgtgttgaacgagctattcttgaaagcagccccatcatggaagctttcggcaatgcgaagaccgtgtacaacaacaactctagtcgctttgggaagtttgttcagctgaacatctgtcagaaaggaaatattcagggcgggagaattgtagattatttattagaaaaaaaccgagtagtaaggcaaaatcccggggaaaggaattatcacatattttatgcactgctggcagggctggaacatgaagaaagagaagaattttatttatctacgccagaaaactaccactacttgaatcagtctggatgtgtagaagacaagacaatcagtgaccaggaatcctttagggaagttattacggcaatggacgtgatgcagttcagcaaggaggaagttcgggaagtgtcgaggctgcttgctggtatactgcatcttgggaacatagaatttatcactgctggtggggcacaggtttccttcaaaacagctttgggcagatctgcggagttacttgggctggacccaacacagctcacagatgctttgacccagagatcaatgttcctcaggggagaagagatcctcacgcctctcaatgttcaacaggcagtagacagcagggactccctggccatggctctgtatgcgtgctgctttgagtgggtaatcaagaagatcaacagcaggatcaaaggcaatgaggacttcaagtctattggcatcctcgacatctttggatttgaaaactttgaggttaatcactttgaacagttcaatataaactatgcaaacgagaaacttcaggagtacttcaacaagcatattttttctttagaacaactagaatatagccgggaaggattagtgtgggaagatattgactggatagacaatggagaatgcctggacttgattgagaagaaacttggcctcctagcccttatcaatgaagaaagccattttcctcaagccacagacagcaccttattggagaagctacacagtcagcatgcgaataaccacttttatgtgaagcccagagttgcagttaacaattttggagtgaagcactatgctggagaggtgcaatatgatgtccgaggtatcttggagaagaacagagatacatttcgagatgaccttctcaatttgctaagagaaagccgatttgactttatctacgatctttttgaacatgtttcaagccgcaacaaccaggataccttgaaatgtggaagcaaacatcggcggcctacagtcagctcacagttcaaggactcactgcattccttaatggcaacgctaagctcctctaatcctttctttgttcgctgtatcaagccaaacatgcagaagatgccagaccagtttgaccaggcggttgtgctgaaccagctgcggtactcagggatgctggagactgtgagaatccgcaaagctgggtatgcggtccgaagaccctttcaggacttttacaaaaggtataaagtgctgatgaggaatctggctctgcctgaggacgtccgagggaagtgcacgagcctgctgcagctctatgatgcctccaacagcgagtggcagctggggaagaccaaggtctttcttcgagaatccttggaacagaaactggagaagcggagggaagaggaagtgagccacgcggccatggtgattcgggcccatgtcttgggcttcttagcacgaaaacaatacagaaaggtcctttattgtgtggtgataatacagaagaattacagagcattccttctgaggaggagatttttgcacctgaaaaaggcagccatagttttccagaagcaactcagaggtcagattgctcggagagtttacagacaattgctggcagagaaaagggagcaagaagaaaagaagaaacaggaagaggaagaaaagaagaaacgggaggaagaagaaagagaaagagagagagagcgaagagaagccgagctccgcgcccagcaggaagaagaaacgaggaagcagcaagaactcgaagccttgcagaagagccagaaggaagctgaactgacccgtgaactggagaaacagaaggaaaataagcaggtggaagagatcctccgtctggagaaagaaatcgaggacctgcagcgcatgaaggagcagcaggagctgtcgctgaccgaggcttccctgcagaagctgcaggagcggcgggaccaggagctccgcaggctggaggaggaagcgtgcagggcggcccaggagttcctcgagtccctcaatttcgacgagatcgacgagtgtgtccggaatatcgagcggtccctgtcggtgggaagcgaattttccagcgagctggctgagagcgcatgcgaggagaagcccaacttcaacttcagccagccctacccagaggaggaggtcgatgagggcttcgaagccgacgacgacgccttcaaggactcccccaaccccagcgagcacggccactcagaccagcgaacaagtggcatccggaccagcgatgactcttcagaggaggacccatacatgaacgacacggtggtgcccaccagccccagtgcggacagcacggtgctgctcgccccatcagtgcaggactccgggagcctacacaactcctccagcggcgagtccacctactgcatgccccagaacgctggggacttgccctccccagacggcgactacgactacgaccaggatgactatgaggacggtgccatcacttccggcagcagcgtgaccttctccaactcctacggcagccagtggtcccccgactaccgctgctctgtggggacctacaacagctcgggtgcctaccggttcagctctgagggggcgcagtcctcgtttgaagatagtgaagaggactttgattccaggtttgatacagatgatgagctttcataccggcgtgactctgtgtacagctgtgtcactctgccgtatttccacagctttctgtacatgaaaggtggcctgatgaactcttggaaacgccgctggtgcgtcctcaaggatgaaaccttcttgtggttccgctccaagcaggaggccctcaagcaaggctggctccacaaaaaaggggggggctcctccacgctgtccaggagaaattggaagaagcgctggtttgtcctccgccagtccaagctgatgtactttgaaaacgacagcgaggagaagctcaagggcaccgtagaagtgcgaacggcaaaagagatcatagataacaccaccaaggagaatgggatcgacatcattatggccgataggactttccacctgattgcagagtccccagaagatgccagccagtggttcagcgtgctgagtcaggtccacgcgtccacggaccaggagatccaggagatgcatgatgagcaggcaaacccacagaatgctgtgggcaccttggatgtggggctgattgattctgtgtgtgcctctgacagccctgatagacccaactcgtttgtgatcatcacggccaaccgggtgctgcactgcaacgccgacacgccggaggagatgcaccactggataaccctgctgcagaggtccaaaggggacaccagagtggagggccaggaattcatcgtgagaggatggttgcacaaagaggtgaagaacagtccaaagatgtcttcactgaaactgaagaaacggtggtttgtactcacccacaattccctggattactacaagagttcagagaagaacgcgctcaaactggggaccctggtcctcaacagcctctgctctgtcgtccccccagatgagaagatattcaaagagacaggctactggaacgtcaccgtgtacgggcgcaagcactgttaccggctctacaccaagctgctcaacgaggccacccggtggtccagtgccattcaaaacgtgactgacaccaaggccccgatcgacacccccacccagcagctgattcaagatatcaaggagaactgcctgaactcggatgtggtggaacagatttacaagcggaacccgatccttcgatacacccatcaccccttgcactccccgctcctgccccttccgtatggggacataaatctcaacttgctcaaagacaaaggctataccacccttcaggatgaggccatcaagatattcaattccctgcagcaactggagtccatgtctgacccaattccaataatccagggcatcctacagacagggcatgacctgcgacctctgcgggacgagctgtactgccagcttatcaaacagaccaacaaagtgccccaccccggcagtgtgggcaacctgtacagctggcagatcctgacatgcctgagctgcaccttcctgccgagtcgagggattctcaagtatctcaagttccatctgaaaaggatacgggaacagtttccaggaagcgagatggaaaaatacgctctcttcacttacgaatctcttaagaaaaccaaatgccgagagtttgtgccttcccgagatgaaatagaagctctgatccacaggcaggaaatgacatccacggtctattgccatggcggcggctcctgcaagatcaccatcaactcccacaccaccgctggggaggtggtggagaagctgatccgaggcctggccatggaggacagcaggaacatgtttgctttgtttgaatacaacggccacgtcgacaaagccattgaaagtcgaaccgtcgtagctgatgtcttagccaagtttgaaaagctggctgccacatccgaggttggggacctgccatggaaattctacttcaaactttactgcttcctggacacagacaacgtgccaaaagacagtgtggagtttgcatttatgtttgaacaggcccacgaagcggttatccatggccaccatccagccccggaagaaaacctccaggttcttgctgccctgcgactccagtatctgcagggggattatactctgcacgctgccatcccacctctcgaagaggtttattccctgcagagactcaaggcccgcatcagccagtcaaccaaaaccttcaccccttgtgaacggctggagaagaggcggacgagcttcctagaggggaccctgaggcggagcttccggacaggatccgtggtccggcagaaggtcgaggaggagcagatgctggacatgtggattaaggaagaagtctcctctgctcgagccagtatcattgacaagtggaggaaatttcagggaatgaaccaggaacaggccatggccaagtacatggccttgatcaaggagtggcctggctatggctcgacgctgtttgatgtggagtgcaaggaaggtggcttccctcaggaactctggttgggtgtcagcgcggacgccgtctccgtctacaagcgtggagagggaagaccactggaagtcttccagtatgaacacatcctctcttttggggcacccctggcgaatacgtataagatcgtggtcgatgagagggagctgctctttgaaaccagtgaggtggtggatgtggccaagctcatgaaagcctacatcagcatgatcgtgaagaagcgctacagcacgacacgctccgccagcagccagggcagctccaggtgaaggcgggacagagcccacctgtctttgctacctgaacgcaccaccctctggcctaggctggctccagtgtgccatgcccagccaaaacaaacacagagctgcccaggctttctggaagcttctggtctgagggaggtgtctccgaggatccttttgcctgccgccttcattgatcctgtattaagctgtcaactttaacagtctgcacagtttccaaagctttactactcttagaggacacatgccttaaaaaaggaggggaggaaccacgctgccaccaaagcagccggaagtgccttaacttgtggaaccaacactaatcgaccgtaactgtgctactgaagggaactgcctttcccccttctgggggagacttaacagagcgtggaaggggggcattctctgtcaatgatgcactaacctcccaacctgatttccccgaatctgagggaaggtgagggagtgggaagggggatggagagctcgaggggacagtgtgtttgagctggagtgctgcgggcagcctttctcatggaatgacatgaatcaacttttttctttgtttcatcttttaagtgtacgtgcttgcctgttcgtgcatgtgttcataaactcaacactttaatcatggtttcatgagcattaaaaagcaaagggaaaaaggatgtgtaatggtgtacacagtctgtatattttaataatgcagagctatagtctcaattgttactttataaggtggttttattaacaaacccaaatcctggattttcctgtctttgctgtattttgaaaaacacgtgttgactccattgttttacatgtagcaaagtctgccatctgtgtctgctgtattataaacagataagcagcctacaagataactgtatttataaaccactcttcaacagctggctccagtgctggttttagaacaagaatgaagtcattttggagtctttcatgtctaaaagatttaagttaaaaacaaagtgttacttggaaggttagcttctatcattctggatagattacagatataataaccatgttgactatgggggagagacgctgcattccagaaacgtcttaacacttgagtgaatcttcaaaggaccctgacattaaatgctgaggctttaatacacacatattttatcccaagtttataatggtggtctgaacaaggcacctgtaaataaatcagcatttatgaccagaagaaaaataatctggtcttggactttttatttttatatggaaaagttttaaggacttgggccaactaagtctacccacacgaaaaaagaaatttgccttgtccctttgtgtacaaccatgcaaaactgtttgttggctcacagaagttctgacaataaaagatactagctaacacgctgtgtgtttcc

SEQ ID NO: 156876 - DNA, 2910 bp, Homo sapiens
  Payload ID: 10749
  Gene Symbol: MYO10
  Gene Name: myosin X
  ENST ID: ENST00000513882
  CDS Start-End: 420-2910
aatctgtgatttaggagtgagttctttccatgcttctcctctcctcttttcccttcctagcaagaggagaaaaaaagcaagtaatttaatgtaatctgatttttttttttttttttttttttacttcatggctttttgacattggaagagaaatgagccatctttctagaggagctttagtgtcatgtgtgcttttcttattgattgggaataacttaaaaagactcctcagaactccgaatgggatatttaatttgttagaacacgagtctgcaccactatctgttgacggtgaaatgaatttactaagtggataatttgctgagcattagctgaccctgacgtggcggaacgaaggtctctggagatggttcatggtggaaatctgggcttgatgggtcggtaatgagacttcagcgatgacatctttaccaaggctgaggcttaacactcgggaccaagcgattcaactgggaacacgggtctggctgagagaaaatggccagcattttccaagtactgtaaattcctgtgcagaaggcatcgtcgtcttccggacagactatggtcaggtattcacttacaagcagagcacaattacccaccagaaggtgactgctatgcaccccacgaacgaggagggcgtggatgacatggcgtccttgacagagctccatggcggctccatcatgtataacttattccagcggtataagagaaatcaaatatatacctacatcggctccatcctggcctccgtgaacccctaccagcccatcgccgggctgtacgagcctgccaccatggagcagtacagccggcgccacctgggcgagctgcccccgcacatcttcgccatcgccaacgagtgctaccgctgcctgtggaagcgccacgacaaccagtgcatcctcatcagtggtgaaagtggggcaggtaaaaccgaaagcactaaattgatcctcaagtttctgtcagtcatcagtcaacagtctttggaattgtccttaaaggagaagacatcctgtgttgaacgagctattcttgaaagcagccccatcatggaagctttcggcaatgcgaagaccgtgtacaacaacaactctagtcgctttgggaagtttgttcagctgaacatctgtcagaaaggaaatattcagggcgggagaattgtagattatttattagaaaaaaaccgagtagtaaggcaaaatcccggggaaaggaattatcacatattttatgcactgctggcagggctggaacatgaagaaagagaagaattttatttatctacgccagaaaactaccactacttgaatcagtctggatgtgtagaagacaagacaatcagtgaccaggaatcctttagggaagttattacggcaatggacgtgatgcagttcagcaaggaggaagttcgggaagtgtcgaggctgcttgctggtatactgcatcttgggaacatagaatttatcactgctggtggggcacaggtttccttcaaaacagctttgggcagatctgcggagttacttgggctggacccaacacagctcacagatgctttgacccagagatcaatgttcctcaggggagaagagatcctcacgcctctcaatgttcaacaggcagtagacagcagggactccctggccatggctctgtatgcgtgctgctttgagtgggtaatcaagaagatcaacagcaggatcaaaggcaatgaggacttcaagtctattggcatcctcgacatctttggatttgaaaactttgaggttaatcactttgaacagttcaatataaactatgcaaacgagaaacttcaggagtacttcaacaagcatattttttctttagaacaactagaatatagccgggaaggattagtgtgggaagatattgactggatagacaatggagaatgcctggacttgattgagaagaaacttggcctcctagcccttatcaatgaagaaagccattttcctcaagccacagacagcaccttattggagaagctacacagtcagcatgcgaataaccacttttatgtgaagcccagagttgcagttaacaattttggagtgaagcactatgctggagaggtgcaatatgatgtccgaggtatcttggagaagaacagagatacatttcgagatgaccttctcaatttgctaagagaaagccgatttgactttatctacgatctttttgaacatgtttcaagccgcaacaaccaggataccttgaaatgtggaagcaaacatcggcggcctacagtcagctcacagttcaaggactcactgcattccttaatggcaacgctaagctcctctaatcctttctttgttcgctgtatcaagccaaacatgcagaagatgccagaccagtttgaccaggcggttgtgctgaaccagctgcggtactcagggatgctggagactgtgagaatccgcaaagctgggtatgcggtccgaagaccctttcaggacttttacaaaaggtataaagtgctgatgaggaatctggctctgcctgaggacgtccgagggaagtgcacgagcctgctgcagctctatgatgcctccaacagcgagtggcagctggggaagaccaaggtctttcttcgagaatccttggaacagaaactggagaagcggagggaagaggaagtgagccacgcggccatggtgattcgggcccatgtcttgggcttcttagcacgaaaacaatacagaaaggtcctttattgtgtggtgataatacagaagaattacagagcattccttctgaggaggagatttttgcacctgaaaaaggcagccatagttttccagaagcaactcagaggtcagattgctcggagagtttacagacaattgctggcagagaaaagggagcaagaag

SEQ ID NO: 156877 - DNA, 4839 bp, Homo sapiens
  Payload ID: 10749
  Gene Symbol: MYO10
  Gene Name: myosin X
  ENST ID: ENST00000515803
  CDS Start-End: 334-4527
ttctttctaatgccaggcaatcaaggctgcacttgctacccttctgcaggaagcttcccagccagcacagtttctctctgccctgcctcttaatccccacccctgctcccaggcctgggacactgctaaccacccctccttcctgacacctctctgaccacccctcctcctcttgactggttcctctggaggtaggcatggcctcgggttctgcccccagtttctcactcgctgggctccaaaagaaacactggcttctctccttcagctccaggctagatgccagaccagtttgaccaggcggttgtgctgaaccagctgcggtactcagggatgctggagactgtgagaatccgcaaagctgggtatgcggtccgaagaccctttcaggacttttacaaaaggtataaagtgctgatgaggaatctggctctgcctgaggacgtccgagggaagtgcacgagcctgctgcagctctatgatgcctccaacagcgagtggcagctggggaagaccaaggtctttcttcgagaatccttggaacagaaactggagaagcggagggaagaggaagtgagccacgcggccatggtgattcgggcccatgtcttgggcttcttagcacgaaaacaatacagaaaggtcctttattgtgtggtgataatacagaagaattacagagcattccttctgaggaggagatttttgcacctgaaaaaggcagccatagttttccagaagcaactcagaggtcagattgctcggagagtttacagacaattgctggcagagaaaagggagcaagaagaaaagaagaaacaggaagaggaagaaaagaagaaacgggaggaagaagaaagagaaagagagagagagcgaagagaagccgagctccgcgcccagcaggaagaagaaacgaggaagcagcaagaactcgaagccttgcagaagagccagaaggaagctgaactgacccgtgaactggagaaacagaaggaaaataagcaggtggaagagatcctccgtctggagaaagaaatcgaggacctgcagcgcatgaaggagcagcaggagctgtcgctgaccgaggcttccctgcagaagctgcaggagcggcgggaccaggagctccgcaggctggaggaggaagcgtgcagggcggcccaggagttcctcgagtccctcaatttcgacgagatcgacgagtgtgtccggaatatcgagcggtccctgtcggtgggaagcgaattttccagcgagctggctgagagcgcatgcgaggagaagcccaacttcaacttcagccagccctacccagaggaggaggtcgatgagggcttcgaagccgacgacgacgccttcaaggactcccccaaccccagcgagcacggccactcagaccagcgaacaagtggcatccggaccagcgatgactcttcagaggaggacccatacatgaacgacacggtggtgcccaccagccccagtgcggacagcacggtgctgctcgccccatcagtgcaggactccgggagcctacacaactcctccagcggcgagtccacctactgcatgccccagaacgctggggacttgccctccccagacggcgactacgactacgaccaggatgactatgaggacggtgccatcacttccggcagcagcgtgaccttctccaactcctacggcagccagtggtcccccgactaccgctgctctgtggggacctacaacagctcgggtgcctaccggttcagctctgagggggcgcagtcctcgtttgaagatagtgaagaggactttgattccaggtttgatacagatgatgagctttcataccggcgtgactctgtgtacagctgtgtcactctgccgtatttccacagctttctgtacatgaaaggtggcctgatgaactcttggaaacgccgctggtgcgtcctcaaggatgaaaccttcttgtggttccgctccaagcaggaggccctcaagcaaggctggctccacaaaaaaggggggggctcctccacgctgtccaggagaaattggaagaagcgctggtttgtcctccgccagtccaagctgatgtactttgaaaacgacagcgaggagaagctcaagggcaccgtagaagtgcgaacggcaaaagagatcatagataacaccaccaaggagaatgggatcgacatcattatggccgataggactttccacctgattgcagagtccccagaagatgccagccagtggttcagcgtgctgagtcaggtccacgcgtccacggaccaggagatccaggagatgcatgatgagcaggcaaacccacagaatgctgtgggcaccttggatgtggggctgattgattctgtgtgtgcctctgacagccctgatagacccaactcgtttgtgatcatcacggccaaccgggtgctgcactgcaacgccgacacgccggaggagatgcaccactggataaccctgctgcagaggtccaaaggggacaccagagtggagggccaggaattcatcgtgagaggatggttgcacaaagaggtgaagaacagtccaaagatgtcttcactgaaactgaagaaacggtggtttgtactcacccacaattccctggattactacaagagttcagagaagaacgcgctcaaactggggaccctggtcctcaacagcctctgctctgtcgtccccccagatgagaagatattcaaagagacaggctactggaacgtcaccgtgtacgggcgcaagcactgttaccggctctacaccaagctgctcaacgaggccacccggtggtccagtgccattcaaaacgtgactgacaccaaggccccgatcgacacccccacccagcagctgattcaagatatcaaggagaactgcctgaactcggatgtggtggaacagatttacaagcggaacccgatccttcgatacacccatcaccccttgcactccccgctcctgccccttccgtatggggacataaatctcaacttgctcaaagacaaaggctataccacccttcaggatgaggccatcaagatattcaattccctgcagcaactggagtccatgtctgacccaattccaataatccagggcatcctacagacagggcatgacctgcgacctctgcgggacgagctgtactgccagcttatcaaacagaccaacaaagtgccccaccccggcagtgtgggcaacctgtacagctggcagatcctgacatgcctgagctgcaccttcctgccgagtcgagggattctcaagtatctcaagttccatctgaaaaggatacgggaacagtttccaggaagcgagatggaaaaatacgctctcttcacttacgaatctcttaagaaaaccaaatgccgagagtttgtgccttcccgagatgaaatagaagctctgatccacaggcaggaaatgacatccacggtctattgccatggcggcggctcctgcaagatcaccatcaactcccacaccaccgctggggaggtggtggagaagctgatccgaggcctggccatggaggacagcaggaacatgtttgctttgtttgaatacaacggccacgtcgacaaagccattgaaagtcgaaccgtcgtagctgatgtcttagccaagtttgaaaagctggctgccacatccgaggttggggacctgccatggaaattctacttcaaactttactgcttcctggacacagacaacgtgccaaaagacagtgtggagtttgcatttatgtttgaacaggcccacgaagcggttatccatggccaccatccagccccggaagaaaacctccaggttcttgctgccctgcgactccagtatctgcagggggattatactctgcacgctgccatcccacctctcgaagaggtttattccctgcagagactcaaggcccgcatcagccagtcaaccaaaaccttcaccccttgtgaacggctggagaagaggcggacgagcttcctagaggggaccctgaggcggagcttccggacaggatccgtggtccggcagaaggtcgaggaggagcagatgctggacatgtggattaaggaagaagtctcctctgctcgagccagtatcattgacaagtggaggaaatttcagggaatgaaccaggaacaggccatggccaagtacatggccttgatcaaggagtggcctggctatggctcgacgctgtttgatgtggagtgcaaggaaggtggcttccctcaggaactctggttgggtgtcagcgcggacgccgtctccgtctacaagcgtggagagggaagaccactggaagtcttccagtatgaacacatcctctcttttggggcacccctggcgaatacgtataagatcgtggtcgatgagagggagctgctctttgaaaccagtgaggtggtggatgtggccaagctcatgaaagcctacatcagcatgatcgtgaagaagcgctacagcacgacacgctccgccagcagccagggcagctccaggtgaaggcgggacagagcccacctgtctttgctacctgaacgcaccaccctctggcctaggctggctccagtgtgccatgcccagccaaaacaaacacagagctgcccaggctttctggaagcttctggtctgagggaggtgtctccgaggatccttttgcctgccgccttcattgatcctgtattaagctgtcaactttaacagtctgcacagtttccaaagctttactactcttagaggacacatgccttaaaaaaggaggggaggaaccacgctgccaccaaagcagccggaagtgccttaacttgtggaacc

SEQ ID NO: 156878 - DNA, 1677 bp, Homo sapiens
  Payload ID: 10749
  Gene Symbol: MYO10
  Gene Name: myosin X
  Uniprot ID: Q9HD67
  ENST ID: ENST00000507288
  CDS Start-End: 452-745
cggcgcgggactgctcacctccaagcgctcgcgcggggatcgcggctcctgctcactttgcggcccgctgtcctcctgcccgccccgagggcccccggccggagcgcagagggagggggccgcgctcgccagcaccccgccgccttcccccgcctgggggaagaatgtgccaccagctgttctccgcttgcgagcgctgcgcccagtagtgaggaacttggaggaagaagagacaaaggctgccgtcgggacgggcgagttagggacttgggtttgggcgaacaaaaggtgagaaggacaagaagggaccgggcgatggcagcaggggagccccgcgggcgcgcgtcctcgggagtggcgccgtgacacgcatggtttccccggacccgcggcggcgctgacttccgcgagtcggagcggcactcggcgagtccgggactgcgctggaacaatggataacttcttcaccgagggaacacgggtctggctgagagaaaatggccagcattttccaagtactgtaaattcctgtgcagaaggcatcgtcgtcttccggacagactatggtcaggtattcacttacaagcagagcacaattacccaccagaaggtgactgctatgcaccccacgaacgaggagggcgtggatgacatggcgtccttgacagagctccatggcggctccatcatgtataacttattccagcggtataagagaaatcaaatatatgtgcagataggttgaatatacctaatccaaaaactccaaatccacaatgcttcaaaatccaagacattttgcatgctgatgtgttgctgaaaggaaatgctcattgggaatattttggattttgaatttaacttaaattatgcttaaccagtacatagtatgcaaatattccaaaatccaaaaaatattgaaatccacaacactttgtgtcccaggcatttcacacaagggatgctcaatctatattttgaaactcatactttgctgtcattagagaaaaaacacaagtttgtttttttttgtaatagtgtcttgctatgttgcccaggctagactcaaactcctgagctaaagtgatcctcctgccttagcctcctgagtacctgggattacaggcacgtgccagcatgcccacctagacacaagttgttattgtacattttcaatagtcaagaaaaagtaagtaaattagaaggaaaaaaaaactacacaagggtttaaaaggcagacccttttaaaaagttttttatttattttcctcttttcatgataataatgttaaacctgacagctaaattgccaatacatactatgaataagatcttggtcttggaataaggtcatattcttcctttctaaggggaaacccgtaggatttttgtgcatccaatttgcagttcagttcagttaattatgccattgtagaccttccgtttgaggcttgcaaaattgtatattatccataaagcagccaccatgattttttaaaattatcattgaagccattcaccggagatgtcagcgtctgttggactccgctcacatcgagacaagaccgccacctgtcagaacagccactgcttctccacatttgatcctggctcggagcaatgcctgtctatatctttaaaagagaaaaaaaataaaatgacttgaattgttccaga

SEQ ID NO: 156879 - DNA, 766 bp, Homo sapiens
  Payload ID: 10749
  Gene Symbol: MYO10
  Gene Name: myosin X
  ENST ID: ENST00000502436
  CDS Start-End: 131-766
gcaggggagccccgcgggcgcgcgtcctcgggagtggcgccgtgacacgcatggtttccccggacccgcggcggcgctgacttccgcgagtcggagcggcactcggcgagtccgggactgcgctggaacaatggataacttcttcaccgaggtattcacttacaagcagagcacaattacccaccagaaggtgactgctatgcaccccacgaacgaggagggcgtggatgacatggcgtccttgacagagctccatggcggctccatcatgtataacttattccagcggtataagagaaatcaaatatatacctacatcggctccatcctggcctccgtgaacccctaccagcccatcgccgggctgtacgagcctgccaccatggagcagtacagccggcgccacctgggcgagctgcccccgcacatcttcgccatcgccaacgagtgctaccgctgcctgtggaagcgccacgacaaccagtgcatcctcatcagtggtgaaagtggggcaggtaaaaccgaaagcactaaattgatcctcaagtttctgtcagtcatcagtcaacagtctttggaattgtccttaaaggagaagacatcctgtgttgaacgagctattcttgaaagcagccccatcatggaagctttcggcaatgcgaagaccgtgtacaacaacaactctagtcgctttgggaagtttgttcagctgaacatctgtcagaaaggaaatattcagggcgggagaattgtagattatttatta

SEQ ID NO: 156880 - DNA, 1640 bp, Homo sapiens
  Payload ID: 10750
  Gene Symbol: MYO19
  Gene Name: myosin XIX
  Uniprot ID: Q96H55
  ENST ID: ENST00000621344
  CDS Start-End: 404-1357
ctcttttctctcctgcccgtgttcttcccgccgcctgacctggcccgcccgcctttccagtctggccgggcgggggcctgaagcacggcggctcgggccgtgggaccgtgttcacaccctttccagaaattcttggctggtaaccgcgaaaccgactggagcaggagctgggagaactggagaaaactgctctaatctcacttgactccagctaggagctgatgctgcatcgtaataacatttgcagagcgctttcacaggcgctggagtgacttgtctgagattcctccagaactgagccctttgttggaaccataccccagcccatggtcccatgactaggtggatagtactccttgtacctcctgcaacccagaaccctggctgaccactttgaaggaggatgctccagcaggtcaatggccacaatccggggtctgatggccaagccagggagtacctcagagaagacctgcaggagttcctgggtggggaggtcctgctgtacaaactggatgacctcaccagggtgaatcctgtgacactagagacagtcctgaggtgcctgcaggcccggtacatggcagacacattctacaccaatgctggctgcaccctggtagccttgaaccccttcaagcctgttcctcagctctactcgcccgagctaatgagagagtaccatgctgcgcctcagccccagaaactgaagccccatgtgttcactgtgggtgaacagacctacaggaatgtcaagagcctgattgaaccagtcaaccagtctattgttgtcagtggagagagtggtgctggaaagacatggacgtctcgctgcctaatgaagttctatgctgtggtggccacctcacctgcatcttgggagagccacaagattgcagagaggatagaacagaggatcctgaactccaaccctgtcatggaagcttttgggaatgcgtgtacactgaggaataacaacagcagtcgctttgggaagttcatccagctccagctgaacagggctcagcaaatgactggagccgcagtccagacctacctcctagagaaaactcgagtggcctgccaggcttccagtgagaggaacttccacatcttctatcagatttgcaaaggagccagtgaggacgagaggctccagtggcaccttcctgagggagctgccttctcctggctgcccaacccagagaggagcttagaagaggattgttttgaggtgaccagagaggccatgctccatttgggcattgacacccctacccagaacaacatctttaaggtcagaagaaaagccacgccacttaagtttggcagagatgacgggcagccctttgcatagagcttttccctggacttggagttggtctttccctgaggatctaggactttgggcccttctgtgctacctccaaggaatcagtcacctctgttctgctgagtctggagaccaggtggtggggtggacggggcataaggaagagtgatgcatacacagtgctagagtacagaatgcagtaagtgatccatgggggcagagagcaaggtaccgcatgatcagaagagagaactagtgctaccgccttgcttgtctagtacattaaaacttacaagtcatgttcaca

SEQ ID NO: 156881 - DNA, 3271 bp, Homo sapiens
  Payload ID: 10750
  Gene Symbol: MYO19
  Gene Name: myosin XIX
  Uniprot ID: Q96H55
  ENST ID: ENST00000613929
  CDS Start-End: 463-2775
cgacggggtgcggttcggcgctcccaggttcctttcctcactgcacgctcttgcccctcctcttttctctcctgcccgtgttcttcccgccgcctgacctggcccgcccgcctttccagtctggccgggcgggggcctgaagcacggcggctcgggccgtgggaccgtgttcacaccctttccagaaattcttggctggtaaccgcgaaaccgactggagcaggagctgggagaactggagaaaactgctctaatctcacttgactccagctaggagctgatgctgcatcgtaataacatttgcagagcgctttcacaggcgctggagtgacttgtctgagattcctccagaactgagccctttgttggaaccataccccagcccatggtcccatgactaggtggatagtactccttgtacctcctgcaacccagaaccctggctgaccactttgaaggaggatgctccagcaggtcaatggccacaatccggggtctgatggccaagccagggagtacctcagagaagacctgcaggagttcctgggtggggaggtcctgctgtacaaactggatgacctcaccagggtgaatcctgtgacactagagacagtcctgaggtgcctgcaggcccggtacatggcagacacattctacaccaatgctggctgcaccctggtagccttgaaccccttcaagcctgttcctcagctctactcgcccgagctaatgagagagtaccatgctgcgcctcagccccagaaactgaagccccatgtgttcactgtgggtgaacagacctacaggaatgtcaagagcctgattgaaccagtcaaccagtctattgttgtcagtggagagagtggtgctggaaagacatggacgtctcgctgcctaatgaagttctatgctgtggtggccacctcacctgcatcttgggagagccacaagattgcagagaggatagaacagaggatcctgaactccaaccctgtcatggaagcttttgggaatgcgtgtacactgaggaataacaacagcagtcgctttgggaagttcatccagctccagctgaacagggctcagcaaatgactggagccgcagtccagacctacctcctagagaaaactcgagtggcctgccaggcttccagtgagaggaacttccacatcttctatcagatttgcaaaggagccagtgaggacgagaggctccagtggcaccttcctgagggagctgccttctcctggctgcccaacccagagaggagcttagaagaggattgttttgaggtgaccagagaggccatgctccatttgggcattgacacccctacccagaacaacatctttaaggtcctagctggactgctgcaccttggcaatatccagtttgctgcctccgaggatgaagcccagccctgccagccgatggatgatgccaagtactctgtcaggacggcagcctcgctgctggggctcccagaggacgtgctgctggagatggtgcagattagaaccatcagggcaggcagacagcagcaggtgttccggaagccctgcgcccgagccgagtgtgacacccgtagagactgcctggccaaactgatctatgcgcggttgtttgactggctggtatcagtgatcaacagcagcatctgtgcagacaccgactcgtggaccactttcataggcctgctggatgtgtatggatttgaatcatttcctgacaacagtctggaacagttgtgcatcaactacgccaatgagaagctccagctggaggcctgtggcctcgtggagaccatccatatcagtgctgctggcttccccatccgggtctctcaccgaaactttgtagaacgatacaagttactaagaaggcttcatccttgcacatcctctggccccgacagcccatatcctgccaaagggctccctgaatggtgtccacacagcgaggaagccacgcttgaacctctcatccaggacattctccacactctgccggtcctaactcaggcagcagccataactggtgactcggctgaggccatgccagcccccatgcactgtggcaggaccaaggtgttcatgactgactctatgctggagcttctggaatgtgggcgtgcccgggtgctggagcagtgtgcccgctgcatccagggtggctggaggcgacaccggcaccgagagcaggagcggcagtggcgggccgtcatgctcatccaggcagccattcgttcctggttaactcggaaacacatccagaggctgcatgcagctgccacagtcatcaagcgtgcatggcagaagtggagaatcagaatggcctgccttgctgctaaagagctggatggtgtggaagaaaaacacttctctcaagctccctgttccctgagcacctcgccgctgcagaccaggctcctggaggcaataatccgcctctggcccctgggactggtcctggccaatacggctatgggtgtaggcagctttcagaggaaattagtggtctgggcttgcctccagctccccaggggcagccccagtagctacactgtccagacagcacaagaccaggctggtgtcacgtccatccgagcgctgcctcagggatcgataaagtttcactgcagaaagtctccactgcggtatgctgacatctgccctgaaccttcaccctacagcattacaggctttaatcagattctgctggaaagacacaggctgatccacgtgacctcttctgccttcactgggctggggtgatccttggtgcctttgtttccacaaggccttttcctgccccctgccttgccaaagacatttaatcagcacacagctgccagactattcccacagtgctccaaatgcacatgaacaacagtgacggctccagccttcgacccagagccccgtgcccagtgcgtcagtgggcctggggttccaggctacatcaagcactgatggtgtcagggctggtagttaccaaatcagggttaagaaacatcagggccacatttcactaccttcacagatcaaactcagcagcagtcatgactgtctgtcactacactggggatcccaattccacataagcacttttggaagaaaacagccaaagttggcctaaaattggcgctggaatttgggctgggaaaaatcttgtggttatttcctttaaaaaggaacaaaactttagtatttaattagttgatttatttaatgtaatttcaaacaattaaattatgaataatgcaatgta

SEQ ID NO: 156882 - DNA, 963 bp, Homo sapiens
  Payload ID: 10750
  Gene Symbol: MYO19
  Gene Name: myosin XIX
  ENST ID: ENST00000616159
  CDS Start-End: 434-963
agtctggccgggcgggggcctgaagcacggcggctcgggccgtgggaccggtgagtgtcaacccgaacctatatctgaagcccttcagacgcggaaggggcttgggaggccagtttgccccgcagcggtgaggaagaatgttcacaccctttccagaaattcttggctggtaaccgcgaaaccgactggagcaggagctgggagaactggagaaaactgctctaatctcacttgactccagctaggagctgatgctgcatcgtaataacatttgcagagcgctttcacaggcgctggagtgacttgtctgagattcctccagaactgagccctttgttggaaccataccccagcccatggtcccatgactaggtggatagtactccttgtacctcctgcaacccagaaccctggctgaccactttgaaggaggatgctccagcaggtcaatggccacaatccggggtctgatggccaagccagggagtacctcagagaagacctgcaggagttcctgggtggggaggtcctgctgtacaaactggatgacctcaccagggtgaatcctgtgacactagagacagtcctgaggtgcctgcaggcccggtacatggcagacacattctacaccaatgctggctgcaccctggtagccttgaaccccttcaagcctgttcctcagctctactcgcccgagctaatgagagagtaccatgctgcgcctcagccccagaaactgaagccccatgtgttcactgtgggtgaacagacctacaggaatgtcaagagcctgattgaaccagtcaaccagtctattgttgtcagtggagagagtggtgctggaaagacatggacgtctcgctgcctaatgaagttctatgctgtggtggccacctcacctgcatcttgggagagccacaagattgcagagaggatagaacagaggatcctgaactccaaccc

SEQ ID NO: 156883 - DNA, 3271 bp, Homo sapiens; identical to SEQ ID NO: 156881
  Payload ID: 10750
  Gene Symbol: MYO19
  Gene Name: myosin XIX
  Uniprot ID: Q96H55
  ENST ID: ENST00000610930
  CDS Start-End: 463-2775

SEQ ID NO: 156884 - DNA, 580 bp, Homo sapiens
  Payload ID: 10750
  Gene Symbol: MYO19
  Gene Name: myosin XIX
  ENST ID: ENST00000612097
  CDS Start-End: 1-47
acacccctacccagaacaacatctttaagagcagcaggaggggatagataggatggcctggcagtcgagaaagggaggccacttcagggaggtagcaatgcagtggaaagtgaccctcacctccagatgggggctgctcagacactgccaggtcctagctggactgctgcaccttggcaatatccagtttgctgcctccgaggatgaagcccagccctgccagccgatggatgatgccaagtactctgtcaggacggcagcctcgctgctggggctcccagaggacgtgctgctggagatggtgcagattagaaccatcagggcaggcagacagcagcaggtgttccggaagccctgcgcccgagccgagtgtgacacccgtagagactgcctggccaaactgatctatgcgcggttgtttgactggctggtatcagtgatcaacagcagcatctgtgcagacaccgactcgtggaccactttcataggcctgctggatgtgtatggatttgaatcatttcctgacaacagtctggaacagttgtgcatcaactacgccaatgagaagctgcagcagcat

SEQ ID NO: 156885 - DNA, 4054 bp, Homo sapiens
  Payload ID: 10750
  Gene Symbol: MYO19
  Gene Name: myosin XIX
  Uniprot ID: Q96H55
  ENST ID: ENST00000614623
  CDS Start-End: 524-3436
gtgctcgccccgcccctagggaggagccggccgacccccggccacttagcagtgccgcagccgacggggtgcggttcggcgctcccaggttcctttcctcactgcacgctcttgcccctcctcttttctctcctgcccgtgttcttcccgccgcctgacctggcccgcccgcctttccagtctggccgggcgggggcctgaagcacggcggctcgggccgtgggaccgtgttcacaccctttccagaaattcttggctggtaaccgcgaaaccgactggagcaggagctgggagaactggagaaaactgctctaatctcacttgactccagctaggagctgatgctgcatcgtaataacatttgcagagcgctttcacaggcgctggagtgacttgtctgagattcctccagaactgagccctttgttggaaccataccccagcccatggtcccatgactaggtggatagtactccttgtacctcctgcaacccagaaccctggctgaccactttgaaggaggatgctccagcaggtcaatggccacaatccggggtctgatggccaagccagggagtacctcagagaagacctgcaggagttcctgggtggggaggtcctgctgtacaaactggatgacctcaccagggtgaatcctgtgacactagagacagtcctgaggtgcctgcaggcccggtacatggcagacacattctacaccaatgctggctgcaccctggtagccttgaaccccttcaagcctgttcctcagctctactcgcccgagctaatgagagagtaccatgctgcgcctcagccccagaaactgaagccccatgtgttcactgtgggtgaacagacctacaggaatgtcaagagcctgattgaaccagtcaaccagtctattgttgtcagtggagagagtggtgctggaaagacatggacgtctcgctgcctaatgaagttctatgctgtggtggccacctcacctgcatcttgggagagccacaagattgcagagaggatagaacagaggatcctgaactccaaccctgtcatggaagcttttgggaatgcgtgtacactgaggaataacaacagcagtcgctttgggaagttcatccagctccagctgaacagggctcagcaaatgactggagccgcagtccagacctacctcctagagaaaactcgagtggcctgccaggcttccagtgagaggaacttccacatcttctatcagatttgcaaaggagccagtgaggacgagaggctccagtggcaccttcctgagggagctgccttctcctggctgcccaacccagagaggagcttagaagaggattgttttgaggtgaccagagaggccatgctccatttgggcattgacacccctacccagaacaacatctttaaggtcctagctggactgctgcaccttggcaatatccagtttgctgcctccgaggatgaagcccagccctgccagccgatggatgatgccaagtactctgtcaggacggcagcctcgctgctggggctcccagaggacgtgctgctggagatggtgcagattagaaccatcagggcaggcagacagcagcaggtgttccggaagccctgcgcccgagccgagtgtgacacccgtagagactgcctggccaaactgatctatgcgcggttgtttgactggctggtatcagtgatcaacagcagcatctgtgcagacaccgactcgtggaccactttcataggcctgctggatgtgtatggatttgaatcatttcctgacaacagtctggaacagttgtgcatcaactacgccaatgagaagctgcagcagcattttgtggctcactacctaagggcccagcaggaggaatacgcagttgagggcctggagtggtcattcatcaactaccaggacaaccagccctgtttggatctcattgagggaagccccatcagcatctgctccctcataaatgaggaatgccgcctcaatcgacccagcagcgcagcccagctccagacacgcattgagactgccctggcaggcagcccctgcctgggccacaataagctcagccgggagcccagcttcattgtggtgcattatgcggggcctgtgcggtaccacacagcaggcctggtggagaagaacaaggaccctatcccacctgagctgaccaggctcctgcagcaatcccaggaccccctgctcatggggctgtttcctactaaccccaaagagaagacccaggaggaaccccctggccagagcagggcccctgtgttgaccgtggtgtccaagttcaaggcctcactggagcagcttctgcaggtcctacacagcaccacgccccactacattcgctgcatcaagcccaacagccagggccaggcgcagacctttctccaagaggaggtcctgagccagctggaggcctgtggcctcgtggagaccatccatatcagtgctgctggcttccccatccgggtctctcaccgaaactttgtagaacgatacaagttactaagaaggcttcatccttgcacatcctctggccccgacagcccatatcctgccaaagggctccctgaatggtgtccacacagcgaggaagccacgcttgaacctctcatccaggacattctccacactctgccggtcctaactcaggcagcagccataactggtgactcggctgaggccatgccagcccccatgcactgtggcaggaccaaggtgttcatgactgactctatgctggagcttctggaatgtgggcgtgcccgggtgctggagcagtgtgcccgctgcatccagggtggctggaggcgacaccggcaccgagagcaggagcggcagtggcgggccgtcatgctcatccaggcagccattcgttcctggttaactcggaaacacatccagaggctgcatgcagctgccacagtcatcaagcgtgcatggcagaagtggagaatcagaatggcctgccttgctgctaaagagctggatggtgtggaagaaaaacacttctctcaagctccctgttccctgagcacctcgccgctgcagaccaggctcctggaggcaataatccgcctctggcccctgggactggtcctggccaatacggctatgggtgtaggcagctttcagaggaaattagtggtctgggcttgcctccagctccccaggggcagccccagtagctacactgtccagacagcacaagaccaggctggtgtcacgtccatccgagcgctgcctcagggatcgataaagtttcactgcagaaagtctccactgcggtatgctgacatctgccctgaaccttcaccctacagcattacaggctttaatcagattctgctggaaagacacaggctgatccacgtgacctcttctgccttcactgggctggggtgatccttggtgcctttgtttccacaaggccttttcctgccccctgccttgccaaagacatttaatcagcacacagctgccagactattcccacagtgctccaaatgcacatgaacaacagtgacggctccagccttcgacccagagccccgtgcccagtgcgtcagtgggcctggggttccaggctacatcaagcactgatggtgtcagggctggtagttaccaaatcagggttaagaaacatcagggccacatttcactaccttcacagatcaaactcagcagcagtcatgactgtctgtcactacactggggatcccaattccacataagcacttttggaagaaaacagccaaagttggcctaaaattggcgctggaatttgggctgggaaaaatcttgtggttatttcctttaaaaaggaacaaaactttagtatttaattagttgatttatttaatgtaatttcaaacaattaaattatgaataatgcaatgtacagtagaatcacgttttgattttattaacactgaccaagtttaactccatatgaagtgtaagcttgatatcgtttatgatgtctatcaactgtaccaaaagtaaaacatttaaaaacaatca

SEQ ID NO: 156886 - DNA, 1186 bp, Homo sapiens
  Payload ID: 10750
  Gene Symbol: MYO19
  Gene Name: myosin XIX
  ENST ID: ENST00000620640
  CDS Start-End: 432-983
ctttcctcactgcacgctcttgcccctcctcttttctctcctgcccgtgttcttcccgccgcctgacctggcccgcccgcctttccagtctggccgggcgggggcctgaagcacggcggctcgggccgtgggaccgtgttcacaccctttccagaaattcttggctggtaaccgcgaaaccgactggagcaggagctgggagaactggagaaaactgctctaatctcacttgactccagctaggagctgatgctgcatcgtaataacatttgcagagcgctttcacaggcgctggagtgacttgtctgagattcctccagaactgagccctttgttggaaccataccccagcccatggtcccatgactaggtggatagtactccttgtacctcctgcaacccagaaccctggctgaccactttgaaggaggatgctccagcagacatggacgtctcgctgcctaatgaagttctatgctgtggtggccacctcacctgcatcttgggagagccacaagattgcagagaggatagaacagaggatcctgaactccaaccctgtcatggaagcttttgggaatgcgtgtacactgaggaataacaacagcagtcgctttgggaagttcatccagctccagctgaacagggctcagcaaatgactggagccgcagtccagacctacctcctagagaaaactcgagtggcctgccaggcttccagtgagaggaacttccacatcttctatcagatttgcaaaggagccagtgaggacgagaggctccagtggcaccttcctgagggagctgccttctcctggctgcccaacccagagaggagcttagaagaggattgttttgaggtgaccagagaggccatgctccatttgggcattgacacccctacccagaacaacatctttaaggtcagaagaaaagccacgccacttaagtttggcagagatgacgggcagccctttgcatagagcttttccctggacttggagttggtctttccctgaggatctaggactttgggcccttctgtgctacctccaaggaatcagtcacctctgttctgctgagtctggagaccaggtggtggggtggacggggcataaggaagagtgatgcatacacagtgctagagtacagaatgcagtaagtgatccatgggggcagagagcaa

SEQ ID NO: 156887 - DNA, 559 bp, Homo sapiens
  Payload ID: 10750
  Gene Symbol: MYO19
  Gene Name: myosin XIX
  ENST ID: ENST00000615902
  CDS Start-End: 1-328
gattagaaccatcagggcaggcagacagcagcaggtgttccggaagccctgcgcccgagccgagtgtgacacccgtagagactgcctggccaaactgatctatgcgcggttgtttgactggctggtatcagtgatcaacagcagcatctgtgcagacaccgactcgtggaccactttcataggtagcaaggcctcactgtgctgggagcactccagaaaaagagcaataaagccctggatggagaggcaggagccctgggtccactgtgtgactctgggcagttcctttcccttttttgtctcctcttgcatctgcctgccagcatagagcgagatctctgcatagggcctgctggatgtgtatggatttgaatcatttcctgacaacagtctggaacagttgtgcatcaactacgccaatgagaagctgcagcagcattttgtggctcactacctaagggcccagcaggaggaatacgcagttgagggcctggagtggtcattcatcaactaccaggacaaccagccctgtttggatctcattgagggaagccccatc

SEQ ID NO: 156888 - DNA, 556 bp, Homo sapiens
  Payload ID: 10750
  Gene Symbol: MYO19
  Gene Name: myosin XIX
  ENST ID: ENST00000613551
  CDS Start-End: 423-556
agtctggccgggcgggggcctgaagcacggcggctcgggccgtgggaccggtgagtgtcaacccgaacctatatctgaagcccttcagacgcggaaggggcttgggaggccagtttgccccgcagcgtgttcacaccctttccagaaattcttggctggtaaccgcgaaaccgactggagcaggagctgggagaactggagaaaactgctctaatctcacttgactccagctaggagctgatgctgcatcgtaataacatttgcagagcgctttcacaggcgctggagtgacttgtctgagattcctccagaactgagccctttgttggaaccataccccagcccatggtcccatgactaggtggatagtactccttgtacctcctgcaacccagaaccctggctgaccactttgaaggaggatgctccagcaggtcaatggccacaatccggggtctgatggccaagccagggagtacctcagagaagacctgcaggagttcctgggtggggaggtcctgctgtacaaactggatgacctcaccagggtgaatcc

SEQ ID NO: 156889 - DNA, 5743 bp, Homo sapiens
  Payload ID: 10750
  Gene Symbol: MYO19
  Gene Name: myosin XIX
  Uniprot ID: Q96H55
  ENST ID: ENST00000610992
  CDS Start-End: 951-2861
ggcgctcgtgccagtgtcccgtgggctacccactcctgtcatgtcctttgggctggtgcaggccagatcttctagggccgtagccctgagaggagcgcctggagaggaaacggcgcgccatgcacctcacacggcccctcagacctcacggcgaggccctatcagggtaatggtgtccgccggcctcgcacaacactccgccgcactcgcacaagactccgccgcggcgacctctactgaaagacccccagtcctggtgtcgcccgaaggcccaggaaaccgtgcttccgcgcttctcccccagaacgtgggaagctgccgctttaccctcattttaccccagggtcgcaaaacatctcaccgtagttgaagccagcaagccggaccaggcgtcccggccaagccacgtgcgcgccccgcgccgcgagtgctcgccccgcccctagggaggagccggccgacccccggccacttagcagtgccgcagccgacggggtgcggttcggcgctcccaggttcctttcctcactgcacgctcttgcccctcctcttttctctcctgcccgtgttcttcccgccgcctgacctggcccgcccgcctttccagtctggccgggcgggggcctgaagcacggcggctcgggccgtgggaccgtgttcacaccctttccagaaattcttggctggtaaccgcgaaaccgactggagcaggagctgggagaactggagaaaactgctctaatctcacttgactccagctaggagctgatgctgcatcgtaataacatttgcagagcgctttcacaggcgctggagtgacttgtctgagattcctccagaactgagccctttgttggaaccataccccagcccatggtcccatgactaggtggatagtactccttgtacctcctgcaacccagaaccctggctgaccactttgaaggaggatgctccagcaggtcaatggccacaatccggggtctgatggccaagccagggagtacctcagagaagacctgcaggagttcctgggtggggaggtcctgctgtacaaactggatgacctcaccagggtgaatcctgtgacactagagacagtcctgaggtgcctgcaggcccggtacatggcagacacattctacaccaatgctggctgcaccctggtagccttgaaccccttcaagcctgttcctcagctctactcgcccgagctaatgagagagtaccatgctgcgcctcagccccagaaactgaagccccatgtgttcactgtgggtgaacagacctacaggaatgtcaagagcctgattgaaccagtcaaccagtctattgttgtcagtggagagagtggtgctggaaagacatggacgtctcgctgcctaatgaagttctatgctgtggtggccacctcacctgcatcttgggagagccacaagattgcagagaggatagaacagaggatcctgaactccaaccctgtcatggaagcttttgggaatgcgtgtacactgaggaataacaacagcagtcgctttgggaagttcatccagctccagctgaacagggctcagcaaatgactggagccgcagtccagacctacctcctagagaaaactcgagtggcctgccaggcttccagtgagaggaacttccacatcttctatcagatttgcaaaggagccagtgaggacgagaggctccagtggcaccttcctgagggagctgccttctcctggctgcccaacccagagaggagcttagaagaggattgttttgaggtgaccagagaggccatgctccatttgggcattgacacccctacccagaacaacatctttaaggtcctagctggactgctgcaccttggcaatatccagtttgctgcctccgaggatgaagcccagccctgccagccgatggatgatgccaagtactctgtcaggacggcagcctcgctgctggggctcccagaggacgtgctgctggagatggtgcagattagaaccatcagggcaggcagacagcagcaggtgttccggaagccctgcgcccgagccgagtgtgacacccgtagagactgcctggccaaactgatctatgcgcggttgtttgactggctggtatcagtgatcaacagcagcatctgtgcagacaccgactcgtggaccactttcataggcctgctggatgtgtatggatttgaatcatttcctgacaacagtctggaacagttgtgcatcaactacgccaatgagaagctgcagcagcattttgtggctcactacctaagggcccagcaggaggaatacgcagttgagggcctggagtggtcattcatcaactaccaggacaaccagccctgtttggatctcattgagggaagccccatcagcatctgctccctcataaatgaggaatgccgcctcaatcgacccagcagcgcagcccagctccagacacgcattgagactgccctggcaggcagcccctgcctgggccacaataagctcagccgggagcccagcttcattgtggtgcattatgcggggcctgtgcggtaccacacagcaggcctggtggagaagaacaaggaccctatcccacctgagctgaccaggctcctgcagcaatcccaggaccccctgctcatggggctgtttcctactaaccccaaagagaagacccaggaggaaccccctggccagagcagggcccctgtgttgaccgtggtgtccaagttcaaggcctcactggagcagcttctgcaggtcctacacagcaccacgccccactacattcgctgcatcaagcccaacagccagggccaggcgcagacctttctccaagaggaggcctgacatgagagaggacccatctcccttgctgtggcagggcaggcatgtatggttgtgtggtctgtgcatagtagcctagccagggaggcaagttccagtgcatcttgtttttttgagccatgtaccctgatgagagactgaaactgcccagaggaatgggtgtctcgtgattagctgaaagtctacatcaccacacagtccccgcacagtgcagccatttctcactggaggtatcatttttttcttttttttttttttttttgagactgagcctcactctgtcacccaggctggagtgcagtggtgcaatctcagctcactgcaacttccgcctcccgagttcaagtgattctcctgcctcagtctcccaaatagctggaattacaggtatgcaccaccacacctggctaatttttgtatttttagtagagatggagtttcaccatgttagccaggctggtctcaaactcctgacctcaggtgatctgcccacctcagcctcccaaagtgctgggattacaggcatgagcagccactgcactcagccggtatcatttttttctaatctaacaaaagcactctagccagcagctgcccttttcttgggattccaggttctgagggatgtggatgaggggtgaatgctgggcactgctgaaggtgtggcctggtagatgtggccttccggtttgtagccaggacaactcagctctgtggtaaagacctgggttcaggtcacagaagaatcttcatagtataatcttccctgcctctcagctgtgaaccaccctctaatgcctgcagacagtgaaaacaatccaaactggaaatttgcctgggctgggttgtgtggtagtgagactacactgagggcagggtgagacggagccaggacatcacttgcttcagctgtatcagaagccatgcgtcggatgagggggacttgggaccaccaggaccctttctagtgggagatttgttttcaaggtccctcgatttctcacagccccaaggagatacccccattagccaagccttgggagagcctgcagcttggcactggccagggtctaagaagaagggctgagagaatggcatttctggcctgctggccccatgctgcaggtgcctgccctgtctccccacccttgcaggtcctgagccagctggaggcctgtggcctcgtggagaccatccatatcagtgctgctggcttccccatccgggtctctcaccgaaactttgtagaacgatacaagttactaagaaggcttcatccttgcacatcctctggccccgacagcccatatcctgccaaagggctccctgcccttctggcccctggttgattttgctgctgtttctcatctgtggtgtctcctttggcagcctctgtcttcagagaggcactgggcatctaaggtggtcagagccctcagaatggtgtccacacagcgaggaagccacgcttgaacctctcatccaggacattctccacactctgccggtcctaactcaggcagcagccataactggtgactcggctgaggccatgccagcccccatgcactgtggcaggaccaaggtgttcatgactgactctatgctggagcttctggaatgtgggcgtgcccgggtgctggagcagtgtgcccgctgcatccagggtggctggaggcgacaccggcaccgagagcaggagcggcagtggcgggccgtcatgctcatccaggcagccattcgttcctggttaactcggaaacacatccagaggctgcatgcagctgccacagtcatcaagcgtgcatggcagaagtggagaatcagaatggcctgccttgctgctaaagagctggatggtgtggaagaaaaacacttctctcaagctccctgttccctgagcacctcgccgctgcagaccaggctcctggaggcaataatccgcctctggcccctgggactggtcctggccaatacggctatgggtgtaggcagctttcagaggaaattagtggtctgggcttgcctccagctccccaggggcagccccagtagctacactgtccagacagcacaagaccaggctggtgtcacgtccatccgagcgctgcctcagggatcgataaagtttcactgcagaaagtctccactgcggtatgctgacatctgccctgaaccttcaccctacagcattacaggctttaatcagattctgctggaaagacacaggctgatccacgtgacctcttctgccttcactgggctggggtgatccttggtgcctttgtttccacaaggccttttcctgccccctgccttgccaaagacatttaatcagcacacagctgccagactattcccacagtgctccaaatgcacatgaacaacagtgacggctccagccttcgacccagagccccgtgcccagtgcgtcagtgggcctggggttccaggctacatcaagcactgatggtgtcagggctggtagttaccaaatcagggttaagaaacatcagggccacatttcactaccttcacagatcaaactcagcagcagtcatgactgtctgtcactacactggggatcccaattccacataagcacttttggaagaaaacagccaaagttggcctaaaattggcgctggaatttgggctgggaaaaatcttgtggttatttcctttaaaaaggaacaaaactttagtatttaattagttgatttatttaatgtaatttcaaacaattaaattatgaataatgcaatgtacagtagaatcacgttttgattttattaacactgaccaagtttaactccatatgaagtgtaagcttgatatcgtttatgatgtctatcaactgtaccaaaagtaaaacatttaaaaac

SEQ ID NO: 156890 - DNA, 4054 bp, Homo sapiens; identical to SEQ ID NO: 156885
  Payload ID: 10750
  Gene Symbol: MYO19
  Gene Name: myosin XIX
  Uniprot ID: Q96H55
  ENST ID: ENST00000618519
  CDS Start-End: 524-3436

SEQ ID NO: 156891 - DNA, 4299 bp, Homo sapiens
  Payload ID: 10750
  Gene Symbol: MYO19
  Gene Name: myosin XIX
  ENST ID: ENST00000621550
  CDS Start-End: 993-1553
gcacttccgggccggccgattccgcgcgtctccgcccatcatggcgctcgtgccagtgtcccgtgggctacccactcctgtcatgtcctttgggctggtgcaggccagatcttctagggccgtagccctgagaggagcgcctggagaggaaacggcgcgccatgcacctcacacggcccctcagacctcacggcgaggccctatcagggtaatggtgtccgccggcctcgcacaacactccgccgcactcgcacaagactccgccgcggcgacctctactgaaagacccccagtcctggtgtcgcccgaaggcccaggaaaccgtgcttccgcgcttctcccccagaacgtgggaagctgccgctttaccctcattttaccccagggtcgcaaaacatctcaccgtagttgaagccagcaagccggaccaggcgtcccggccaagccacgtgcgcgccccgcgccgcgagtgctcgccccgcccctagggaggagccggccgacccccggccacttagcagtgccgcagccgacggggtgcggttcggcgctcccaggttcctttcctcactgcacgctcttgcccctcctcttttctctcctgcccgtgttcttcccgccgcctgacctggcccgcccgcctttccagtctggccgggcgggggcctgaagcacggcggctcgggccgtgggaccgtgttcacaccctttccagaaattcttggctggtaaccgcgaaaccgactggagcaggagctgggagaactggagaaaactgctctaatctcacttgactccagctaggagctgatgctgcatcgtaataacatttgcagagcgctttcacaggcgctggagtgacttgtctgagattcctccagaactgagccctttgttggaaccataccccagcccatggtcccatgactaggtggatagtactccttgtacctcctgcaacccagaaccctggctgaccactttgaaggaggatgctccagcaggtcaatggccacaatccggggtctgatggccaagccagggagtacctcagagaagacctgcaggagttcctgggtggggaggtcctgctgtacaaactggatgacctcaccagggtgaatcctgtgacactagagacagtcctgaggtgcctgcaggcccggtacatggcagacacattctacaccaatgctggctgcaccctggtagccttgaaccccttcaagcctgttcctcagctctactcgcccgagctaatgagagagtaccatgctgcgcctcagccccagaaactgaagccccatgtgttcactgtgggtgaacagacctacaggaatgtcaagagcctgattgaaccagtcaaccagtctattgttgtcagtggagagagtggtgctggaaagacatggacgtctcgctgcctaatgaagttctatgctgtggtggccacctcacctgcatcttgggagagccacaagattgcagagaggatagaacagaggatcctgaactccaaccctgtcatggaagcttttgggctcagcaaatgactggagccgcagtccagacctacctcctagagaaaactcgagtggcctgccaggcttccagtgagaggaacttccacatcttctatcagatttgcaaaggagccagtgaggacgagaggctccagtggcaccttcctgagggagctgccttctcctggctgcccaacccagagaggagcttagaagaggattgttttgaggtgaccagagaggccatgctccatttgggcattgacacccctacccagaacaacatctttaaggtcagaagaaaagccacgccacttaagtttggcagagatgacgggcagccctttgcatagagcttttccctggacttggagttggtctttccctgaggatctaggactttgggcccttctgtgctacctccaaggaatcagtcacctctgttctgctgagtctggagaccaggtggtggggtggacggggcataaggaagagtgatgcatacacagtgctagagtacagaatgcagtaagtgatccatgggggcagagagcaaggtaccgcatgatcagaagagagaactagtgctaccgccttgcttgtctagtacattaaaacttacaagtcatgttcacacttctctgctcacttagttttttaaacagtcctctgtgtgtgtttatttccctttatgcctgagaaaaccagagaggtaaagtgacgtgcccaaggtcagataccactaagtggtgatacagagtaccagacatagtaattccaagttcctaccctctctgtcttcccccaacccgtgccccgtcgtcctctggaacatgagactgccccagagcagcaggaggggatagataggatggcctggcagtcgagaaagggaggccacttcagggaggtagcaatgcagtggaaagtgaccctcacctccagatgggggctgctcagacactgccaggtcctagctggactgctgcaccttggcaatatccagtttgctgcctccgaggatgaagcccagccctgccagccgatggatgatgccaagtactctgtcaggacggcagcctcgctgctggggctcccagaggacgtgctgctggagatggtgcagattagaaccatcagggcaggcagacagcagcaggtgttccggaagccctgcgcccgagccgagtgtgacacccgtagagactgcctggccaaactgatctatgcgcggttgtttgactggctggtatcagtgatcaacagcagcatctgtgcagacaccgactcgtggaccactttcataggcctgctggatgtgtatggatttgaatcatttcctgacaacagtctggaacagttgtgcatcaactacgccaatgagaagctgcagcagcattttgtggctcactacctaagggcccagcaggaggaatacgcagttgagggcctggagtggtcattcatcaactaccaggacaaccagccctgtttggatctcattgagggaagccccatcagcatctgctccctcataaatgaggaatgccgcctcaatcgacccagcagcgcagcccagctccagacacgcattgagactgccctggcaggcagcccctgcctgggccacaataagctcagccgggagcccagcttcattgtggtgcattatgcggggcctgtgcggtaccacacagcaggcctggtggagaagaacaagaatggcctgccttgctgctaaagagctggatggtgtggaagaaaaacacttctctcaagctccctgttccctgagcacctcgccgctgcagaccaggctcctggaggcaataatccgcctctggcccctgggactggtcctggccaatacggctatgggtgtaggcagctttcagaggaaattagtggtctgggcttgcctccagctccccaggggcagccccagtagctacactgtccagacagcacaagaccaggctggtgtcacgtccatccgagcgctgcctcagggatcgataaagtttcactgcagaaagtctccactgcggtatgctgacatctgccctgaaccttcaccctacagcattacaggctttaatcagattctgctggaaagacacaggctgatccacgtgacctcttctgccttcactgggctggggtgatccttggtgcctttgtttccacaaggccttttcctgccccctgccttgccaaagacatttaatcagcacacagctgccagactattcccacagtgctccaaatgcacatgaacaacagtgacggctccagccttcgacccagagccccgtgcccagtgcgtcagtgggcctggggttccaggctacatcaagcactgatggtgtcagggctggtagttaccaaatcagggttaagaaacatcagggccacatttcactaccttcacagatcaaactcagcagcagtcatgactgtctgtcactacactggggatcccaattccacataagcacttttggaagaaaacagccaaagttggcctaaaattggcgctggaatttgggctgggaaaaatcttgtggttatttcctttaaaaaggaacaaaactttagtatttaattagttgatttatttaatgtaatttcaaacaattaaattatgaataatgcaatgtacagtagaatcacgttttgattttattaacactgaccaagtttaactccatatgaagtgtaagcttgatatcgtttatgatgtctatcaactgtaccaaaagtaaaacatttaaaa

SEQ ID NO: 156892 - DNA, 786 bp, Homo sapiens
  Payload ID: 10750
  Gene Symbol: MYO19
  Gene Name: myosin XIX
  ENST ID: ENST00000616207
  CDS Start-End: 590-786
tgaagcacggcggctcgggccgtgggaccgtgttcacaccctttccagaaattcttggctggtaaccgcgaaaccgactggagcaggagctgggagaactggagaaaactgctctaatctcacttgactccagctaggagctgatgctgcatcgtaataacatttgcagagcgctttcacagattggcttaggcccagcctcacaacaccccacctcccagatggattcatctccctgaaatcctcaccttcttgaagttgacactggaccgttcacctgattagcgctcccaaatggatcatcaacccttagtcgtagtgctaacagtgtttatcctctgagtgaatactcagattcgtactttgtgtggtgctgtcaaaccatgacctcattgaccttcacaaccactccttatgaggcagatttaactgtccccattttcaaggcgctggagtgacttgtctgagattcctccagaactgagccctttgttggaaccataccccagcccatggtcccatgactaggtggatagtactccttgtacctcctgcaacccagaaccctggctgaccactttgaaggaggatgctccagcaggtcaatggccacaatccggggtctgatggccaagccagggagtacctcagagaagacctgcaggagttcctgggtggggaggtcctgctgtacaaactggatgacctcaccagggtgaatcctgtgacactagagacagtcctgaggtgcctgcaggcccggtacatggcagacacattctacac

SEQ ID NO: 156893 - DNA, 897 bp, Homo sapiens
  Payload ID: 10750
  Gene Symbol: MYO19
  Gene Name: myosin XIX
  ENST ID: ENST00000622055
  CDS Start-End: 411-897
actgtcctccatgcctagaaagaaacagtctgagaaggagggactggtgatcaggttgccacttgccttgattcggtgttccatttactcattaccgtctcctttctgcccacagtgttcacaccctttccagaaattcttggctggtaaccgcgaaaccgactggagcaggagctgggagaactggagaaaactgctctaatctcacttgactccagctaggagctgatgctgcatcgtaataacatttgcagagcgctttcacaggcgctggagtgacttgtctgagattcctccagaactgagccctttgttggaaccataccccagcccatggtcccatgactaggtggatagtactccttgtacctcctgcaacccagaaccctggctgaccactttgaaggaggatgctccagcaggtcaatggccacaatccggggtctgatggccaagccagggagtacctcagagaagacctgcaggagttcctgggtggggaggtcctgctgtacaaactggatgacctcaccagggtgaatcctgtgacactagagacagtcctgaggtgcctgcaggcccggtacatggcagacacattctacaccaatgctggctgcaccctggtagccttgaaccccttcaagcctgttcctcagctctactcgcccgagctaatgagagagtaccatgctgcgcctcagccccagaaactgaagccccatgtgttcactgtgggtgaacagacctacaggaatgtcaagagcctgattgaaccagtcaaccagtctattgttgtcagtggagagagtggtgctggaaagacatggacgtctcgctgcctaatgaagttctatgctgtggtggccacctcacctgcatcttgggagagccaca

SEQ ID NO: 156894 - DNA, 5743 bp, Homo sapiens; identical to SEQ ID NO: 156889
  Payload ID: 10750
  Gene Symbol: MYO19
  Gene Name: myosin XIX
  Uniprot ID: Q96H55
  ENST ID: ENST00000633264
  CDS Start-End: 951-2861

SEQ ID NO: 156895 - DNA, 556 bp, Homo sapiens; identical to SEQ ID NO: 156888
  Payload ID: 10750
  Gene Symbol: MYO19
  Gene Name: myosin XIX
  ENST ID: ENST00000633266
  CDS Start-End: 423-556

SEQ ID NO: 156896 - DNA, 897 bp, Homo sapiens; identical to SEQ ID NO: 156893
  Payload ID: 10750
  Gene Symbol: MYO19
  Gene Name: myosin XIX
  ENST ID: ENST00000632090
  CDS Start-End: 411-897

SEQ ID NO: 156897 - DNA, 786 bp, Homo sapiens; identical to SEQ ID NO: 156892
  Payload ID: 10750
  Gene Symbol: MYO19
  Gene Name: myosin XIX
  ENST ID: ENST00000633990
  CDS Start-End: 590-786

SEQ ID NO: 156898 - DNA, 580 bp, Homo sapiens; identical to SEQ ID NO: 156884
  Payload ID: 10750
  Gene Symbol: MYO19
  Gene Name: myosin XIX
  ENST ID: ENST00000633104
  CDS Start-End: 1-47

SEQ ID NO: 156899 - DNA, 1640 bp, Homo sapiens; identical to SEQ ID NO: 156880
  Payload ID: 10750
  Gene Symbol: MYO19
  Gene Name: myosin XIX
  Uniprot ID: Q96H55
  ENST ID: ENST00000633938
  CDS Start-End: 404-1357

SEQ ID NO: 156900 - DNA, 963 bp, Homo sapiens; identical to SEQ ID NO: 156882
  Payload ID: 10750
  Gene Symbol: MYO19
  Gene Name: myosin XIX
  ENST ID: ENST00000633669
  CDS Start-End: 434-963

SEQ ID NO: 156901 - DNA, 559 bp, Homo sapiens; identical to SEQ ID NO: 156887
  Payload ID: 10750
  Gene Symbol: MYO19
  Gene Name: myosin XIX
  ENST ID: ENST00000632349
  CDS Start-End: 1-328

SEQ ID NO: 156902 - DNA, 1186 bp, Homo sapiens; identical to SEQ ID NO: 156886
  Payload ID: 10750
  Gene Symbol: MYO19
  Gene Name: myosin XIX
  ENST ID: ENST00000631623
  CDS Start-End: 432-983

SEQ ID NO: 156903 - DNA, 4299 bp, Homo sapiens; identical to SEQ ID NO: 156891
  Payload ID: 10750
  Gene Symbol: MYO19
  Gene Name: myosin XIX
  ENST ID: ENST00000631888
  CDS Start-End: 993-1553

SEQ ID NO: 156904 - DNA, 11863 bp, Homo sapiens
  Payload ID: 10751
  Gene Symbol: MYO15A
  Gene Name: myosin XVA
  Uniprot ID: Q9UKN7
  ENST ID: ENST00000205890
  CDS Start-End: 339-10931
gggctgggcctcccttccccataacactgagctgctctgctgggccaaccgtgctcctgggccagccagaggacccccatgaggcggcatgcaggcggggagcaggccacagaacgcagggtgaaacccaaggcgctctagaggagatgaattatggatccgccctcccggaatcctggctcggccctccccacgccacccagggccagtcgggtctgctcacagcccgaggaggccgcgtgtccagccgcgggcaagagacagagcaggtccctgtgtctccaagtccctgagcccgtgacaccggccccaggccctgtagagagcaggcagccaccatggcgaaggaggaagatgaggagaagaaagccaagaaagggaagaaggggaagaaggcaccggagccggagaagcccaaacggagcctgaaggggacgtcgcggctgttcatgggcttccgcgaccgtacacccaagatctccaagaagggccagttccgcagcgcctcggccttcttctggggcctccacaccggcccccagaagaccaagcgcaagaggaaggcccgcaccgtgctcaagtccacgtcaaagctcatgacgcagatgcgcatgggcaagaagaagcgggcgatgaagggcaagaagccgtccttcatggtgatccgcttcccaggccgccgtggctacggccgcctgcggccgcgcgcccggtcactcagcaaagcgtccacggccatcaactggctcacaaaaaagttcctcctcaagaaggccgaggagtcgggcagcgaacaggccacagtggacgcctggctgcagcgctcgagctcccgcatgggctcccgcaaactccccttcccgtcgggtgccgagatcctgcggcctgggggccggctccggaggttcccccgcagccgcagcatctacgcgtcaggcgagcccctgggcttcctgcccttcgaggacgaggccccattccatcactcgggctcccgcaagtcgctgtacgggcttgagggcttccaggacctgggcgagtattatgactatcaccgcgacggcgacgactactacgaccggcagtcactccaccgctacgaggagcaggaaccctacctggcgggcctcggcccctacagcccggcctggccaccctacggcgaccactactacgggtacccgcccgaggatccctacgactactaccaccccgactattacggtggcccctttgatccggggtacacctacggctacggctacgacgattacgaacccccatatgcgcccccgtcggggtactcgtctccttacagctaccacgatgggtacgagggcgaggcgcacccttatggctactacctggatccctatgcgccgtacgacgcgccatacccaccctatgacctcccataccacactccctacgatgtaccctactttgatccctacggagtccactacaccgtcccctatgccgaaggcgtctatggcggtggggacgaggccatctacccccccgaggtgccctatttttacccggaggagtcggcttcggcctttgtgtacccctgggtaccaccgcccatcccgtcgccccacaacccgtatgcccacgccatggatgacatcgccgagctggaggaaccagaggacgcgggcgtagagcgtcaggggacctccttccgcctgcccagcgccgccttcttcgagcagcaaggcatggataagcccgccaggtccaagctgtccctcatccgcaagttccgcctcttcccgcgaccccaggtgaagctgtttgggaaggagaagctggaggtgcccctgccaccctctctggacattcctctccccttgggggatgcggacgaagaagaggacgaggaggagctgcccccggtttccgctgtgccctacggccaccctttctggggcttcctcacgccgcgccagcgcaacctccagcgcgcgctgtcggccttcggcgcccaccggggcctgggcttcggccctgagtttggccgccccgtgcctcgccctgccacctcgcttgcgcggttcctcaagaagacgctgtcggagaagaagcccatcgcgcggctcaggggcagccagaaggcccgggcgggcggccctgctgtcagggaggcggcctacaaacgcttcggctacaagctggctggcatggaccccgagaagcccggcacgcccatcgtgctgaggagggcccagccacgcgctcgcagcagcaacgacgcgcgccgcccgcccgcgccacagcccgcgcccaggaccctctcccactggagcgcgctcctgtctccgcccgtgcccccgcggcccccaagctccgggcccccgcccgcgccgccgctctccccggcgctctcgggcctgccccggccggcctcgccctacggctccctccgccgccacccgccgccctgggccgccccagcgcacgtgccaccggcgccgcaggccagctggtgggccttcgtggagccccctgccgtgagcccggaggtgccccccgacctactagccttcccagggccccgaccctcgttcaggggctcccgccggagaggggcggctttcggcttccccggggcctctccacgggcgtcgcggaggcgagcttggtcaccgctggcctcgccccagccctcgctgaggagctcgccgggcctcggctactgctcacccttggcgcccccgtcgcctcagctgtccttgcgcacgggccccttccagccgcccttcctgcccccggcccgccggccccgctcgctgcaggagtccccagccccacgccgagccgctgggcgcctgggcccacccggctcgccgctgccgggctcacccaggccgccctcgccgcccctggggctctgccacagcccgcggcgcagctccctgaatctgccctcgcgcctcccgcacacgtggcggcgcctcagcgagccacccactcgggctgtgaagccgcaagtgcgcctgcccttccaccgaccgcccagggccggggcctggcgggcgcccctggaacaccgggagagcccgcgagaacccgaggactcagagacgccctggactgtgcccccactggcccccagctgggacgtggacatgcctcccacccaacgcccaccctccccctggccaggaggtgcaggcagccgccgaggcttttccaggccaccccctgtgccggaaaacccctttctccagctcctgggccctgtgccatcccccaccctccagcctgaggatccagctgctgatatgaccagggtcttcctgggcagacaccatgagccggggcctggacagctcaccaaatcagctggcccaacccctgagaagcctgaagaagaggccaccctgggggacccccagctgccagcagagaccaagcctccaaccccagcacctcccaaggatgtcactccccccaaggatatcactccccccaaggatgtcctcccagagcaaaagacattaaggcccagcctctcatacccactggctgcgtgtgaccagaccagggccacatggccaccatggcaccgctggggaacactgccccaagccgcagcccccttggcgcccatcagggccccagagcccctgcccaaggggggtgaacggcgccaggcagcccctgggcgttttgctgtggtcatgcctcgtgtgcagaagctgagctctttccagcgagttgggcctgcaaccctgaagcctcaagtccagcccattcaggaccccaagccaagagcctgtagtcttcgctggtcctgcctctggcttcgggcagatgcctatggaccctggccacgagtacacacccatccccagtcctgccacctgggccctggagctgcctgcctgtcccttaggggctcctgggaggaggtcggcccgccaagctggcggaacaagatgcactccatccgcaacctgccatccatgcggttccgtgagcagcacggggaggatggtgtggaggacatgacacagctggaagacctccaggaaaccactgtgctgtccaacctcaagattagatttgaacggaacctcatctacacatacattgggagcatcctggtgtcggtgaacccataccaaatgtttggaatctatgggccggagcaggtgcagcagtacaacggacgggccctgggagagaatcccccgcacctctttgctgttgcaaatctcgccttcgccaaaatgctcgatgccaaacagaaccagtgcataatcattagtggagagagcggctctggcaaaactgaggccaccaagctgattctgcgctacctggccgccatgaaccagaaacgggaggtcatgcagcagataaagatcctggaggcaacacccctcttggagtccttcggtaatgccaaaaccgtcaggaacgacaactccagccgctttgggaagtttgtggaaatctttctggaagggggcgtgatctctggtgccataacctcccagtacctgcttgagaaatccaggatcgtgtttcaggccaaaaacgagaggaattaccacatcttctacgagttgctggccgggttgcctgcccagctcaggcaggcctttagcctgcaagaggctgagacctactactatctgaaccagggtgggaactgtgagatagcaggaaagagcgatgcagatgactttcgccggctcctggctgccatggaggtgttgggcttcagcagtgaggaccaggacagcatcttccgcatcctggcctccatcctgcacctgggcaacgtctactttgagaagtatgagacggatgcacaggaggtggcctcagtggtgagtgcccgagagatccaggccgtggcagagctgctgcagatctcccctgagggcctgcagaaggccatcaccttcaaagtgaccgagacaatgcgagagaagatcttcacgcccctaactgtggagagcgctgtggatgccagggacgccatcgccaaggtcttgtatgcactgctgttcagctggctcatcaccagggtcaacgcgctggtgtccccaaggcaggacacactgtccatcgccatcctggacatctatggtttcgaggacctgagcttcaacagctttgagcagctgtgtattaactacgcaaacgagaaccttcagtaccttttcaacaagatcgtcttccaggaggagcaggaggagtacatccgtgagcagatagactggcaggagatcacctttgctgacaaccagccctgcatcaacctcatctcactgaagccttatggcatcctgcggatccttgacgaccagtgttgctttccccaggctacagaccacaccttcctacagaagtgccactaccatcatggcgccaacccgctctattccaaacccaagatgccgctgcctgagttcaccatcaagcactatgcaggcaaggtcacctaccaggtgcacaagttcctggacaagaaccacgaccaagtgcgccaggatgtgctggacctgttcgtacggagccggacacgggtggtggcacacctcttctccagccatgccccacaggctgcccctcagcgcctgggcaagagcagctccgtcactcggctctacaaggcgcacactgtggccgccaagttccagcagtcactcctggatctggtggaaaagatggagaggtgcaaccccttgttcatgcgttgcctgaagcccaaccacaagaaggagccaggtctctttgagccagatgtggtaatggcacaattacgctattcaggggtgctggagaccgtgaggatccgcaaggagggatttccagtgcgcctgcctttccaggggttcatcgacaggtactgctgtctagtggccctcaagcatgacctgccggctaatggggacatgtgtgtgtcagtgctgagtcgcctgtgcaaagtcatgccaaacatgtaccgtgttggggtcagcaagctgttccttaaggaacacctataccagctgctggagagtatgcgagagcatgtcctgaatctggcagccctcactctgcagcgctgcctccgtggcttcttcattaagcggcgattccgctctctgcgccacaagatcatcctgctgcaaagccgggcccgtggctaccttgccaggcaacgctatcagcagatgaggaggagtctggtgaagttccggtccctggtacacgcatacgtgagccgccgacgctatctcaagctgagggcagagtggaggtgccaggtggagggggcgctgctgtgggagcaggaggagctgagcaagcgggaggtagtcgctgtggggcacctggaggtaccggctgagctggctgggctcttgcaagcagtggcaggcctcgggctggcccaggtgcctcaggtggcccctgtgaggactcctcgactccaggctgagccccgtgtcacactgcccctggacatcaacaactatcctatggccaagtttgtccagtgccacttcaaggaacctgcctttgggatgctgacagtgcccctgaggacacccctcacgcagctgccagccgagcaccatgcagaagccgtgagcatcttcaagctgatcctgcgcttcatgggcgacccccacctgcatggtgcccgggagaacatcttcgggaactacatcgtgcagaaggggctggcggtgcctgagctgcgggatgagatcctggcacagctggccaatcaggtgtggcacaatcacaatgcccacaatgctgagcggggctggctgctgctggccgcctgcctcagtggctttgcaccttccccgtgcttcaacaagtaccttctcaagtttgtgtctgattatgggcggaatggcttccaggctgtgtgtcagcaccgcctcatgcaggccatgggccgggcccaacagcagggctcgggggctgcccgcaccttacccccgacccagctcgagtggacagcgacctatgagaaggccagcatggcgctggacgtgggctgcttcaatggtgaccagttctcctgcccggtgcactcctggagtacgggggaagaggtggctggagacattctgaggcacagggggctggcagatggctggcgcggctggaccgtggccatgaagaatggtgtccagtgggcagagctggctggccacgactacgtgttagacctggtgtcggacctggagctgctcagggacttccctcgacagaagtcctacttcattgtgggcacagaggggcctgcagccagcaggggaggccccaaagtggtgtttgggaacagctgggactcggatgaggacatgtccactagaccccagccccaggagcacatgcccaaagtacttgactctgatgggtacagcagccacaatcaggacggtacaaatggggagactgaggcccaaagagggacagcaacccaccaagagtcagacagtcttggagagcctgctgtgccccacaaggggctggactgctacctggatagcctctttgaccctgtgctgtcctacggggatgcggacctggagaagccaacagccattgcctaccgcatgaaagggggaggccagcccggtggaggcagcagtagtggtactgaagacacccccaggagacccccagagccaaagccaatcccaggcctggatgcctccacattggctctgcagcaagccttcatccacaaacaggccgtgctgctggcccgggagatgaccctgcaggccacggcactccagcagcagcccctgagtgctgccctgagatccttgcccgcagagaaacccccagcaccagaggcacagccgacgtctgtaggcaccggtccccctgccaaacccgtgctcctgcgtgccactccaaagcccttggccccagcccctctggccaaggctccaaggctccccatcaagcctgtggctgcccctgttctagctcaggatcaggcttctccagaaaccacttcaccctccccagagctggtccggtactctacgctcaactctgagcacttcccacagcccacacagcagatcaagaatattgtcaggcagtaccagcagccgttccggggaggccggcctgaggccctcaggaaggatggcgggaaagtgttcatgaagcggccagaccctcatgaggaggccctgatgatcctgaaagggcagatgacccacctggcagctgcacctggcacccaggtgtccagagaggccgtggccctggtgaagccggtgaccagtgcaccaaggccatccatggcacccacttcagctctgccctcgcgatcgctggagccccctgaggaactcacgcagacgcggctgcaccgcctcatcaatcccaacttctacggctatcaggacgccccctggaagatcttcctgcgcaaagaggtgttttaccccaaggacagctacagccatcctgtgcagcttgacctcctgttccggcagatcctgcacgacacgctctccgaggcctgccttcgcatctctgaggatgagaggctcaggatgaaggccttgtttgcccagaaccagctggacacacagaagcctctggtaacggaaagcgtgaagcgggccgtggtcagcactgcacgagacacctgggaggtctacttctcccgcatcttccccgccacgggcagcgtgggcactggtgtgcagctcctagctgtgtcccacgtgggcatcaaactcctgaggatggtcaagggtggccaggaggccggcgggcagctgcgggtcctgcgtgcatacagctttgcagatatcctgtttgtgaccatgccctcccagaacatgctggagttcaacctggccagtgagaaggtcatcctcttctcagcccgagcgcaccaggtcaagaccctggtagatgacttcatcttggagctgaagaaggactctgactacgtggtcgctgtgaggaacttcctgcctgaggaccctgcgctgctggctttccacaagggtgacatcatacacctgcagcccctagagccacctcgagtgggctacagtgctggctgcgtggttcgcaggaaggtggtgtacctggaggagctgcgacgtagaggccccgactttggctggaggttcgggaccatccacgggcgcgtgggccgcttcccttcggagctggtgcagcccgctgctgcccccgacttcctgcagctgccaacggagccaggccgcggccgagcagccgccgtggccgctgctgtggcctctgcagccgctgcacaggaggtgggccgcaggagagagggtcccccagtcagggcccgctctgctgaccatggggaggacgccctggcgctcccaccctacacaatgctcgagtttgcccagaagtatttccgagaccctcagaggagaccccaggatggcctcaggctgaaatccaaggagcctcgggagtccagaaccttggaggacatgctttgcttcaccaagactcccctccaggaatccctcatcgaactcagcgacagcagcctcagcaagatggccaccgacatgttcctagctgtaatgaggttcatgggggatgccccactgaagggccagagtgacctggacgtgctttgtaacctcctgaagctgtgcggggaccatgaggtcatgcgggatgaatgttactgccaagttgtgaagcagatcacagacaataccagctccaagcaggacagctgccagcgaggctggaggctgctgtatatcgtgaccgcctaccacagctgctctgaggtcctccacccacacctcactcgcttcctccaagacgtgagccggaccccaggcctgccctttcaggggatcgccaaggcctgcgagcagaacctgcagaaaaccttgcgcttcggaggtcgtctggagctccccagcagcatagagcttcgggccatgttggcaggccgcagttccaagaggcaactctttcttcttcctggaggccttgaacgccatctcaaaatcaaaacatgcactgtggccctggacgtggtggaagagatatgtgctgagatggctctgacacgccctgaggccttcaatgaatatgttatcttcgttgtcaccaaccgtggccagcatgtgtgcccactcagtcgccgtgcttacatcctggatgtggcctcagagatggagcaggtggacggcggctacatgctctggttccggcgtgtgctctgggatcagccactcaagttcgagaatgagctatatgtgaccatgcactacaaccaggtcctgcctgactacctgaagggactcttcagcagtgtgccggccagccggcccagcgagcagctgctgcagcaggtgtccaagctggcttcactgcagcatcgcgccaaggaccacttctacctgccgagcgtgcgggaagtccaggagtacatcccagcccagctctaccgtacaacggcaggctcgacctggctcaacctggtcagccagcaccggcagcagacacaggcgctcagcccccaccaggcccgtgcccagtttctgggcctcctcagcgccttacctatgttcggctcctccttcttcttcatccagagctgcagcaacattgctgtgccagccccttgcatccttgccatcaaccacaatggcctcaactttctcagcacagagactcatgaattgatggtgaagttccccctgaaggagatccagtcgacgcggacccagcggcccacggccaactccagctacccctatgtggagattgcgctgggggacgtggcggcccagcgcaccttgcagctgcagctggagcagggactggaactgtgtcgtgtggtggccgtgcacgtggagaacctgctcagtgcccatgagaagcggctcacattgccccccagcgagatcaccctgctctgacccagcccccagccctccagtaccttctgccagaagactcactgtgtggcctcagagaaatcactgaacctctcaggatcaatgacccctgtaaggggccagagccttggaggacactaagaggaggcaggaggagcaactcaaatccccaagaacacaagaagacccatcctgaactgggatggaatggcagcatgcaaacttggatcagatagcaggaggaactttcaaaagtctggcccactgtgcagtggagcagaaggcaggaccatgaggcctcctgccatgtacccattgcagaccctgcccctaactcctgcctatgacacagaagccccacaccagttgcccagatgaactggcctctgcctttggtttactcagggtctgatgttggaatctgctccaactccacaccctagcccttacatgtcctcctaaggggcccctccttgtgctgccagtcagcctggatttctggtctttggttatttctgtgcaaacaaaaggtgtgcctggcagccatttctccatggagttgctaagtggccggaaaacaagcctgagggaggaggcaggagttggagttaccttaggcccctgattcactgcctatgaacagaccatcccccactccttgggtatccccaaccccagacccccatcacttgatgggccacacaagtttgagagtggtacaagggagaagtttgggaaaagccttcttggaaaatgggacattagcattgagttttgaaagatgagtaggagtttgctaagaatagatggaagacagcaggataaacattccagagaaaatcatgtttattccctgctgtatcttccagaacctaggaggatgcctaacagagagtaagcacttaaaaaatatttgtcatatgaatgaaaaaataaacgagtgaatgttgata

SEQ ID NO: 156905 - DNA, 3411 bp, Homo sapiens
  Payload ID: 10751
  Gene Symbol: MYO15A
  Gene Name: myosin XVA
  Uniprot ID: Q9UKN7
  ENST ID: ENST00000418233
  CDS Start-End: 623-3016
tcatcctaggaggtgcctgtggccgggcgcagtagctcatgcctgtaatcccagcactttgggaggccgaggcgggcggaccacctgaggtcaggaatttgagactagccggcccaacatggcgaaaccccatctctactaaacatacaaaaaattagccaggcgtcgtggcgggcgcctgtaatcccagctactcaggaggctgaggcaggagaatcgcttgaacccaggaggcggagcttgcagtgggccgagattgcgccactgcactctagcctgggggacaacagcgaaactccgtctcaaaaatatatatatatattaattaaataaaaaaacgaggtgccttctcctgactccctgatccccgcgctctccagctctgccctcgcgatcgctggagccccctgaggaactcacgcagacgcggctgcaccgcctcatcaatcccaacttctacggctatcaggacgccccctggaagatcttcctgcgcaaagaggtgttttaccccaaggacagctacagccatcctgtgcagcttgacctcctgttccggcagatcctgcacgacacgctctccgaggcctgccttcgcatctctgaggatgagaggctcaggatgaaggccttgtttgcccagaaccagctggacacacagaagcctctggtaacggaaagcgtgaagcgggccgtggtcagcactgcacgagacacctgggaggtctacttctcccgcatcttccccgccacgggcagcgtgggcactggtgtgcagctcctagctgtgtcccacgtgggcatcaaactcctgaggatggtcaagggtggccaggaggccggcgggcagctgcgggtcctgcgtgcatacagctttgcagatatcctgtttgtgaccatgccctcccagaacatgctggagttcaacctggccagtgagaaggtcatcctcttctcagcccgagcgcaccaggtcaagaccctggtagatgacttcatcttggagctgaagaaggactctgactacgtggtcgctgtgaggaacttcctgcctgaggaccctgcgctgctggctttccacaagggtgacatcatacacctgcagcccctagagccacctcgagtgggctacagtgctggctgcgtggttcgcaggaaggtggtgtacctggaggagctgcgacgtagaggccccgactttggctggaggttcgggaccatccacgggcgcgtgggccgcttcccttcggagctggtgcagcccgctgctgcccccgacttcctgcagctgccaacggagccaggccgcggccgagcagccgccgtggccgctgctgtggcctctgcagccgctgcacaggaggtgggccgcaggagagagggtcccccagtcagggcccgctctgctgaccatggggaggacgccctggcgctcccaccctacacaatgctcgagtttgcccagaagtatttccgagaccctcagaggagaccccaggatggcctcaggctgaaatccaaggagcctcgggagtccagaaccttggaggacatgctttgcttcaccaagactcccctccaggaatccctcatcgaactcagcgacagcagcctcagcaagatggccaccgacatgttcctagctgtaatgaggttcatgggggatgccccactgaagggccagagtgacctggacgtgctttgtaacctcctgaagctgtgcggggaccatgaggtcatgcgggatgaatgttactgccaagttgtgaagcagatcacagacaataccagctccaagcaggacagctgccagcgaggctggaggctgctgtatatcgtgaccgcctaccacagctgctctgaggtcctccacccacacctcactcgcttcctccaagacgtgagccggaccccaggcctgccctttcaggggatcgccaaggcctgcgagcagaacctgcagaaaaccttgcgcttcggaggtcgtctggagctccccagcagcatagagcttcgggccatgttggcaggccgcagttccaagaggcaactctttcttcttcctggaggccttgaacgccatctcaaaatcaaaacatgcactgtggccctggacgtggtggaagagatatgtgctgagatggctctgacacgccctgaggccttcaatgaatatgttatcttcgttgtcaccaaccgtggccagcatgtgtgcccactcagtcgccgtgcttacatcctggatgtggcctcagagatggagcaggtggacggcggctacatgctctggttccggcgtgtgctctgggatcagccactcaagttcgagaatgagctatatgtgaccatgcactacaaccaggtcctgcctgactacctgaagggactcttcagcagtgtgccggccagccggcccagcgagcagctgctgcagcaggtgtccaagctggcttcactgcagcatcgcgccaaggaccacttctacctgccgagcgtgcgggaagtccaggagtacatcccagcccagctctaccgtacaacggcaggctcgacctggctcaacctggtcagccagcaccggcagcagacacaggcgctcagcccccaccaggcccgtgcccagtttctgggcctcctcagcgccttacctatgttcggctcctccttcttcttcatccagagctgcagcaacattgctgtgccagccccttgcatccttgccatcaaccacaatggcctcaactttctcagcacagagactcatgaattgatggtgaagttccccctgaaggagatccagtcgacgcggacccagcggcccacggccaactccagctacccctatgtggagattgcgctgggggacgtggcggcccagcgcaccttgcagctgcagctggagcaggtaagagctggggaagtgttggatgggcgtggactgtcactgtcacctgcagggactggaactgtgtcgtgtggtggccgtgcacgtggagaacctgctcagtgcccatgagaagcggctcacattgccccccagcgagatcaccctgctctgacccagcccccagccctccagtaccttctgccagaagactcactgtgtggcctcagagaaatcactgaacctctcaggatcaatgacccctgtaaggggccagagccttggaggacactaagaggaggcaggaggagcaactcaaatccccaagaacacaagaagacccatcctgaactgggatggaatggcagcatgcaaacttggatcagatagcaggaggaactttcaaaagtctggcccactgtgcagtggagcagaaggcaggaccatgaggcctcctgccatgtacccattgcagaccctgcccctaactcctgcctatgacacagaagccccacaccagttgccca

SEQ ID NO: 156906 - DNA, 573 bp, Homo sapiens
  Payload ID: 10751
  Gene Symbol: MYO15A
  Gene Name: myosin XVA
  ENST ID: ENST00000556535
  CDS Start-End: 114-573
aagtggggcagggagccaggttagcacagcaagtaaaaggcgtgggcgggctgaagggggatggcctcaggctgaaatccaaggagcctcgggagtccagaaccttggaggacatgctttgcttcaccaagactcccctccaggaatccctcatcgaactcagcgacagcagcctcagcaagatggccaccgacatgttcctagctgtaatgaggttcatgggggatgccccactgaagggccagagtgacctggacgtgctttgtaacctcctgaagctgtgcggggaccatgaggtcatgcgggatgaatgttactgccaagttgtgaagcagatcacagacaataccagctccaagcaggacagctgccagcgaggctggaggctgctgtatatcgtgaccgcctaccacagctgctctgaggtcctccacccacacctcactcgcttcctccaagacgtgagccggaccccaggcctgccctttcaggggatcgccaaggcctgcgagcagaacctgcagaaaaccttgcgcttcggaggtcgtctggagctccccagcagcatagagc

SEQ ID NO: 156907 - DNA, 517 bp, Homo sapiens
  Payload ID: 10751
  Gene Symbol: MYO15A
  Gene Name: myosin XVA
  ENST ID: ENST00000557655
  CDS Start-End: 110-217
ggggcagggagccaggttagcacagcaagtaaaaggcgtgggcgggctgaagggggatggcctcaggctgaaatccaaggagcctcgggagtccagaaccttggaggacatgctttgcttcaccaagactcccctccaggaatccctcatcgaactcagcgacagcagcctcagcaagatggccaccgacatgttcctagctgtgcggggaccatgaggtcatgcgggatgaatgttactgccaagttgtgaagcagatcacagacaataccagctccaagcaggacagctgccagcgaggctggaggctgctgtatatcgtgaccgcctaccacagctgctctgaggtcctccacccacacctcactcgcttcctccaagacgtgagccggaccccaggcctgccctttcaggggatcgccaaggcctgcgagcagaacctgcagaaaaccttgcgcttcggaggtcgtctggagctccccagcagcatagagcttcgggccatgttggcaggccg

SEQ ID NO: 156908 - DNA, 494 bp, Homo sapiens
  Payload ID: 10751
  Gene Symbol: MYO15A
  Gene Name: myosin XVA
  ENST ID: ENST00000585180
  CDS Start-End: 174-485
aagcaaggccagggggcagtcggacagtacccactgaagccccgcccctgcaggtgttttaccccaaggacagctacagccatcctgtgcagcttgacctcctgttccggcagatcctgcacgacacgctctccgaggcctgccttcgcatctctgaggatgagaggctcaggatgaaggccttgtttgcccagaaccagctggacacacagaagcctctggtaacggaaagcgtgaagcgggccgtggtcagcactgcacgagacacctgggaggtctacttctcccgcatcttccccgccacgcgtgggcactggtgtgcagctcctagctgtgtcccacgtgggcatcaaactcctgaggatggtcaagggtggccaggaggccggcgggcagctgcgggtcctgcgtgcatacagctttgcagatatcctgtttgtgaccatgccctcccagaacatgctggagttcaacctggccagtgagaaggtcat

SEQ ID NO: 156909 - DNA, 998 bp, Homo sapiens
  Payload ID: 10751
  Gene Symbol: MYO15A
  Gene Name: myosin XVA
  ENST ID: ENST00000579848
  CDS Start-End: 1-774
ctttgtaacctcctgaagctgtgcggggaccatgaggtcatgcgggatgaatgttactgccaagttgtgaagcagatcacagacaataccagctccaagcaggacagctgccagcgaggctggaggctgctgtatatcgtgaccgcctaccacagctgctctgaggtcctccacccacacctcactcgcttcctccaagacgtgagccggaccccaggcctgccctttcaggggatcgccaaggcctgcgagcagaacctgcagaaaaccttgcgcttcggaggtcgtctggagctccccagcagcatagagcttcgggccatgttggcaggccgcagttccaagaggcaactctttcttcttcctggaggccttgaacgccatctcaaaatcaaaacatgcactgtggccctggacgtggtggaagagatatgtgctgagatggctctgacacgccctgaggccttcaatgaatatgttatcttcgttgtcaccaaccgtggcgggaagtccaggagtacatcccagcccagctctaccgtacaacggcaggctcgacctggctcaacctggtcagccagcaccggcagcagacacaggcgctcagcccccaccaggcccgtgcccagtttctgggcctcctcagcgccttacctatgttcggctcctccttcttcttcatccagagctgcagcaacattgctgtgccagccccttgcatccttgccatcaaccacaatggcctcaactttctcagcacagagactcatgtaagagctggggaagtgttggatgggcgtggactgtcactgtcacctgcagggactggaactgtgtcgtgtggtggccgtgcacgtggagaacctgctcagtgcccatgagaagcggctcacattgccccccagcgagatcaccctgctctgacccagcccccagccctccagtaccttctgccagaagactcactgtgtggcctcagagaaatcactgaacctctc

SEQ ID NO: 156910 - DNA, 1046 bp, Homo sapiens
  Payload ID: 10751
  Gene Symbol: MYO15A
  Gene Name: myosin XVA
  ENST ID: ENST00000578575
  CDS Start-End: 1-361
cagctgctctgaggtcctccacccacacctcactcgcttcctccaagacgtgagccggaccccaggcctgccctttcaggggatcgccaaggcctgcgagcagaacctgcagaaaaccttgcgcttcggaggtcgtctggagctccccagcagcatagagcttcgggccatgttggcaggccgcagttccaagaggcaactctttcttcttcctggaggccttgaacgccatctcaaaatcaaaacatgcactgtggccctggacgtggtggaagagatatgtgctgagatggctctgacacgccctgaggccttcaatgaatatgttatcttcgttgtcaccaaccgtggtcctgcctgactacctgaagggactcttcagcagtgtgccggccagccggcccagcgagcagctgctgcagcaggtgtccaagctggcttcactgcagcatcgcgccaaggaccacttctacctgccgagcgtgacctcgtggccgggcatggtggtgcacgcctgtaacgccagctactcgggaggctgaggcagaagaattgcttgaacgcaagaggcagaggttgcagtgagctgagattgtaccactacactccagcctgggcaatagagcgggaagtccaggagtacatcccagcccagctctaccgtacaacggcaggctcgacctggctcaacctggtcagccagcaccggcagcagacacaggcgctcagcccccaccaggcccgtgcccagtttctgggcctcctcagcgccttacctatgttcggctcctccttcttcttcatccagagctgcagcaacattgctgtgccagccccttgcatccttgccatcaaccacaatggcctcaactttctcagcacagagactcatgtaagagctggggaagtgttggatgggcgtggactgtcactgtcacctgcagggactggaactgtgtcgtgtggtggccgtgcacgtggagaacctgctcagtgcccatgagaagcggctcacattgccccccagcgagatcaccctgctctga

SEQ ID NO: 156911 - DNA, 568 bp, Homo sapiens
  Payload ID: 10751
  Gene Symbol: MYO15A
  Gene Name: myosin XVA
  ENST ID: ENST00000578472
  CDS Start-End: 200-568
aagtaaaaggcgtgggcgggctgaagggggtcccccagtcagggcccgctctgctgaccatggggaggacgccctggcgctcccaccctacacaatgctcgagtttgcccagaagtatttccgagaccctcagaggagaccccaggatggcctcaggctgaaatccaaggagcctcgggagtccagaaccttggaggacatgctttgcttcaccaagactcccctccaggaatccctcatcgaactcagcgacagcagcctcagcaagatggccaccgacatgttcctagctgtaatgaggttcatgggggatgccccactgaagggccagagtgacctggacgtgctttgtaacctcctgaagctgtgcggggaccatgaggtcatgcgggatgaatgttactgccaagttgtgaagcagatcacagacaataccagctccaagcaggacagctgccagcgaggctggaggctgctgtatatcgtgaccgcctaccacagctgctctgaggtcctccacccacacctcactcgcttcctccaagacgtgagccggaccccaggcctg

SEQ ID NO: 156912 - DNA, 11860 bp, Homo sapiens
  Payload ID: 10751
  Gene Symbol: MYO15A
  Gene Name: myosin XVA
  ENST ID: ENST00000615845
  CDS Start-End: 339-10931
gggctgggcctcccttccccataacactgagctgctctgctgggccaaccgtgctcctgggccagccagaggacccccatgaggcggcatgcaggcggggagcaggccacagaacgcagggtgaaacccaaggcgctctagaggagatgaattatggatccgccctcccggaatcctggctcggccctccccacgccacccagggccagtcgggtctgctcacagcccgaggaggccgcgtgtccagccgcgggcaagagacagagcaggtccctgtgtctccaagtccctgagcccgtgacaccggccccaggccctgtagagagcaggcagccaccatggcgaaggaggaagatgaggagaagaaagccaagaaagggaagaaggggaagaaggcaccggagccggagaagcccaaacggagcctgaaggggacgtcgcggctgttcatgggcttccgcgaccgtacacccaagatctccaagaagggccagttccgcagcgcctcggccttcttctggggcctccacaccggcccccagaagaccaagcgcaagaggaaggcccgcaccgtgctcaagtccacgtcaaagctcatgacgcagatgcgcatgggcaagaagaagcgggcgatgaagggcaagaagccgtccttcatggtgatccgcttcccaggccgccgtggctacggccgcctgcggccgcgcgcccggtcactcagcaaagcgtccacggccatcaactggctcacaaaaaagttcctcctcaagaaggccgaggagtcgggcagcgaacaggccacagtggacgcctggctgcagcgctcgagctcccgcatgggctcccgcaaactccccttcccgtcgggtgccgagatcctgcggcctgggggccggctccggaggttcccccgcagccgcagcatctacgcgtcaggcgagcccctgggcttcctgcccttcgaggacgaggccccattccatcactcgggctcccgcaagtcgctgtacgggcttgagggcttccaggacctgggcgagtattatgactatcaccgcgacggcgacgactactacgaccggcagtcactccaccgctacgaggagcaggaaccctacctggcgggcctcggcccctacagcccggcctggccaccctacggcgaccactactacgggtacccgcccgaggatccctacgactactaccaccccgactattacggtggcccctttgatccggggtacacctacggctacggctacgacgattacgaacccccatatgcgcccccgtcggggtactcgtctccttacagctaccacgatgggtacgagggcgaggcgcacccttatggctactacctggatccctatgcgccgtacgacgcgccatacccaccctatgacctcccataccacactccctacgatgtaccctactttgatccctacggagtccactacaccgtcccctatgccgaaggcgtctatggcggtggggacgaggccatctacccccccgaggtgccctatttttacccggaggagtcggcttcggcctttgtgtacccctgggtaccaccgcccatcccgtcgccccacaacccgtatgcccacgccatggatgacatcgccgagctggaggaaccagaggacgcgggcgtagagcgtcaggggacctccttccgcctgcccagcgccgccttcttcgagcagcaaggcatggataagcccgccaggtccaagctgtccctcatccgcaagttccgcctcttcccgcgaccccaggtgaagctgtttgggaaggagaagctggaggtgcccctgccaccctctctggacattcctctccccttgggggatgcggacgaagaagaggacgaggaggagctgcccccggtttccgctgtgccctacggccaccctttctggggcttcctcacgccgcgccagcgcaacctccagcgcgcgctgtcggccttcggcgcccaccggggcctgggcttcggccctgagtttggccgccccgtgcctcgccctgccacctcgcttgcgcggttcctcaagaagacgctgtcggagaagaagcccatcgcgcggctcaggggcagccagaaggcccgggcgggcggccctgctgtcagggaggcggcctacaaacgcttcggctacaagctggctggcatggaccccgagaagcccggcacgcccatcgtgctgaggagggcccagccacgcgctcgcagcagcaacgacgcgcgccgcccgcccgcgccacagcccgcgcccaggaccctctcccactggagcgcgctcctgtctccgcccgtgcccccgcggcccccaagctccgggcccccgcccgcgccgccgctctccccggcgctctcgggcctgccccggccggcctcgccctacggctccctccgccgccacccgccgccctgggccgccccagcgcacgtgccaccggcgccgcaggccagctggtgggccttcgtggagccccctgccgtgagcccggaggtgccccccgacctactagccttcccagggccccgaccctcgttcaggggctcccgccggagaggggcggctttcggcttccccggggcctctccacgggcgtcgcggaggcgagcttggtcaccgctggcctcgccccagccctcgctgaggagctcgccgggcctcggctactgctcacccttggcgcccccgtcgcctcagctgtccttgcgcacgggccccttccagccgcccttcctgcccccggcccgccggccccgctcgctgcaggagtccccagccccacgccgagccgctgggcgcctgggcccacccggctcgccgctgccgggctcacccaggccgccctcgccgcccctggggctctgccacagcccgcggcgcagctccctgaatctgccctcgcgcctcccgcacacgtggcggcgcctcagcgagccacccactcgggctgtgaagccgcaagtgcgcctgcccttccaccgaccgcccagggccggggcctggcgggcgcccctggaacaccgggagagcccgcgagaacccgaggactcagagacgccctggactgtgcccccactggcccccagctgggacgtggacatgcctcccacccaacgcccaccctccccctggccaggaggtgcaggcagccgccgaggcttttccaggccaccccctgtgccggaaaacccctttctccagctcctgggccctgtgccatcccccaccctccagcctgaggatccagctgctgatatgaccagggtcttcctgggcagacaccatgagccggggcctggacagctcaccaaatcagctggcccaacccctgagaagcctgaagaagaggccaccctgggggacccccagctgccagcagagaccaagcctccaaccccagcacctcccaaggatgtcactccccccaaggatatcactccccccaaggatgtcctcccagagcaaaagacattaaggcccagcctctcatacccactggctgcgtgtgaccagaccagggccacatggccaccatggcaccgctggggaacactgccccaagccgcagcccccttggcgcccatcagggccccagagcccctgcccaaggggggtgaacggcgccaggcagcccctgggcgttttgctgtggtcatgcctcgtgtgcagaagctgagctctttccagcgagttgggcctgcaaccctgaagcctcaagtccagcccattcaggaccccaagccaagagcctgtagtcttcgctggtcctgcctctggcttcgggcagatgcctatggaccctggccacgagtacacacccatccccagtcctgccacctgggccctggagctgcctgcctgtcccttaggggctcctgggaggaggtcggcccgccaagctggcggaacaagatgcactccatccgcaacctgccatccatgcggttccgtgagcagcacggggaggatggtgtggaggacatgacacagctggaagacctccaggaaaccactgtgctgtccaacctcaagattagatttgaacggaacctcatctacacatacattgggagcatcctggtgtcggtgaacccataccaaatgtttggaatctatgggccggagcaggtgcagcagtacaacggacgggccctgggagagaatcccccgcacctctttgctgttgcaaatctcgccttcgccaaaatgctcgatgccaaacagaaccagtgcataatcattagtggagagagcggctctggcaaaactgaggccaccaagctgattctgcgctacctggccgccatgaaccagaaacgggaggtcatgcagcaggtccagatcctggaggcaacacccctcttggagtccttcggtaatgccaaaaccgtcaggaacgacaactccagccgctttgggaagtttgtggaaatctttctggaagggggcgtgatctctggtgccataacctcccagtacctgcttgagaaatccaggatcgtgtttcaggccaaaaacgagaggaattaccacatcttctacgagttgctggccgggttgcctgcccagctcaggcaggcctttagcctgcaagaggctgagacctactactatctgaaccagggtgggaactgtgagatagcaggaaagagcgatgcagatgactttcgccggctcctggctgccatggaggtgttgggcttcagcagtgaggaccaggacagcatcttccgcatcctggcctccatcctgcacctgggcaacgtctactttgagaagtatgagacggatgcacaggaggtggcctcagtggtgagtgcccgagagatccaggccgtggcagagctgctgcagatctcccctgagggcctgcagaaggccatcaccttcaaagtgaccgagacaatgcgagagaagatcttcacgcccctaactgtggagagcgctgtggatgccagggacgccatcgccaaggtcttgtatgcactgctgttcagctggctcatcaccagggtcaacgcgctggtgtccccaaggcaggacacactgtccatcgccatcctggacatctatggtttcgaggacctgagcttcaacagctttgagcagctgtgtattaactacgcaaacgagaaccttcagtaccttttcaacaagatcgtcttccaggaggagcaggaggagtacatccgtgagcagatagactggcaggagatcacctttgctgacaaccagccctgcatcaacctcatctcactgaagccttatggcatcctgcggatccttgacgaccagtgttgctttccccaggctacagaccacaccttcctacagaagtgccactaccatcatggcgccaacccgctctattccaaacccaagatgccgctgcctgagttcaccatcaagcactatgcaggcaaggtcacctaccaggtgcacaagttcctggacaagaaccacgaccaagtgcgccaggatgtgctggacctgttcgtacggagccggacacgggtggtggcacacctcttctccagccatgccccacaggctgcccctcagcgcctgggcaagagcagctccgtcactcggctctacaaggcgcacactgtggccgccaagttccagcagtcactcctggatctggtggaaaagatggagaggtgcaaccccttgttcatgcgttgcctgaagcccaaccacaagaaggagccaggtctctttgagccagatgtggtaatggcacaattacgctattcaggggtgctggagaccgtgaggatccgcaaggagggatttccagtgcgcctgcctttccaggggttcatcgacaggtactgctgtctagtggccctcaagcatgacctgccggctaatggggacatgtgtgtgtcagtgctgagtcgcctgtgcaaagtcatgccaaacatgtaccgtgttggggtcagcaagctgttccttaaggaacacctataccagctgctggagagtatgcgagagcatgtcctgaatctggcagccctcactctgcagcgctgcctccgtggcttcttcattaagcggcgattccgctctctgcgccacaagatcatcctgctgcaaagccgggcccgtggctaccttgccaggcaacgctatcagcagatgaggaggagtctggtgaagttccggtccctggtacacgcatacgtgagccgccgacgctatctcaagctgagggcagagtggaggtgccaggtggagggggcgctgctgtgggagcaggaggagctgagcaagcgggaggtagtcgctgtggggcacctggaggtaccggctgagctggctgggctcttgcaagcagtggcaggcctcgggctggcccaggtgcctcaggtggcccctgtgaggactcctcgactccaggctgagccccgtgtcacactgcccctggacatcaacaactatcctatggccaagtttgtccagtgccacttcaaggaacctgcctttgggatgctgacagtgcccctgaggacacccctcacgcagctgccagccgagcaccatgcagaagccgtgagcatcttcaagctgatcctgcgcttcatgggcgacccccacctgcatggtgcccgggagaacatcttcgggaactacatcgtgcagaaggggctggcggtgcctgagctgcgggatgagatcctggcacagctggccaatcaggtgtggcacaatcacaatgcccacaatgctgagcggggctggctgctgctggccgcctgcctcagtggctttgcaccttccccgtgcttcaacaagtaccttctcaagtttgtgtctgattatgggcggaatggcttccaggctgtgtgtcagcaccgcctcatgcaggccatgggccgggcccaacagcagggctcgggggctgcccgcaccttacccccgacccagctcgagtggacagcgacctatgagaaggccagcatggcgctggacgtgggctgcttcaatggtgaccagttctcctgcccggtgcactcctggagtacgggggaagaggtggctggagacattctgaggcacagggggctggcagatggctggcgcggctggaccgtggccatgaagaatggtgtccagtgggcagagctggctggccacgactacgtgttagacctggtgtcggacctggagctgctcagggacttccctcgacagaagtcctacttcattgtgggcacagaggggcctgcagccagcaggggaggccccaaagtggtgtttgggaacagctgggactcggatgaggacatgtccactagaccccagccccaggagcacatgcccaaagtacttgactctgatgggtacagcagccacaatcaggacggtacaaatggggagactgaggcccaaagagggacagcaacccaccaagagtcagacagtcttggagagcctgctgtgccccacaaggggctggactgctacctggatagcctctttgaccctgtgctgtcctacggggatgcggacctggagaagccaacagccattgcctaccgcatgaaagggggaggccagcccggtggaggcagcagtagtggtactgaagacacccccaggagacccccagagccaaagccaatcccaggcctggatgcctccacattggctctgcagcaagccttcatccacaaacaggccgtgctgctggcccgggagatgaccctgcaggccacggcactccagcagcagcccctgagtgctgccctgagatccttgcccgcagagaaacccccagcaccagaggcacagccgacgtctgtaggcaccggtccccctgccaaacccgtgctcctgcgtgccactccaaagcccttggccccagcccctctggccaaggctccaaggctccccatcaagcctgtggctgcccctgttctagctcaggatcaggcttctccagaaaccacttcaccctccccagagctggtccggtactctacgctcaactctgagcacttcccacagcccacacagcagatcaagaatattgtcaggcagtaccagcagccgttccggggaggccggcctgaggccctcaggaaggatggcgggaaagtgttcatgaagcggccagaccctcatgaggaggccctgatgatcctgaaagggcagatgacccacctggcagctgcacctggcacccaggtgtccagagaggccgtggccctggtgaagccggtgaccagtgcaccaaggccatccatggcacccacttcagctctgccctcgcgatcgctggagccccctgaggaactcacgcagacgcggctgcaccgcctcatcaatcccaacttctacggctatcaggacgccccctggaagatcttcctgcgcaaagaggtgttttaccccaaggacagctacagccatcctgtgcagcttgacctcctgttccggcagatcctgcacgacacgctctccgaggcctgccttcgcatctctgaggatgagaggctcaggatgaaggccttgtttgcccagaaccagctggacacacagaagcctctggtaacggaaagcgtgaagcgggccgtggtcagcactgcacgagacacctgggaggtctacttctcccgcatcttccccgccacgggcagcgtgggcactggtgtgcagctcctagctgtgtcccacgtgggcatcaaactcctgaggatggtcaagggtggccaggaggccggcgggcagctgcgggtcctgcgtgcatacagctttgcagatatcctgtttgtgaccatgccctcccagaacatgctggagttcaacctggccagtgagaaggtcatcctcttctcagcccgagcgcaccaggtcaagaccctggtagatgacttcatcttggagctgaagaaggactctgactacgtggtcgctgtgaggaacttcctgcctgaggaccctgcgctgctggctttccacaagggtgacatcatacacctgcagcccctagagccacctcgagtgggctacagtgctggctgcgtggttcgcaggaaggtggtgtacctggaggagctgcgacgtagaggccccgactttggctggaggttcgggaccatccacgggcgcgtgggccgcttcccttcggagctggtgcagcccgctgctgcccccgacttcctgcagctgccaacggagccaggccgcggccgagcagccgccgtggccgctgctgtggcctctgcagccgctgcacaggaggtgggccgcaggagagagggtcccccagtcagggcccgctctgctgaccatggggaggacgccctggcgctcccaccctacacaatgctcgagtttgcccagaagtatttccgagaccctcagaggagaccccaggatggcctcaggctgaaatccaaggagcctcgggagtccagaaccttggaggacatgctttgcttcaccaagactcccctccaggaatccctcatcgaactcagcgacagcagcctcagcaagatggccaccgacatgttcctagctgtaatgaggttcatgggggatgccccactgaagggccagagtgacctggacgtgctttgtaacctcctgaagctgtgcggggaccatgaggtcatgcgggatgaatgttactgccaagttgtgaagcagatcacagacaataccagctccaagcaggacagctgccagcgaggctggaggctgctgtatatcgtgaccgcctaccacagctgctctgaggtcctccacccacacctcactcgcttcctccaagacgtgagccggaccccaggcctgccctttcaggggatcgccaaggcctgcgagcagaacctgcagaaaaccttgcgcttcggaggtcgtctggagctccccagcagcatagagcttcgggccatgttggcaggccgcagttccaagaggcaactctttcttcttcctggaggccttgaacgccatctcaaaatcaaaacatgcactgtggccctggacgtggtggaagagatatgtgctgagatggctctgacacgccctgaggccttcaatgaatatgttatcttcgttgtcaccaaccgtggccagcatgtgtgcccactcagtcgccgtgcttacatcctggatgtggcctcagagatggagcaggtggacggcggctacatgctctggttccggcgtgtgctctgggatcagccactcaagttcgagaatgagctatatgtgaccatgcactacaaccaggtcctgcctgactacctgaagggactcttcagcagtgtgccggccagccggcccagcgagcagctgctgcagcaggtgtccaagctggcttcactgcagcatcgcgccaaggaccacttctacctgccgagcgtgcgggaagtccaggagtacatcccagcccagctctaccgtacaacggcaggctcgacctggctcaacctggtcagccagcaccggcagcagacacaggcgctcagcccccaccaggcccgtgcccagtttctgggcctcctcagcgccttacctatgttcggctcctccttcttcttcatccagagctgcagcaacattgctgtgccagccccttgcatccttgccatcaaccacaatggcctcaactttctcagcacagagactcatgaattgatggtgaagttccccctgaaggagatccagtcgacgcggacccagcggcccacggccaactccagctacccctatgtggagattgcgctgggggacgtggcggcccagcgcaccttgcagctgcagctggagcagggactggaactgtgtcgtgtggtggccgtgcacgtggagaacctgctcagtgcccatgagaagcggctcacattgccccccagcgagatcaccctgctctgacccagcccccagccctccagtaccttctgccagaagactcactgtgtggcctcagagaaatcactgaacctctcaggatcaatgacccctgtaaggggccagagccttggaggacactaagaggaggcaggaggagcaactcaaatccccaagaacacaagaagacccatcctgaactgggatggaatggcagcatgcaaacttggatcagatagcaggaggaactttcaaaagtctggcccactgtgcagtggagcagaaggcaggaccatgaggcctcctgccatgtacccattgcagaccctgcccctaactcctgcctatgacacagaagccccacaccagttgcccagatgaactggcctctgcctttggtttactcagggtctgatgttggaatctgctccaactccacaccctagcccttacatgtcctcctaaggggcccctccttgtgctgccagtcagcctggatttctggtctttggttatttctgtgcaaacaaaaggtgtgcctggcagccatttctccatggagttgctaagtggccggaaaacaagcctgagggaggaggcaggagttggagttaccttaggcccctgattcactgcctatgaacagaccatcccccactccttgggtatccccaaccccagacccccatcacttgatgggccacacaagtttgagagtggtacaagggagaagtttgggaaaagccttcttggaaaatgggacattagcattgagttttgaaagatgagtaggagtttgctaagaatagatggaagacagcaggataaacattccagagaaaatcatgtttattccctgctgtatcttccagaacctaggaggatgcctaacagagagtaagcacttaaaaaatatttgtcatatgaatgaaaaaataaacgagtgaatgttg

SEQ ID NO: 156913 - DNA, 567 bp, Homo sapiens
  Payload ID: 10752
  Gene Symbol: MYO15B
  Gene Name: myosin XVB
  ENST ID: ENST00000580096
  CDS Start-End: 1-61
gctgccggtggccaccctggagccagcgccctgcccacccttggagccaggcacacagtgacgactcggaggccaccagcctgtcctctgtggcctatgcctttctgcccgactcccacagctacaccatgcaggaattcgcccggcgttacttccggaggtcccaggccttgctgggccagactgatggaggtgccgcaggaaaggacacggacagcctggtgcagtacaccaaggctcccatccaggagtcgctcctcagcctcagtgatgatgtgagcaagctggctgtagccagcttcctggccctgatgcggtttatgggtgaccagtccaagccccggggcaaggatgagatggatctgctctatgaactgctgaagctgtgccagcaggagaagctgagggatgagatttactgccaggttatcaagcaggtcacgggacacccccggccggaacactgcactcgaggctggagcttcctcagccttctcacaggcttcttccccccgtcgaccaggctgatgccctacctgaccaagtttctgcaggattcaggcccca

SEQ ID NO: 156914 - DNA, 6323 bp, Homo sapiens
  Payload ID: 10752
  Gene Symbol: MYO15B
  Gene Name: myosin XVB
  ENST ID: ENST00000633867
  CDS Start-End: 1-4593
atgaaggaagcctctggggtggggggagggcacagccccatgtgcccacctcactgccacatgcccccaggccctgcgggtgaatggcctggagcaactgtgcaacaacctcgccagcgagcgcctacagctcttctccagccagatgctgctggcccaggaggaggaggagtgtcggcgggagttgctgtcctgggtgcctgtccctcagcctccgagggagtcctgcctagacctcctggtagatcagccccacagcctcctgagtatcctggacgcccagacatggctgtcccaggctggagtgcaatggtgcggtctcggctcactgcaacctccacctcccaggccacggaccacaccttcctccagaagagccactatcaccatggtgaccaccccagctatgccaagccccggctgcccctgcccgtgttcaccgtgcgacattatgcagggactgtcacctaccaggttcacaagtttttaaacagaaaccgggatcagctggaccctgctgtggtggagatgcttggccagagccagctccagctggtgggcagcctgttccaggaggcagagccccagtccaggggagggcgaggcagacccacgctggcctctcgcttccagcaggccctggaggacctcatagcccggctgggcaggagccatgtctatttcatccagtgcctcacccctaaccctggaaagcttccaggcctctttgacgtgggacatgtgacagagcaactgcaccaggcagccatactggaggccgtgggcacccgcagtgccaacttccccgtgcgtgtgccctttgaggccttcctggccagcttccaggccctggggtcagaagggcaggaagacctctctgaccgggagaagtgtggtgccgtcctgagccaggtgctgggggccgaatcacctctctatcaccttggagccaccaaggtcctgctgcaggagcagggctggcagcggctggaggagctccgggaccagcagcgctcccaggccctggtcgacctgcaccgcagcttccacacctgcatctcccgccagcgcgtcctgccccggatgcaggctcgcatgcgtgggttccaggccaggaagcggtacctccggcggcgggcagctttgggacagctgaacaccatcctgctggtggcccagcccctgctccagaggcggcagagactgcagcttgggcgttggcagggctggcatagcagcgaaagggccttggagagagtgccaagcatggagctggggcgcttggagatcccggctgagctggccgtcatgctgaagacggcggaaagccatcgggacgccctggctgggagcatcaccgagtgcctgccgcctgaggttcctgcccggcccagcctgactctcccagcagacattgacctgttccctttctccagcttcgtcgccatcggctttcaggaaccgtccctgcccaggccagggcagccactggcgaagcccctaacccagctggatggagacaaccctcagcgtgccctggacatcaacaaagtgatgctgcggctcctgggggacggatccctggagtcctggcagaggcagatcatgggcgcatacctggtgcggcaggggcagtgccggccagggctgcggaatgagctctttagccagctggtggcccagctatggcagaacccagatgaacagcagagccagcgtggctgggccctcatggctgttttgctcagcgcctttcccccactgcctgtcctacagaagccactgctcaagttcgtgtctgaccaggcccccaggggcatggcagcgctgtgccagcacaagctgctgggggccttggagcagtcgcagctggcctcgggggccactcgggcccaccccccgacccagctggagtggctggccggatggcggcggggccgcatggcgctggatgtgttcaccttcagcgaggagtgctactcggccgaggtggagtcttggaccaccggggagcagctggctgggtggatcctgcagagcagaggcctggaggcgcctccccggggctggtctgtgtcactgcactccagggacgcatggcaggacttggctggctgcgactttgtgctggacctgatcagccagactgaggacctgggggacccagctcgcccccgcagctaccccatcactcctcttggctcagccgaggccattccccttgcccctggcattcaggccccctcactgcccccaggaccccctccaggtccagccccaacgctgcccagcagggaccacacaggggaggtccagaggtcagggagcctggacggcttcctggaccagatcttccagccagtgatatcctccggcctcagcgatctggaacaaagctgggctctgagcagccgcatgaagggagggggcgccattgggcccacacagcagggctaccccatggtgtacccaggaatgattcagatgcctgcataccagccaggcatggtccctgcacccatgcccatgatgccagcaatgggcacagtccctgccatgccagccatggtggtgccgccgcagccaccgcttcccagcctggatgcagggcagctggccgtccagcagcagaactttatccagcagcaggcgctaatcctggcccagcagatgacagcccaggccatgtccctgtccctggagcagcagatgcagcagcggcagcagcaggctcgggcctccgaggctgcgtcccaggcctcaccctcagccgtcacctccaagcccaggaagccccccacacccccggagaagccacagcgtgacctgggatcagagggtggctgcctgagggagacctccgaggaggctgaagacaggccctatcagcccaagagcttccagcagaaacggaactatttccagaggatggggcagccacagatcacagtgaggacgatgaagcccccggccaaggtccacatcccccagggggaagcgcaggaggaggaggaggaggaggaggaggaggaggagcaggaggagcaagaagtggaaacaagagcagtgccgtcccctcctcctccccccatcgtgaagaagccattgaagcaaggtggggccaaagctccaaaagaggctgaggctgagccagccaaggagacagcggccaagggccatggccaagggccagcccaaggcagggggactgtggtgcgcagctcagactccaagcccaagcggccacaacccagcagggaaattggcaacatcatccgcatgtaccagagccgcccgggccccgtgcctgtgcccgtgcagccatccaggcctcccaaagctttcctgaggaaaatcgaccccaaggacgaggctctggccaagctgggtatcaacggtgcccactcgtccccgccgatgctgtcccccagcccaggaaagggccccccgccagctgtggctcctcgacccaaggccccgctacagcttgggccctctagctccatcaaggaaaagcaggggccccttctggacctgtttggccagaagctgcctattgcccacacacccccacctccaccagcgccaccactgcctctgcccgaggacccagggaccctttcagcagagcgtcgttgcttgacacagcccgtggaggaccagggggtctccacccagctactcgcgccctctggcagcgtgtgcttctcctacaccggcacgccctggaagttgttcctacgcaaggaggtgttctacccacgggagaacttcagccatccctactacctgaggctcctctgtgagcagatcctacgggacaccttctccgagtcctgtatccggatttcccagaatgagcggcggaaaatgaaagacctgctgggaggcttggaggtggacctggattctctcaccaccaccgaagacagcgtcaagaagcgcatcgtggtggccgctcgggacaactgggccaattacttctcccgcttctttcctgtctcgggcgagagtggcagcgacgtgcagctgttagccgtgtcccaccgtgggctgcgactgctcaaggtgacccaaggccccggcctccgccccgaccagctgaagattctctgctcatacagctttgcggaggtgctgggtgtggagtgccggggcggctccaccctggagctgtcactgaagagcgagcagctggtgctgcacacagcccgggcaagggccatcgaggcgctggttgagctattcctgaatgagcttaagaaggactccggctatgtcatcgccctgcgcagctacatcactgacaactgcagcctcctcagcttccaccgtggggacctcatcaagctgctgccggtggccaccctggagccaggctggcagtttggctctgccgggggccgttccggactctttcctgccgacatagtgcagccggctgccgctcccgacttttccttctccaaggagcagaggagtggctggcacaagggtcagctgtccaacggggaaccagggctggctcggtgggacagggcctcagaggtgaggaagatgggagagggacaagcagaggcaaggcctgcctgagactgaggaaggaaaggggtttgaccactcccgaggctgccatgcggtgggaccaccctgctgtccgtctcctgtggctgcccctctgcccgctcctgatggctcgccttgtctctccagcaagactgtgcactccttgcaggcaggggctgggctggatgctgctcttgtgtcccacgtggtacttagttcaaggctgccccagcagatgcttaataaacagctcttcactttcctggcttctggtcttgctcctttggtgtctggctggggagggatggggctggggcaggacccctgggacagggcactggacactcaggtggcaccaggtttcttgtgatcccagcgccctgcccacccttggagccaggcacacagtgacgactcggaggccaccagcctgtcctctgtggcctatgcctttctgcccgactcccacagctacaccatgcaggaattcgcccggcgttacttccggaggtcccaggccttgctgggccagactgatggaggtgccgcaggaaaggacacggacagcctggtgcagtacaccaaggctcccatccaggagtcgctcctcagcctcagtgatgatgtgagcaagctggctgtagccagcttcctggccctgatgcggtttatgggtgaccagtccaagccccggggcaaggatgagatggatctgctctatgaactgctgaagctgtgccagcaggagaagctgagggatgagatttactgccaggttatcaagcaggtcacgggacacccccggccggaacactgcactcgaggctggagcttcctcagccttctcacaggcttcttccccccgtcgaccaggctgatgccctacctgaccaagtttctgcaggattcaggccccagccaagagctggcccggagcagccaggagcacctccagcgcacagtcaaatatggggggcgccggcggatgcccccaccgggtgaaatgaaggctttcctgaaaggacaagcgattcgcctgcttcttattcacctgccggggggtgtggattataggacgaatatccagactttcacagtagcagcagaagtgcaggaggagctgtgccggcaaatgggtatcacggagcctcaggaagtgcaggaattcgccctcttcctcatcaaagagaagagccagctggtgcggcccctgcagcccgccgaatacctcaacagcgtggtagtggaccaggacgtgagcctgcacagccggcggctccactgggagaccccactgcacttcgataactccacctacatcagcacccactacagccaggtgctgtgggactaccttcaggggaagctgccagtcagcgccaaggcagacgcgcagctcgccaggctggccgccctgcagcacctcagcaaggccaacaggaataccccctcagggcaggacctgctagcttacgtgccaaagcagctgcaacggcaggtgaacacggcctccatcaagaacctgatgggtcaggagctgagacggctggaaggacacagcccccaggaagcacagatcagcttcattgaggccatgagccagctgcccctcttcggctacaccgtctatggggtgctgcgagtgagcatgcaggccctgtccggacccactctcctggggctcaaccgccagcatctcatcctcatggaccccagctcccagagcctgtactgccgcattgccctgaagagcctgc

SEQ ID NO: 156915 - DNA, 834 bp, Homo sapiens
  Payload ID: 10752
  Gene Symbol: MYO15B
  Gene Name: myosin XVB
  ENST ID: ENST00000578220
  CDS Start-End: 1-834
ggccaccagcctgtcctctgtggcctatgcctttctgcccgactcccacagctacaccatgcaggaattcgcccggcgttacttccggaggtcccaggccttgctgggccagactgatggaggtgccgcaggaaaggacacggacagcctggtgcagtacaccaaggctcccatccaggagtcgctcctcagcctcagtgatgatgtgagcaagctggctgtagccagcttcctggccctgatgcggtttatgggtgaccagtccaagccccggggcaaggatgagatggatctgctctatgaactgctgaagctgtgccagcaggagaagctgagggatgagatttactgccaggttatcaagcaggtcacgggacacccccggccgctgatgccctacctgaccaagtttctgcaggattcaggccccagccaagagctggcccggagcagccaggagcacctccagcgcacagtcaaatatggggggcgccggcggatgcccccaccgggtgaaatgaaggctttcctgaaaggacaagcgattcgcctgcttcttattcacctgccggggggtgtggattataggacgaatatccagactttcacagtagcagcagaagtgcaggaggagctgtgccggcaaatgggtatcacggagcctcaggaagtgcaggaattcgccctcttcctcatcaaagagaagagccagctggtgcggcccctgcagcccgccgaatacctcaacagcgtggtagtggaccaggacgtgagcctgcacagccggcggctccactgggagaccccactgcacttcgataactccacctacat

SEQ ID NO: 156916 - DNA, 8646 bp, Homo sapiens
  Payload ID: 10752
  Gene Symbol: MYO15B
  Gene Name: myosin XVB
  ENST ID: ENST00000621743
  CDS Start-End: 1-4632
atgggcaggaaccagcgcaaagcgccccagcgcctggagaggcccgggaggccggcctcaggggagcaggagtcggggtcggccagcgcggatggcgcgcccagccgggaacgccgttccgaccgcgggcaggcggacagggcgaaaccggcggccgagcctgccaccgccgggggccagggaacccctggtggccgcaggaagcccactgcagaggggaacggcggctgcagacgcccaggggctgggctgtccccgaaagcccaggagaggcaaagcaacgcgcagcgtcagggacgcgggcccaggggcggccgcggggggcgcctggaggagggaagcctctccggaggagaagagctgggcggccgccgtaggaggaagcggaaagataaggggccctcggctcggcggggccgccggacgcccaggagcctcaatggggacacgtcgggtggggacggaggcagctcctgtccggacagcgaaacccgcgaggcccaggagagcggcagccagcgcggcacagcccgggagctgcggcccacgccggagcctacggacatgggctcggaagggacaaaaaccgggccggagtcagcgctggagccaagcagcgacggcctggacagcgactggccccacgcagatacccggggccgggaagggtcgtcggggacggggcccctgggagccagcgagcattccggcggggactccgactcgagtccgctggggaccggacctggacggggctctcgggcagctatggcctccaggaccttcgaggacagctcgcgggctcctcgggacactgggccggccaaggacgcgagcgacaaccgggcgcagcggggcgccgagccagaaacaatgcaggcctcgacggcccgggctccgcgccaccaggtcggaaaggcggtggggcaggtgccagcggcggcaggcgagggcgaagcgggagccgcagcaggagcggggccggaggacccagccccgctggcggccctcctggtggtccgcaggctcctcgcgaggcccccgccaggcgccgcttcccaggccgtgggcccccgccgcgctggcctcaaggagcggctcctgagtgtagcgcgagccctgggcctcctgcgctggctgcggcggcggctgcggctgcggcggcggccgccagagggcgaggggcagggtaccgggccacgggcgagcgaggggtggggccgccggaaaccggacgaggggcggggtcatgggagaggaagcaaggggcggggccgcgggaaagcggatgaagggcggggccacgagcgaggggacgagggtcggggccgcgggaaagcggacgaagggcggggccacgagcgagggtacgaggggcggggctgcgggaaagcggacgaggggcggggtcacgagagaggtgacgagggccgggaccaccagagagggtacgaggggtggggccgtgagcccgggctgcggcaccgtctagcgttgcgcctggctggcttagcagggctggggggtatgccgagggcttcccctggtggccgctccccgcaggtcccgacaagcccagtccccggcgacccttttgatcaggaggacgagactccagatcccaagttcgcggtcgtgttccccaggatccacagggcagggcgggcgtcgagcagccgcagctctgaagaagcgtccgcagatgcccccacgggggaaggccgaggttggcctcgtgcaggggtgggggggcacagtgaggggtgcaggacgagtggggaaggggtgtccgggcttcgtcgcggctccctccttgccccgactgcacccgacgggccttccctcgacgagagcggctccagcagtgaggcggagttggagaccctcaatgacgagcccccggtgcgctgggcgcagggctcaggcccccacgagggtcctaggcttggcgccgccgtgctgctaccccgactctccttggagacccgcctgcagcaggagggagacccgggcctccgtgggtccctgagggagctgtgggaacccgaggatgaggacgaggcggtgctggagagggacctggagctgagcctccggccgggcctggaggcgccacccttccccggtgccaagggcaggagcctcggagacggcctggaagacatggaggacctggcgcggttgcgacacatctttgccatcgtggcatcagcctatgacctggctcagaatactgggcaggacccatgcatcctcctgtgtgggcacagtggctcagggaagacggaagccgccaaaaagatcatgcagttcctaagcagcctggagcaggatcagacggggaaccgagagtgtcaggtggaggatatgctgcctatactcagcagctttggccatgccaagaccatcctcaatgccaatgccagccgcttcggccaggtcttctgcctctacctacagcaaggggtcatcgtgggagcctctgtgtctcattatctacttgagacctccagggtggtgtttcaggcccaggctgagcggagcttccatgttttttacaagctgctggcagggctggactccatagagcgggagcggctctccctgcagggaccggagacttactactacctcaaccagggccaggcctgcaggctgcaaggcaaggaggatgcccaggactttgaggggctgctgaaggcactgcaggggctcggcttgtgcccagaggagttgaatgccgtctgggctgtgctggccgccatcctgcagctgggcaacatctgcttctcctcctcagagcgagagtcccaggaggtggctgctgtgtctagctgggctgagatccacacagcagcccgactgctgcgggtaccaccagagtgcctggagggggctgtcaccaggagggtcacggagacgccctatggccaggtctcgcgatccctgcccgtggaaagtgcctttgatgccagggacgccctggccaaggcactgtattcccgcctcttccaccggcttctgaggagaaccaatgcacggctggcaccaccaggggagggaggcagcattggcaccgtcactgtcgtggatgcctacggctttgaggccctgcgggtgaatggcctggagcaactgtgcaacaacctcgccagcgagcgcctacagctcttctccagccagatgctgctggcccaggaggagcctccgagggagtcctgcctagacctcctggtagatcagccccacagcctcctgagtatcctggacgcccagacatggctgtcccaggccacggaccacaccttcctccagaagagccactatcaccatggtgaccaccccagctatgccaagccccggctgcccctgcccgtgttcaccgtgcgacattatgcagggactgtcacctaccaggttcacaagtttttaaacagaaaccgggatcagctggaccctgctgtggtggagatgcttggccagagccagctccagctggtgggcagcctgttccaggaggcagagccccagtccaggggagggcgaggcagacccacgctggcctctcgcttccagcaggccctggaggacctcatagcccggctgggcaggagccatgtctatttcatccagtgcctcacccctaaccctggaaagcttccaggcctctttgacgtgggacatgtgacagagcaactgcaccaggcagccatactggaggccgtgggcacccgcagtgccaacttccccgtgcgtgtgccctttgaggccttcctggccagcttccaggccctggggtcagaagggcaggaagacctctctgaccgggagaagtgtggtgccgtcctgagccaggtgctgggggccgaatcacctctctatcaccttggagccaccaaggtcctgctgcaggagcagggctggcagcggctggaggagctccgggaccagcagcgctcccaggccctggtcgacctgcaccgcagcttccacacctgcatctcccgccagcgcgtcctgccccggatgcaggctcgcatgcgtgggttccaggccaggtctgcaggcgttggagccagggctgaagtgggtgggcctgtcttcacacattcctccaacagctgttggctgaccgtctgcctcatctacccttgggccagatgctggaagcggtacctccggcggcgggcagctttgggacagctgaacaccatcctgctggtggcccagcccctgctccagaggcggcagagactgcaggagctggggcgcttggagatcccggctgagctggccgtcatgctgaagacggcggaaagccatcgggacgccctggctgggagcatcaccgagtgcctgccgcctgaggttcctgcccggcccagcctgactctcccagcagacattgacctgttccctttctccagcttcgtcgccatcggctttcaggccagggcagccactggcgaagcccctaacccagctggatggagacaaccctcagcgtgccctggacatcaacaaagtgatgctgcggctcctgggggacggatccctggagtcctggcagaggcagatcatgggcgcatacctggtgcggcaggggcagtgccggccagggctgcggaatgagctctttagccagctggtggcccagctatggcagaacccagatgaacagcagagccagcgtggctgggccctcatggctgttttgctcagcgcctttcccccactgcctgtcctacagaagccactgctcaagttcgtgtctgaccaggcccccaggggcatggcagcgctgtgccagcacaagctgctgggggccttggagcagtcgcagctggcctcgggggccactcgggcccaccccccgacccagctggagtggctggccggatggcggcggggccgcatggcgctggatgtgttcaccttcagcgaggagtgctactcggccgaggtggagtcttggaccaccggggagcagctggctgggtggatcctgcagagcagggacgcatggcaggacttggctggctgcgactttgtgctggacctgatcagccagactgaggacctgggggacccagctcgcccccgcagctaccccatcactcctcttggctcagccgaggccattccccttgcccctggcattcaggccccctcactgcccccaggaccccctccaggtccagccccaacgctgcccagcagggaccacacaggggaggtccagaggtcagggagcctggacggcttcctggaccagatcttccagccagtgatatcctccggcctcagcgatctggaacaaagctgggctctgagcagccgcatgaagggagggggcgccattgggcccacacagcagggctaccccatggtgtacccaggaatgattcagatgcctgcataccagccaggcatggtccctgcacccatgcccatgatgccagcaatgggcacagtccctgccatgccagccatggtggtgccgccgcagccaccgcttcccagcctggatgcagggcagctggccgtccagcagcagaactttatccagcagcaggcgctaatcctggcccagcagatgacagcccaggccatgtccctgtccctggagcagcagatgcagcagcggcagcagcaggctcgggcctccgaggctgcgtcccaggcctcaccctcagccgtcacctccaagcccaggaagccccccacacccccggagaagccacagcgtgacctgggatcagagggtggctgcctgagggagacctccgaggaggctgaagacaggccctatcagcccaagagcttccagcagaaacggaactatttccagaggatgggcctcccaaagctttcctgaggaaaatcgaccccaaggacgaggctctggccaagctgggtatcaacggtgcccactcgtccccgccgatgctgtcccccagcccaggaaagggccccccgccagctgtggctcctcgacccaaggccccgctacagcttgggccctctagctccatcaaggaaaagcaggggccccttctggacctgtttggccagaagctgcctattgcccacacacccccacctccaccagcgccaccactgcctctgcccgaggacccagggaccctttcagcagagcgtcgttgcttgacacagcccgtggaggaccagggggtctccacccagctactcgcgccctctggcagcgtgtgcttctcctacaccggcacgccctggaagttgttcctacgcaaggaggtgttctacccacgggagaacttcagccatccctactacctgaggctcctctgtgagcagatcctacgggacaccttctccgagtcctgtatccggatttcccagaatgagcggcggaaaatgaaagacctgctgggaggcttggaggtggacctggattctctcaccaccaccgaagacagcgtcaagaagcgcatcgtggtggccgctcgggacaactgggccaattacttctcccgcttctttcctgtctcgggcgagagtggcagcgacgtgcagctgttagccgtgtcccaccgtgcgctagcccacgaccctgggctagaggtgggggcaggtggcaaggtgacctcagttcatgcccgatccctgcgcagctttgcggaggtgctgggtgtggagtgccggggcggctccaccctggagctgtcactgaagagcgagcagctggtgctgcacacagcccgggcaagggccatcgaggcgctggttgagctattcctgaatgagcttaagaaggactccggctatgtcatcgccctgcgcagctacatcactgacaactgcagcctcctcagcttccaccgtggggacctcatcaagctgctgccggtggccaccctggagccaggctggcagtttggctctgccgggggccgttccggactctttcctgccgacatagtgcagccggctgccgctcccgacttttccttctccaaggagcagaggagtggctggcacaagggtcagctgtccaacggggaaccagggctggctcggtgggacagggcctcagagcgccctgcccacccttggagccaggcacacagtgacgactcggaggccaccagcctgtcctctgtggcctatgcctttctgcccgactcccacagctacaccatgcaggaattcgcccggcgttacttccggaggtcccaggccttgctgggccagactgatggaggtgccgcaggaaaggacacggacagcctggtgcagtacaccaaggctcccatccaggagtcgctcctcagcctcagtgatgatgtgagcaagctggctgtagccagcttcctggccctgatgcggtttatgggtgaccagtccaagccccggggcaaggatgagatggatctgctctatgaactgctgaagctgtgccagcaggagaagctgagggatgagatttactgccaggttatcaagcaggtcacgggacacccccggccggaacactgcactcgaggctggagcttcctcagccttctcacaggcttcttccccccgtcgaccaggctgatgccctacctgaccaagtttctgcaggattcaggccccagccaagagctggcccggagcagccaggagcacctccagcgcacagtcaaatatggggggcgccggcggatgcccccaccgggtgaaatgaaggctttcctggtagcagcagaagtgcaggaggagctgtgccggcaaatgggtatcacggagcctcaggaagtgcaggaattcgccctcttcctcatcaaagagaagagccagctggtgcggcccctgcagcccgccgaatacctcaacagcgtggtagtggaccaggacgtgagcctgcacagccggcggctccactgggagaccccactgcacttcgataactccacctacatcagcacccactacagccaggtgctgtgggactaccttcaggggaagctgccagtcagcgccaaggcagacgcgcagctcgccaggctggccgccctgcagcacctcagcaaggccaacaggaataccccctcagggcaggacctgctagcttacgtgccaaagcagctgcaacggcaggtgaacacggcctccatcaagaacctgatgggtcaggagctgagacggctggaaggacacagcccccaggaagcacagatcagcttcattgctgacctgggggaccaagcagagcaggttccagggccccagcagtcagatttcctgcctgcaccctctccacccgcagaggccatgagccagctgcccctcttcggctacaccgtctatggggtgctgcgagtgagcatgcaggccctgtccggacccactctcctggggctcaaccgccagcatctcatcctcatggaccccagctcccagagcctgtactgccgcattgccctgaagagcctgcagcggctccacctgctaagccctctggaggagaaggggccccctggcctggaagtcaactatggctcagctgacaacccccagaccatctggtttgagctgccacaggcccaggagctgctatacaccactgtcttcctgatagacagcagtgcctcttgcactgagtggcccagcatcaactga

SEQ ID NO: 156917 - DNA, 5709 bp, Homo sapiens
  Payload ID: 10752
  Gene Symbol: MYO15B
  Gene Name: myosin XVB
  ENST ID: ENST00000584516
  CDS Start-End: 1-2283
atgggcaggaaccagcgcaaagcgccccagcgcctggagaggcccgggaggccggcctcaggggagcaggagtcggggtcggccagcgcggatggcgcgcccagccgggaacgccgttccgaccgcgggcaggcggacagggcgaaaccggcggccgagcctgccaccgccgggggccagggaacccctggtggccgcaggaagcccactgcagaggggaacggcggctgcagacgcccaggggctgggctgtccccgaaagcccaggagaggcaaagcaacgcgcagcgtcagggacgcgggcccaggggcggccgcggggggcgcctggaggagggaagcctctccggaggagaagagctgggcggccgccgtaggaggaagcggaaagataaggggccctcggctcggcggggccgccggacgcccaggagcctcaatggggacacgtcgggtggggacggaggcagctcctgtccggacagcgaaacccgcgaggcccaggagagcggcagccagcgcggcacagcccgggagctgcggcccacgccggagcctacggacatgggctcggaagggacaaaaaccgggccggagtcagcgctggagccaagcagcgacggcctggacagcgactggccccacgcagatacccggggccgggaagggtcgtcggggacggggcccctgggagccagcgagcattccggcggggactccgactcgagtccgctggggaccggacctggacggggctctcgggcagctatggcctccaggaccttcgaggacagctcgcgggctcctcgggacactgggccggccaaggacgcgagcgacaaccgggcgcagcggggcgccgagccagaaacaatgcaggcctcgacggcccgggctccgcgccaccaggtcggaaaggcggtggggcaggtgccagcggcggcaggcgagggcgaagcgggagccgcagcaggagcggggccggaggacccagccccgctggcggccctcctggtggtccgcaggctcctcgcgaggcccccgccaggcgccgcttcccaggccgtgggcccccgccgcgctggcctcaaggagcggctcctgagtgtagcgcgagccctgggcctcctgcgctggctgcggcggcggctgcggctgcggcggcggccgccagagggcgaggggcagggtaccgggccacgggcgagcgaggggtggggccgccggaaaccggacgaggggcggggtcatgggagaggaagcaaggggcggggccgcgggaaagcggatgaagggcggggccacgagcgaggggacgagggtcggggccgcgggaaagcggacgaagggcggggccacgagcgagggtacgaggggcggggctgcgggaaagcggacgaggggcggggtcacgagagaggtgacgagggccgggaccaccagagagggtacgaggggtggggccgtgagcccgggctgcggcaccgtctagcgttgcgcctggctggcttagcagggctggggggtatgccgagggcttcccctggtggccgctccccgcaggtcccgacaagcccagtccccggcgacccttttgatcaggaggacgagactccagatcccaagttcgcggtcgtgttccccaggatccacagggcagggcgggcgtcgagcagccgcagctctgaagaagcgtccgcagatgcccccacgggggaaggccgaggttggcctcgtgcaggggtgggggggcacagtgaggggtgcaggacgagtggggaaggggtgtccgggcttcgtcgcggctccctccttgccccgactgcacccgacgggccttccctcgacgagagcggctccagcagtgaggcggagttggagaccctcaatgacgagcccccggtgcgctgggcgcagggctcaggcccccacgagggtcctaggcttggcgccgccgtgctgctaccccgactctccttggagacccgcctgcagcaggagggagacccgggcctccgtgggtccctgagggagctgtgggaacccgaggatgaggacgaggcggtgctggagagggacctggagctgagcctccggccgggcctggaggcgccacccttccccggtgccaagggcaggagcctcggagacggcctggaagacatggaggacctggcgcggttgcggttagcgggcgcggtgccaaagctgccatccccggctcacagctcctcatatccaccctgccctcatctttatgaattgcgtgtagacccttattgaatccttagaaggatgggcttgaaccctcctggcaggaaggggcagacctttggggggcctgtcttgcttgttctgaacccccaccggtccttgcctcttttttcacctgaggtccaggcaagctaccaccccaggaaggccctcagcaccactccacacatctttgccatcgtggcatcagcctatgacctggctcagaatactgggcaggacccatgcatcctcctgtgctcctcccactgcagtgggcacagtggctcagggaagacggaagccgccaaaaagatcatgcagttcctaagcagcctggagcaggatcagacggggaaccgagagtgtcaggtggaggatatgctgcctatactcagcagctttggccatgccaagaccatcctcaatgccaatgccagccgcttcggccaggtcttctgcctctacctacagcaaggggtcatcgtgggagcctctgtgtctcattatctacttgagacctccagggtggtgtttcagctgctggcagggctggactccatagagcgggagcggctctccctgcagggaccggagacttactactacctcaaccagggccaggcctgcaggctgcaaggcaaggaggatgcccaggactttgaggggctgctgaaggcactgcaggggctcggcttgtgcccagaggagttgaatgccgtctgggctgtgctggccgccatcctgcagctgggcaacatctgcttctcctcctcagagggacgccctggccaaggcactgtattcccgcctcttccaccggcttctgaggagaaccaatgcacggctggcaccaccaggggagggaggcagcattggcaccgtcactgtcgtggatgcctacggctttgaggccctgcgggtgaatggcctggagcaactgtgcaacaacctcgccagcgagcgcctacagctcttctccagccagatgctgctggcccaggaggaggaggagtgtcggcgggagttgctgtcctgggtgcctgtccctcagcctccgagggagtcctgcctagacctcctggtagatcagccccacagcctcctgagtatcctggacgcccagacatggctgtcccaggccacggaccacaccttcctccagaagagccactatcaccatggtgaccaccccagctatgccaagccccggctgcccctgcccgtgttcaccgtgcgacattatgcagggactgtcacctaccaggttcacaagtttttaaacagaaaccgggatcagctggaccctgctgtggtggagatgcttggccagagccagctccagctggtgggcagcctgttccaggaggcagagccccagtccaggggagggcgaggcagacccacgctggcctctcgcttccagcaggccctggaggacctcatagcccggctgggcaggagccatgtctatttcatccagtgcctcacccctaaccctggaaaggaagcggtacctccggcggcgggcagctttgggacagctgaacaccatcctgctggtggcccagcccctgctccagaggcggcagagactgcagcttgggcgttggcagggctggcatagcagcgaaagggccttggagagagtgccaagcatggagctggggcgcttggagatcccggctgagctggccgtcatgctgaagacggcggaaagccatcgggacgccctggctgggagcatcaccgagtgcctgccgcctgaggttcctgcccggcccagcctgactctcccagcagacattgacctgttccctttctccagcttcgtcgccatcggctttcaggaaccgtccctgcccaggccagggcagccactggcgaagcccctaacccagctggatggagacaaccctcagcgtgccctggacatcaacaaagtgatgctgcggctcctgggggacggatccctggagtcctggcagaggcagatcatgggcgcatacctggtgcggcaggggcagtgccggccagggctgcggaatgagctctttagccagctggtggcccagctatggcagaacccagatgaacagcagagccagcgtggctgggccctcatggctgttttgctcagcgcctttcccccactgcctgtcctacagaagccactgctcaagttcgtgtctgaccaggcccccaggggcatggcagcgctgtgccagcacaagctgctgggggccttggagcagtcgcagctggcctcgggggccactcgggcccaccccccgacccagctggagtggctggccggatggcggcggggccgcatggcgctggatgtgttcaccttcagcgaggagtgctactcggccgaggtggagtcttggaccaccggggagcagctggctgggtggatcctgcagagcaggtcagaaaagaaatgcccatgctggagcccttgtggaagtggagggccgtgagaggcctggaggcgcctccccggggctggtctgtgtcactgcactccagggacgcatggcaggacttggctggctgcgactttgtgctggacctgatcagccagactgaggacctgggggacccagctcgcccccgcagctaccccatcactcctcttggctcagccgaggccattccccttgcccctggcattcaggccccctcactgcccccaggaccccctccaggtccagccccaacgctgcccagcagggaccacacaggggaggtccagaggtcagggagcctggacggcttcctggaccagatcttccagccagtgatatcctccggcctcagcgatctggaacaaagctgggctctgagcagccgcatgaagggagggggcgccattgggcccacacagcagggctaccccatggtgtacccaggaatgattcagatgcctgcataccagccaggcatggtccctgcacccatgcccatgatgccagcaatgggcacagtccctgccatgccagccatggtggtgccgccgcagccaccgcttcccagcctggatgcagggcagctggccgtccagcagcagaactttatccagcagcaggcgctaatcctggcccagcagatgacagcccaggccatgtccctgtccctggagcagcagatgcagcagcggcagcagcaggctcgggcctccgaggctgcgtcccaggcctcaccctcagccgtcacctccaagcccaggaagccccccacacccccggagaagccacagcgtgacctgggatcagagggtggctgcctgagggagacctccgaggaggctgaagacaggccctatcagcccaagagcttccagcagaaacggaactatttccagaggatggggcagccacagatcacagtgaggacgatgaagcccccggccaaggtccacatcccccagggggaagcgcaggaggagga

SEQ ID NO: 156918 - DNA, 365 bp, Homo sapiens
  Payload ID: 10752
  Gene Symbol: MYO15B
  Gene Name: myosin XVB
  ENST ID: ENST00000582012
  CDS Start-End: 1-201
accaaggtcctgctgcaggagcagggctggcagcggctggaggagctccgggaccagcagcgctcccaggccctggtcgacctgcaccgcagcttccacacctgcatctcccgccagcgcgtcctgccccggatgcaggctcgcatgcgtgggttccaggccagcctgtcttcacacattcctccaacagctgttggctgaccgtctgcctcatctacccttgggccagatgctggaagcggtacctccggcggcgggcagctttgggacagctgaacaccatcctgctggtggcccagcccctgctccagaggcggcagagactgcagcttgggcgttggcagggctggcatagcagcgaaagg

SEQ ID NO: 156919 - DNA, 336 bp, Homo sapiens
  Payload ID: 10752
  Gene Symbol: MYO15B
  Gene Name: myosin XVB
  ENST ID: ENST00000584762
  CDS Start-End: 1-336
tgcaacaacctcgccagcgagcgcctacagctcttctccagccagatgctgctggcccaggaggaggaggagtgtcggcgggagttgctgtcctgggtgcctgtccctcagcctccgagggagtcctgcctagacctcctggtagatcagccccacagcctcctgagtatcctggacgcccagacatggctgtcccagacggagtttggttcttgttgcccaggctggagtgcaatggtgcggtctcggctcactgcaacctccacctcccaggccacggaccacaccttcctccagaagagccactatcaccatggtgaccaccccagctatgcc

SEQ ID NO: 156920 - DNA, 769 bp, Homo sapiens
  Payload ID: 10752
  Gene Symbol: MYO15B
  Gene Name: myosin XVB
  ENST ID: ENST00000583560
  CDS Start-End: 1-769
gttcacaagtttttaaacagaaaccgggatcagctggaccctgctgtggtggagatgcttggccagagccagctccagctggtgggcagcctgttccaggaggcagagccccagtccaggggagggcgaggcagacccacgctggcctctcgcttccagcaggccctggaggacctcatagcccggctgggcaggagccatgtctatttcatccagtgcctcacccctaaccctggaaagcttccaggcctctttgacgtgggacatgtgacagagcaactgcaccaggcagccatactggaggccgtgggcacccgcagtgccaacttccccgtgcgtgtgccctttgaggccttcctggccagcttccaggccctggggtcagaagggcaggaagacctctctgaccgggagaagtgtggtgccgtcctgagccaggtgctgggggccgaatcacctctctatcaccttggagccaccaaggtcctgctgcaggagcagggctggcagcggctggaggagctccgggaccagcagcgctcccaggccctggtcgacctgcaccgcagcttccacacctgcatctcccgccagcgcgtcctgccccggatgcaggctcgcatgcgtgggttccaggccaggaagcggtacctccggcggcgggcagctttgggacagctgaacaccatcctgctggtggcccagcccctgctccagaggcggcagagactgcagcttgggcgttggcagggctggcatagcagcgaaa

SEQ ID NO: 156921 - DNA, 903 bp, Homo sapiens
  Payload ID: 10752
  Gene Symbol: MYO15B
  Gene Name: myosin XVB
  ENST ID: ENST00000580414
  CDS Start-End: 1-577
caagcaggtcacgggacacccccggccggaacactgcactcgaggctggagcttcctcagccttctcacaggcttcttccccccgtcgaccaggctgatgccctacctgaccaagtttctgcaggattcaggccccagccaagagctggcccggagcagccaggagcacctccagcgcacagtcaaatatggggggcgccggcggatgcccccaccgggtgaaatgaaggctttcctgaaaggacaagcgattcgcctgcttcttattcacctgccggggggtgtggattataggacgaatatccagactttcacagtagcagcagaagtgcaggaggagctgtgccggcaaatgggtatcacggagcctcaggaagtgcaggaattcgccctcttcctcatcaaagagaagagtaagcttggggacggagcctcacggtggggccactcccctgcccaggggccagctggtgcggcccctgcagcccgccgaatacctcaacagcgtggtagtggaccaggacgtgagcctgcacagccggcggctccactgggagaccccactgcacttcgataactccacctacatcagcacccactacagccaggtgctgtgggactaccttcaggggaagctgccagtcagcgccaaggcagacgcgcagctcgccaggctggccgccctgcagcacctcagcaaggccaacaggaataccccctcagggcaggacctgctagcttacgtgccaaagcagctgcaacggcaggtgaacacggcctccatcaagaacctgatgggtcaggagctgagacggctggaaggacacagcccccaggaagcacagatcagcttcattgaggccatgagccagctgcccctcttcggctacaccgtctatgggg

SEQ ID NO: 156922 - DNA, 643 bp, Homo sapiens
  Payload ID: 10752
  Gene Symbol: MYO15B
  Gene Name: myosin XVB
  ENST ID: ENST00000577342
  CDS Start-End: 1-256
gcccaagcggccacaacccagcagggaaattggcaacatcatccgcatgtaccagagccgcccgggccccgtgcctgtgcccgtgcagccatccagctttcctgaggaaaatcgaccccaaggacgaggctctggccaagctgggtatcaacggtgcccactcgtccccgccgatgctgtcccccagcccaggaaagggccccccgccagctgtggctcctcgacccaaggccccgctacagcttgggccctctagctccatcaaggaaaagcaggggccccttctggacctgtttggccagaagctgcctattgcccacacacccccacctccaccagcgccaccactgcctctgcccgaggacccagggaccctttcagcagagcgtcgttgcttgacacagcccgtggaggaccagggggtctccacccagctactcgcgccctctggcagcgtgtgcttctcctacaccggcacgccctggaagttgttcctacgcaaggaggtgttctacccacgggagaacttcagccatccctactacctgaggctcctctgtgagcagatcctacgggacaccttctccgagtcctgtatccggatttcccagaatgagcggcggaaaatgaaagacctgctggg

SEQ ID NO: 156923 - DNA, 709 bp, Homo sapiens
  Payload ID: 10752
  Gene Symbol: MYO15B
  Gene Name: myosin XVB
  ENST ID: ENST00000583140
  CDS Start-End: 1-469
ctttgcggaggtgctgggtgtggagtgccggggcggctccaccctggagctgtcactgaagagcgagcagctggtgctgcacacagcccgggcaagggccatcgaggcgctggttgagctattcctgaatgagcttaagaaggactccggctatgtcatcgccctgcgcagctacatcactgacaactgcagcctcctcagcttccaccgtggggacctcatcaagctgctgccggtggccaccctggagccaggctggcagtttggctctgccgggggccgttccggactctttcctgccgacatagtgcagccggctgccgctcccgacttttccttctccaaggagcagaggagtggctggcacaagggtcagctgtccaacggggaaccagggctggctcggtgggacagggcctcagaggtgaggaagatgggagagggacaagcagaggcaaggcctgcctgagactgaggaaggaaaggggtttgaccactcccgaggctgccatgcggtgggaccaccctgctgtccgtctcctgtggctgcccctctgcccgctcctgatggctcgccttgtctctccagcaagactgtgcactccttgcaggcaggggctgggctggatgctgctcttgtgtcccacgtggtacttagttcaaggctgccccagcagatgcttaataaacagctcttcactttcctggc

SEQ ID NO: 156924 - DNA, 816 bp, Homo sapiens
  Payload ID: 10752
  Gene Symbol: MYO15B
  Gene Name: myosin XVB
  ENST ID: ENST00000577948
  CDS Start-End: 1-312
caggagaagctgagggatgagatttactgccaggttatcaagcaggtcacgggacacccccggccggaacactgcactcgaggctggagcttcctcagccttctcacaggcttcttccccccgtcgaccaggctgatgccctacctgaccaagtttctgcaggattcaggccccagccaagagctggcccggagcagccaggagcacctccagcgcacagtcaaatatggggggcgccggcggatgcccccaccggaaaggacaagcgattcgcctgcttcttattcacctgccggggggtgtggattataggacgaatatccagactttcacagtagcagcagaagtgcaggaggagctgtgccggcaaatgggtatcacggagcctcaggaagtgcaggaattcgccctcttcctcatcaaagagaagagccagctggtgcggcccctgcagcccgccgaatacctcaacagcgtggtagtggaccaggacgtgagcctgcacagccggcggctccactgggagaccccactgcacttcgataactccacctacatcagcacccactacagccaggtgctgtgggactaccttcaggggaagctgccagtcagcgccaaggcagacgcgcagctcgccaggctggccgccctgcagcacctcagcaaggccaacaggaataccccctcagggcaggacctgctagcttacgtgccaaagcagctgcaacggcaggtgaacacggcctccatcaagaacctgatgggtcaggagctgagacggctggaaggacacagcccccaggaagcacagat

SEQ ID NO: 156925 - DNA, 493 bp, Homo sapiens
  Payload ID: 10752
  Gene Symbol: MYO15B
  Gene Name: myosin XVB
  ENST ID: ENST00000584723
  CDS Start-End: 1-316
tgcataccagccaggcatggtccctgcacccatgcccatgatgccagcaatgggcacagtccctgccatgccagccaccgcttcccagcctggatgcagggcagctggccgtccagcagcagaactttatccagcagcaggcgctaatcctggcccagcagatgacagcccaggccatgtccctgtccctggagcagcagatgcagcagcggcagcagcaggctcgggcctccgaggctgcgtcccaggcctcaccctcagccgtcacctccaagcccaggaagccccccacacccccggagaagccacagcgtgacctgggatcagagggtggctgcctgagggagacctccgaggaggctgaagacaggccctatcagcccaagagcttccagcagaaacggaactatttccagaggatggggcagccacagatcacagtgaggacgatgaagcccccggccaaggtccacatcccccagggggaagcgca

SEQ ID NO: 156926 - DNA, 707 bp, Homo sapiens
  Payload ID: 10752
  Gene Symbol: MYO15B
  Gene Name: myosin XVB
  ENST ID: ENST00000580262
  CDS Start-End: 1-217
ccaggacgtgagcctgcacagccggcggctccactgggagaccccactgcacttcgataactccacctacatcagcacccactacagccaggtgctgtgggactaccttcaggggaagctgccagtcagcgccaaggcagacgcgcagctcgccaggctggccgccctgcagcacctcagcaaggccaacaggaataccccctcagggacctgctagcttacgtgccaaagcagctgcaacggcaggtgaacacggcctccatcaagaacctgatgggtcaggagctgagacggctggaaggacacagcccccaggaagcacagatcagcttcattgaggccatgagccagctgcccctcttcggctacaccgtctatggggtgctgcgagtgagcatgcaggccctgtccggacccactctcctggggctcaaccgccagcatctcatcctcatggaccccagctcccagagcctgtactgccgcattgccctgaagagcctgcagcggctccacctgctaagccctctggaggagaaggggccccctggcctggaagtcaactatggctcagctgacaacccccagaccatctggtttgagctgccacaggcccaggagctgctatacaccactgtcttcctgatagacagcagtgcctcttgcactgagtggcccagcatcaactgagaggagtgcaggccggg

SEQ ID NO: 156927 - DNA, 9195 bp, Homo sapiens
  Payload ID: 10752
  Gene Symbol: MYO15B
  Gene Name: myosin XVB
  ENST ID: ENST00000610510
  CDS Start-End: 1-9195
atgggcaggaaccagcgcaaagcgccccagcgcctggagaggcccgggaggccggcctcaggggagcaggagtcggggtcggccagcgcggatggcgcgcccagccgggaacgccgttccgaccgcgggcaggcggacagggcgaaaccggcggccgagcctgccaccgccgggggccagggaacccctggtggccgcaggaagcccactgcagaggggaacggcggctgcagacgcccaggggctgggctgtccccgaaagcccaggagaggcaaagcaacgcgcagcgtcagggacgcgggcccaggggcggccgcggggggcgcctggaggagggaagcctctccggaggagaagagctgggcggccgccgtaggaggaagcggaaagataaggggccctcggctcggcggggccgccggacgcccaggagcctcaatggggacacgtcgggtggggacggaggcagctcctgtccggacagcgaaacccgcgaggcccaggagagcggcagccagcgcggcacagcccgggagctgcggcccacgccggagcctacggacatgggctcggaagggacaaaaaccgggccggagtcagcgctggagccaagcagcgacggcctggacagcgactggccccacgcagatacccggggccgggaagggtcgtcggggacggggcccctgggagccagcgagcattccggcggggactccgactcgagtccgctggggaccggacctggacggggctctcgggcagctatggcctccaggaccttcgaggacagctcgcgggctcctcgggacactgggccggccaaggacgcgagcgacaaccgggcgcagcggggcgccgagccagaaacaatgcaggcctcgacggcccgggctccgcgccaccaggtcggaaaggcggtggggcaggtgccagcggcggcaggcgagggcgaagcgggagccgcagcaggagcggggccggaggacccagccccgctggcggccctcctggtggtccgcaggctcctcgcgaggcccccgccaggcgccgcttcccaggccgtgggcccccgccgcgctggcctcaaggagcggctcctgagtgtagcgcgagccctgggcctcctgcgctggctgcggcggcggctgcggctgcggcggcggccgccagagggcgaggggcagggtaccgggccacgggcgagcgaggggtggggccgccggaaaccggacgaggggcggggtcatgggagaggaagcaaggggcggggccgcgggaaagcggatgaagggcggggccacgagcgaggggacgagggtcggggccgcgggaaagcggacgaagggcggggccacgagcgagggtacgaggggcggggctgcgggaaagcggacgaggggcggggtcacgagagaggtgacgagggccgggaccaccagagagggtacgaggggtggggccgtgagcccgggctgcggcaccgtctagcgttgcgcctggctggcttagcagggctggggggtatgccgagggcttcccctggtggccgctccccgcaggtcccgacaagcccagtccccggcgacccttttgatcaggaggacgagactccagatcccaagttcgcggtcgtgttccccaggatccacagggcagggcgggcgtcgagcagccgcagctctgaagaagcgtccgcagatgcccccacgggggaaggccgaggttggcctcgtgcaggggtgggggggcacagtgaggggtgcaggacgagtggggaaggggtgtccgggcttcgtcgcggctccctccttgccccgactgcacccgacgggccttccctcgacgagagcggctccagcagtgaggcggagttggagaccctcaatgacgagcccccggtgcgctgggcgcagggctcaggcccccacgagggtcctaggcttggcgccgccgtgctgctaccccgactctccttggagacccgcctgcagcaggagggagacccgggcctccgtgggtccctgagggagctgtgggaacccgaggatgaggacgaggcggtgctggagagggacctggagctgagcctccggccgggcctggaggcgccacccttccccggtgccaagggcaggagcctcggagacggcctggaagacatggaggacctggcgcggttgcgacacatctttgccatcgtggcatcagcctatgacctggctcagaatactgggcaggacccatgcatcctcctgtgtgggcacagtggctcagggaagacggaagccgccaaaaagatcatgcagttcctaagcagcctggagcaggatcagacggggaaccgagagtgtcaggtggaggatatgctgcctatactcagcagctttggccatgccaagaccatcctcaatgccaatgccagccgcttcggccaggtcttctgcctctacctacagcaaggggtcatcgtgggagcctctgtgtctcattatctacttgagacctccagggtggtgtttcaggcccaggctgagcggagcttccatgttttttacaagctgctggcagggctggactccatagagcgggagcggctctccctgcagggaccggagacttactactacctcaaccagggccaggcctgcaggctgcaaggcaaggaggatgcccaggactttgaggggctgctgaaggcactgcaggggctcggcttgtgcccagaggagttgaatgccgtctgggctgtgctggccgccatcctgcagctgggcaacatctgcttctcctcctcagagcgagagtcccaggaggtggctgctgtgtctagctgggctgagatccacacagcagcccgactgctgcgggtaccaccagagtgcctggagggggctgtcaccaggagggtcacggagacgccctatggccaggtctcgcgatccctgcccgtggaaagtgcctttgatgccagggacgccctggccaaggcactgtattcccgcctcttccaccggcttctgaggagaaccaatgcacggctggcaccaccaggggagggaggcagcattggcaccgtcactgtcgtggatgcctacggctttgaggccctgcgggtgaatggcctggagcaactgtgcaacaacctcgccagcgagcgcctacagctcttctccagccagatgctgctggcccaggaggagcctccgagggagtcctgcctagacctcctggtagatcagccccacagcctcctgagtatcctggacgcccagacatggctgtcccagacggagtttggttcttgttgcccaggctggagtgcaatggtgcggtctcggctcactgcaacctccacctcccaggccacggaccacaccttcctccagaagagccactatcaccatggtgaccaccccagctatgccaagccccggctgcccctgcccgtgttcaccgtgcgacattatgcagggactgtcacctaccaggttcacaagtttttaaacagaaaccgggatcagctggaccctgctgtggtggagatgcttggccagagccagctccagctggtgggcagcctgttccaggaggcagagccccagtccaggggagggcgaggcagacccacgctggcctctcgcttccagcaggccctggaggacctcatagcccggctgggcaggagccatgtctatttcatccagtgcctcacccctaaccctggaaagcttccaggcctctttgacgtgggacatgtgacagagcaactgcaccaggcagccatactggaggccgtgggcacccgcagtgccaacttccccgtgcgtgtgccctttgaggccttcctggccagcttccaggccctggggtcagaagggcaggaagacctctctgaccgggagaagtgtggtgccgtcctgagccaggtgctgggggccgaatcacctctctatcaccttggagccaccaaggtcctgctgcaggagcagggctggcagcggctggaggagctccgggaccagcagcgctcccaggccctggtcgacctgcaccgcagcttccacacctgcatctcccgccagcgcgtcctgccccggatgcaggctcgcatgcgtgggttccaggccaggtctgcaggcgttggagccagggctgaagtgggtgggcctgtcttcacacattcctccaacagctgttggctgaccgtctgcctcatctacccttgggccagatgctggaagcggtacctccggcggcgggcagctttgggacagctgaacaccatcctgctggtggcccagcccctgctccagaggcggcagagactgcagcttgggcgttggcagggctggcatagcagcgaaagggccttggagagagtgccaagcatggagctggggcgcttggagatcccggctgagctggccgtcatgctgaagacggcggaaagccatcgggacgccctggctgggagcatcaccgagtgcctgccgcctgaggttcctgcccggcccagcctgactctcccagcagacattgacctgttccctttctccagcttcgtcgccatcggctttcaggaaccgtccctgcccaggccagggcagccactggcgaagcccctaacccagctggatggagacaaccctcagcgtgccctggacatcaacaaagtgatgctgcggctcctgggggacggatccctggagtcctggcagaggcagatcatgggcgcatacctggtgcggcaggggcagtgccggccagggctgcggaatgagctctttagccagctggtggcccagctatggcagaacccagatgaacagcagagccagcgtggctgggccctcatggctgttttgctcagcgcctttcccccactgcctgtcctacagaagccactgctcaagttcgtgtctgaccaggcccccaggggcatggcagcgctgtgccagcacaagctgctgggggccttggagcagtcgcagctggcctcgggggccactcgggcccaccccccgacccagctggagtggctggccggatggcggcggggccgcatggcgctggatgtgttcaccttcagcgaggagtgctactcggccgaggtggagtcttggaccaccggggagcagctggctgggtggatcctgcagagcagggacgcatggcaggacttggctggctgcgactttgtgctggacctgatcagccagactgaggacctgggggacccagctcgcccccgcagctaccccatcactcctcttggctcagccgaggccattccccttgcccctggcattcaggccccctcactgcccccaggaccccctccaggtccagccccaacgctgcccagcagggaccacacaggggaggtccagaggtcagggagcctggacggcttcctggaccagatcttccagccagtgatatcctccggcctcagcgatctggaacaaagctgggctctgagcagccgcatgaagggagggggcgccattgggcccacacagcagggctaccccatggtgtacccaggaatgattcagatgcctgcataccagccaggcatggtccctgcacccatgcccatgatgccagcaatgggcacagtccctgccatgccagccatggtggtgccgccgcagccaccgcttcccagcctggatgcagggcagctggccgtccagcagcagaactttatccagcagcaggcgctaatcctggcccagcagatgacagcccaggccatgtccctgtccctggagcagcagatgcagcagcggcagcagcaggctcgggcctccgaggctgcgtcccaggcctcaccctcagccgtcacctccaagcccaggaagccccccacacccccggagaagccacagcgtgacctgggatcagagggtggctgcctgagggagacctccgaggaggctgaagacaggccctatcagcccaagagcttccagcagaaacggaactatttccagaggatggggcagccacagatcacagtgaggacgatgaagcccccggccaaggtccacatcccccagggggaagcgcaggaggaggaggaggaggaggaggaggaggaggagcaggaggagcaagaagtggaaacaagagcagtgccgtcccctcctcctccccccatcgtgaagaagccattgaagcaaggtggggccaaagctccaaaagaggctgaggctgagccagccaaggagacagcggccaagggccatggccaagggccagcccaaggcagggggactgtggtgcgcagctcagactccaagcccaagcggccacaacccagcagggaaattggcaacatcatccgcatgtaccagagccgcccgggccccgtgcctgtgcccgtgcagccatccaggcctcccaaagctttcctgaggaaaatcgaccccaaggacgaggctctggccaagctgggtatcaacggtgcccactcgtccccgccgatgctgtcccccagcccaggaaagggccccccgccagctgtggctcctcgacccaaggccccgctacagcttgggccctctagctccatcaaggaaaagcaggggccccttctggacctgtttggccagaagctgcctattgcccacacacccccacctccaccagcgccaccactgcctctgcccgaggacccagggaccctttcagcagagcgtcgttgcttgacacagcccgtggaggaccagggggtctccacccagctactcgcgccctctggcagcgtgtgcttctcctacaccggcacgccctggaagttgttcctacgcaaggaggtgttctacccacgggagaacttcagccatccctactacctgaggctcctctgtgagcagatcctacgggacaccttctccgagtcctgtatccggatttcccagaatgagcggcggaaaatgaaagacctgctgggaggcttggaggtggacctggattctctcaccaccaccgaagacagcgtcaagaagcgcatcgtggtggccgctcgggacaactgggccaattacttctcccgcttctttcctgtctcgggcgagagtggcagcgacgtgcagctgttagccgtgtcccaccgtgcgctagcccacgaccctgggctagaggtgggggcaggtggcaaggtgacctcagttcatgcccgatccctgcgcagctttgcggaggtgctgggtgtggagtgccggggcggctccaccctggagctgtcactgaagagcgagcagctggtgctgcacacagcccgggcaagggccatcgaggcgctggttgagctattcctgaatgagcttaagaaggactccggctatgtcatcgccctgcgcagctacatcactgacaactgcagcctcctcagcttccaccgtggggacctcatcaagctgctgccggtggccaccctggagccaggctggcagtttggctctgccgggggccgttccggactctttcctgccgacatagtgcagccggctgccgctcccgacttttccttctccaaggagcagaggagtggctggcacaagggtcagctgtccaacggggaaccagggctggctcggtgggacagggcctcagagcgccctgcccacccttggagccaggcacacagtgacgactcggaggccaccagcctgtcctctgtggcctatgcctttctgcccgactcccacagctacaccatgcaggaattcgcccggcgttacttccggaggtcccaggccttgctgggccagactgatggaggtgccgcaggaaaggacacggacagcctggtgcagtacaccaaggctcccatccaggagtcgctcctcagcctcagtgatgatgtgagcaagctggctgtagccagcttcctggccctgatgcggtttatgggtgaccagtccaagccccggggcaaggatgagatggatctgctctatgaactgctgaagctgtgccagcaggagaagctgagggatgagatttactgccaggttatcaagcaggtcacgggacacccccggccggaacactgcactcgaggctggagcttcctcagccttctcacaggcttcttccccccgtcgaccaggctgatgccctacctgaccaagtttctgcaggattcaggccccagccaagagctggcccggagcagccaggagcacctccagcgcacagtcaaatatggggggcgccggcggatgcccccaccgggtgaaatgaaggctttcctggtagcagcagaagtgcaggaggagctgtgccggcaaatgggtatcacggagcctcaggaagtgcaggaattcgccctcttcctcatcaaagagaagagccagctggtgcggcccctgcagcccgccgaatacctcaacagcgtggtagtggaccaggacgtgagcctgcacagccggcggctccactgggagaccccactgcacttcgataactccacctacatcagcacccactacagccaggtgctgtgggactaccttcaggggaagctgccagtcagcgccaaggcagacgcgcagctcgccaggctggccgccctgcagcacctcagcaaggccaacaggaataccccctcagggcaggacctgctagcttacgtgccaaagcagctgcaacggcaggtgaacacggcctccatcaagaacctgatgggtcaggagctgagacggctggaaggacacagcccccaggaagcacagatcagcttcattgctgacctgggggaccaagcagagcaggttccagggccccagcagtcagatttcctgcctgcaccctctccacccgcagaggccatgagccagctgcccctcttcggctacaccgtctatggggtgctgcgagtgagcatgcaggccctgtccggacccactctcctggggctcaaccgccagcatctcatcctcatggaccccagctcccagagcctgtactgccgcattgccctgaagagcctgcagcggctccacctgctaagccctctggaggagaaggggccccctggcctggaagtcaactatggctcagctgacaacccccagaccatctggtttgagctgccacaggcccaggagctgctatacaccactgtcttcctgatagacagcagtgcctcttgcactgagtggcccagcatcaactga

SEQ ID NO: 156928 - DNA, 4189 bp, Homo sapiens
  Payload ID: 10752
  Gene Symbol: MYO15B
  Gene Name: myosin XVB
  ENST ID: ENST00000612587
  CDS Start-End: 1-304
gttcgtgtctgaccaggcccccaggggcatggcagcgctgtgccagcacaagctgctgggggccttggagcagtcgcagctggcctcgggggccactcgggcccaccccccgacccagctggagtggctggccggatggcggcggggccgcatggcgctggatgtgttcaccttcagcgaggagtgctactcggccgaggtggagtcttggaccaccggggagcagctggctgggtggatcctgcagagcaggtcagaaaagaaatgcccatgctggagcccttgtggaagtggagggccgtgagaggcctggaggcgcctccccggggctggtctgtgtcactgcactccagggacgcatggcaggacttggctggctgcgactttgtgctggacctgatcagccagactgaggacctgggggacccagctcgcccccgcagctaccccatcactcctcttggctcagccgaggccattccccttgcccctggcattcaggccccctcactgcccccaggaccccctccaggtccagccccaacgctgcccagcagggaccacacaggggaggtccagaggtcagggagcctggacggcttcctggaccagatcttccagccagtgatatcctccggcctcagcgatctggaacaaagctgggctctgagcagccgcatgaagggagggggcgccattgggcccacacagcagggctaccccatggtgtacccaggaatgattcagatgcctgcataccagccaggcatggtccctgcacccatgcccatgatgccagcaatgggcacagtccctgccatgccagccatggtggtgccgccgcagccaccgcttcccagcctggatgcagggcagctggccgtccagcagcagaactttatccagcagcaggcgctaatcctggcccagcagatgacagcccaggccatgtccctgtccctggagcagcagatgcagcagcggcagcagcaggctcgggcctccgaggctgcgtcccaggcctcaccctcagccgtcacctccaagcccaggaagccccccacacccccggagaagccacagcgtgacctgggatcagagggtggctgcctgagggagacctccgaggaggctgaagacaggccctatcagcccaagagcttccagcagaaacggaactatttccagaggatgggcctcccaaagctttcctgaggaaaatcgaccccaaggacgaggctctggccaagctgggtatcaacggtgcccactcgtccccgccgatgctgtcccccagcccaggaaagggccccccgccagctgtggctcctcgacccaaggccccgctacagcttgggccctctagctccatcaaggaaaagcaggggccccttctggacctgtttggccagaagctgcctattgcccacacacccccacctccaccagcgccaccactgcctctgcccgaggacccagggaccctttcagcagagcgtcgttgcttgacacagcccgtggaggaccagggggtctccacccagctactcgcgccctctggcagcgtgtgcttctcctacaccggcacgccctggaagttgttcctacgcaaggaggtgttctacccacgggagaacttcagccatccctactacctgaggctcctctgtgagcagatcctacgggacaccttctccgagtcctgtatccggatttcccagaatgagcggcggaaaatgaaagacctgctgggaggcttggaggtggacctggattctctcaccaccaccgaagacagcgtcaagaagcgcatcgtggtggccgctcgggacaactgggccaattacttctcccgcttctttcctgtctcgggcgagagtggcagcgacgtgcagctgttagccgtgtcccaccgtgggctgcgactgctcaaggtgacccaaggccccggcctccgccccgaccagctgaagattctctgctcatacagctttgcggaggtgctgggtgtggagtgccggggcggctccaccctggagctgtcactgaagagcgagcagctggtgctgcacacagcccgggcaagggccatcgaggcgctggttgagctattcctgaatgagcttaagaaggactccggctatgtcatcgccctgcgcagctacatcactgacaactgcagcctcctcagcttccaccgtggggacctcatcaagctgctgccggtggccaccctggagccaggctggcagtttggctctgccgggggccgttccggactctttcctgccgacatagtgcagccggctgccgctcccgacttttccttctccaaggagcagaggagtggctggcacaagggtcagctgtccaacggggaaccagggctggctcggtgggacagggcctcagaggtgaggaagatgggagagggacaagcagaggcaaggcctgcctgagactgaggaaggaaaggggtttgaccactcccgaggctgccatgcggtgggaccaccctgctgtccgtctcctgtggctgcccctctgcccgctcctgatggctcgccttgtctctccagcaagactgtgcactccttgcaggcaggggctgggctggatgctgctcttgtgtcccacgtggtacttagttcaaggctgccccagcagatgcttaataaacagctcttcactttcctggcttctggtcttgctcctttggtgtctggctggggagggatggggctggggcaggacccctgggacagggcactggacactcaggtggcaccaggtttcttgtgatcccagcgccctgcccacccttggagccaggcacacagtgacgactcggaggccaccagcctgtcctctgtggcctatgcctttctgcccgactcccacagctacaccatgcaggaattcgcccggcgttacttccggaggtcccaggccttgctgggccagactgatggaggtgccgcaggaaaggacacggacagcctggtgcagtacaccaaggctcccatccaggagtcgctcctcagcctcagtgatgatgtgagcaagctggctgtagccagcttcctggccctgatgcggtttatgggtgaccagtccaagccccggggcaaggatgagatggatctgctctatgaactgctgaagctgtgccagcaggagaagctgagggatgagatttactgccaggttatcaagcaggtcacgggacacccccggccggaacactgcactcgaggctggagcttcctcagccttctcacaggcttcttccccccgtcgaccaggctgatgccctacctgaccaagtttctgcaggattcaggccccagccaagagctggcccggagcagccaggagcacctccagcgcacagtcaaatatggggggcgccggcggatgcccccaccgggtgaaatgaaggctttcctgaaaggacaagcgattcgcctgcttcttattcacctgccggggggtgtggattataggacgaatatccagactttcacagtagcagcagaagtgcaggaggagctgtgccggcaaatgggtatcacggagcctcaggaagtgcaggaattcgccctcttcctcatcaaagagaagagccagctggtgcggcccctgcagcccgccgaatacctcaacagcgtggtagtggaccaggacgtgagcctgcacagccggcggctccactgggagaccccactgcacttcgataactccacctacatcagcacccactacagccaggtgctgtgggactaccttcaggggaagctgccagtcagcgccaaggcagacgcgcagctcgccaggctggccgccctgcagcacctcagcaaggccaacaggaataccccctcagggcaggacctgctagcttacgtgccaaagcagctgcaacggcaggtgaacacggcctccatcaagaacctgatgggtcaggagctgagacggctggaaggacacagcccccaggaagcacagatcagcttcattgaggccatgagccagctgcccctcttcggctacaccgtctatggggtgctgcgagtgagcatgcaggccctgtccggacccactctcctggggctcaaccgccagcatctcatcctcatggaccccagctcccagagcctgtactgccgcattgccctgaagagcctgc

SEQ ID NO: 156929 - DNA, 7167 bp, Homo sapiens
  Payload ID: 10752
  Gene Symbol: MYO15B
  Gene Name: myosin XVB
  ENST ID: ENST00000619501
  CDS Start-End: 1-2283
atgggcaggaaccagcgcaaagcgccccagcgcctggagaggcccgggaggccggcctcaggggagcaggagtcggggtcggccagcgcggatggcgcgcccagccgggaacgccgttccgaccgcgggcaggcggacagggcgaaaccggcggccgagcctgccaccgccgggggccagggaacccctggtggccgcaggaagcccactgcagaggggaacggcggctgcagacgcccaggggctgggctgtccccgaaagcccaggagaggcaaagcaacgcgcagcgtcagggacgcgggcccaggggcggccgcggggggcgcctggaggagggaagcctctccggaggagaagagctgggcggccgccgtaggaggaagcggaaagataaggggccctcggctcggcggggccgccggacgcccaggagcctcaatggggacacgtcgggtggggacggaggcagctcctgtccggacagcgaaacccgcgaggcccaggagagcggcagccagcgcggcacagcccgggagctgcggcccacgccggagcctacggacatgggctcggaagggacaaaaaccgggccggagtcagcgctggagccaagcagcgacggcctggacagcgactggccccacgcagatacccggggccgggaagggtcgtcggggacggggcccctgggagccagcgagcattccggcggggactccgactcgagtccgctggggaccggacctggacggggctctcgggcagctatggcctccaggaccttcgaggacagctcgcgggctcctcgggacactgggccggccaaggacgcgagcgacaaccgggcgcagcggggcgccgagccagaaacaatgcaggcctcgacggcccgggctccgcgccaccaggtcggaaaggcggtggggcaggtgccagcggcggcaggcgagggcgaagcgggagccgcagcaggagcggggccggaggacccagccccgctggcggccctcctggtggtccgcaggctcctcgcgaggcccccgccaggcgccgcttcccaggccgtgggcccccgccgcgctggcctcaaggagcggctcctgagtgtagcgcgagccctgggcctcctgcgctggctgcggcggcggctgcggctgcggcggcggccgccagagggcgaggggcagggtaccgggccacgggcgagcgaggggtggggccgccggaaaccggacgaggggcggggtcatgggagaggaagcaaggggcggggccgcgggaaagcggatgaagggcggggccacgagcgaggggacgagggtcggggccgcgggaaagcggacgaagggcggggccacgagcgagggtacgaggggcggggctgcgggaaagcggacgaggggcggggtcacgagagaggtgacgagggccgggaccaccagagagggtacgaggggtggggccgtgagcccgggctgcggcaccgtctagcgttgcgcctggctggcttagcagggctggggggtatgccgagggcttcccctggtggccgctccccgcaggtcccgacaagcccagtccccggcgacccttttgatcaggaggacgagactccagatcccaagttcgcggtcgtgttccccaggatccacagggcagggcgggcgtcgagcagccgcagctctgaagaagcgtccgcagatgcccccacgggggaaggccgaggttggcctcgtgcaggggtgggggggcacagtgaggggtgcaggacgagtggggaaggggtgtccgggcttcgtcgcggctccctccttgccccgactgcacccgacgggccttccctcgacgagagcggctccagcagtgaggcggagttggagaccctcaatgacgagcccccggtgcgctgggcgcagggctcaggcccccacgagggtcctaggcttggcgccgccgtgctgctaccccgactctccttggagacccgcctgcagcaggagggagacccgggcctccgtgggtccctgagggagctgtgggaacccgaggatgaggacgaggcggtgctggagagggacctggagctgagcctccggccgggcctggaggcgccacccttccccggtgccaagggcaggagcctcggagacggcctggaagacatggaggacctggcgcggttgcggttagcgggcgcggtgccaaagctgccatccccggctcacagctcctcatatccaccctgccctcatctttatgaattgcgtgtagacccttattgaatccttagaaggatgggcttgaaccctcctggcaggaaggggcagacctttggggggcctgtcttgcttgttctgaacccccaccggtccttgcctcttttttcacctgaggtccaggcaagctaccaccccaggaaggccctcagcaccactccgtatgtgactctgccccactgaccctctgctcacctcccaggcagcccagtccctgcatgtccccttgactgaggtcccggggcctgtgagcacctctgctacacctcggagggtcccaggtccccatgtctggcaaccttctcatctccctcagacacatctttgccatcgtggcatcagcctatgacctggctcagaatactgggcaggacccatgcatcctcctgtgctcctcccactgcagtgggcacagtggctcagggaagacggaagccgccaaaaagatcatgcagttcctaagcagcctggagcaggatcagacggggaaccgagagtgtcaggtggaggatatgctgcctatactcagcagctttggccatgccaagaccatcctcaatgccaatgccagccgcttcggccaggtcttctgcctctacctacagcaaggggtcatcgtgggagcctctgtgtctcattatctacttgagacctccagggtggtgtttcagggccaggcctgcaggctgcaaggcaaggaggatgcccaggactttgaggggctgctgaaggcactgcaggggctcggcttgtgcccagaggagttgaatgccgtctgggctgtgctggccgccatcctgcagctgggcaacatctgcttctcctcctcagagcgagagtcccaggaggtggctgctgtgtctagctgggctgagatccacacagcagcccgactgctgcgggtaccaccagagtgcctggagggggctgtcaccaggagggtcacggagacgccctatggccaggtctcgcgatccctgcccgtggaaagtgcctttgatgccagggacgccctggccaaggcactgtattcccgcctcttccaccggcttctgaggagaaccaatgcacggctggcaccaccaggggagggaggcagcattggcaccgtcactgtcgtggatgcctacggctttgaggccctgcgggtgaatggcctggagcaactgtgcaacaacctcgccagcgagcgcctacagctcttctccagccagatgctgctggcccaggaggaggaggagtgtcggcgggagttgctgtcctgggtgcctgtccctcagcctccgagggagtcctgcctagacctcctggtagatcagccccacagcctcctgagtatcctggacgcccagacatggctgtcccaggccacggaccacaccttcctccagaagagccactatcaccatggtgaccaccccagctatgccaagccccggctgcccctgcccgtgttcaccgtgcgacattatgcagggactgtcacctaccaggttcacaagtttttaaacagaaaccgggatcagctggaccctgctgtggtggagatgcttggccagagccagctccagctggtgggcagcctgttccaggaggcagagccccagtccaggggagggcgaggcagacccacgctggcctctcgcttccagcaggccctggaggacctcatagcccggctgggcaggagccatgtctatttcatccagtgcctcacccctaaccctggaaagcttccaggcctctttgacgtgggacatgtgacagagcaactgcaccaggcagccatactggaggccgtgggcacccgcagtgccaacttccccgtgcgtgtgccctttgaggccttcctggccagcttccaggccctggggtcagaagggcaggaagacctctctgaccgggagaagtgtggtgccgtcctgagccaggtgctgggggccgaatcacctctctatcaccttggagccaccaaggtcctgctgcaggagcagggctggcagcggctggaggagctccgggaccagcagcgctcccaggccctggtcgacctgcaccgcagcttccacacctgcatctcccgccagcgcgtcctgccccggatgcaggctcgcatgcgtgggttccaggccaggaagcggtacctccggcggcgggcagctttgggacagctgaacaccatcctgctggtggcccagcccctgctccagaggcggcagagactgcagcttgggcgttggcagggctggcatagcagcgaaagggccttggagagagtgccaagcatggagctggggcgcttggagatcccggctgagctggccgtcatgctgaagacggcggaaagccatcgggacgccctggctgggagcatcaccgagtgcctgccgcctgaggttcctgcccggcccagcctgactctcccagcagacattgacctgttccctttctccagcttcgtcgccatcggctttcaggaaccgtccctgcccaggccagggcagccactggcgaagcccctaacccagctggatggagacaaccctcagcgtgccctggacatcaacaaagtgatgctgcggctcctgggggacggatccctggagtcctggcagaggcagatcatgggcgcatacctggtgcggcaggggcagtgccggccagggctgcggaatgagctctttagccagctggtggcccagctatggcagaacccagatgaacagcagagccagcgtggctgggccctcatggctgttttgctcagcgcctttcccccactgcctgtcctacagaagccactgctcaagttcgtgtctgaccaggcccccaggggcatggcagcgctgtgccagcacaagctgctgggggccttggagcagtcgcagctggcctcgggggccactcgggcccaccccccgacccagctggagtggctggccggatggcggcggggccgcatggcgctggatgtgttcaccttcagcgaggagtgctactcggccgaggtggagtcttggaccaccggggagcagctggctgggtggatcctgcagagcagaggcctggaggcgcctccccggggctggtctgtgtcactgcactccagggacgcatggcaggacttggctggctgcgactttgtgctggacctgatcagccagactgaggacctgggggacccagctcgcccccgcagctaccccatcactcctcttggctcagccgaggccattccccttgcccctggcattcaggccccctcactgcccccaggaccccctccaggtccagccccaacgctgcccagcagggaccacacaggggaggtccagaggtcagggagcctggacggcttcctggaccagatcttccagccagtgatatcctccggcctcagcgatctggaacaaagctgggctctgagcagccgcatgaagggagggggcgccattgggcccacacagcagggctaccccatggtgtacccaggaatgattcagatgcctgcataccagccaggcatggtccctgcacccatgcccatgatgccagcaatgggcacagtccctgccatgccagccatggtggtgccgccgcagccaccgcttcccagcctggatgcagggcagctggccgtccagcagcagaactttatccagcagcaggcgctaatcctggcccagcagatgacagcccaggccatgtccctgtccctggagcagcagatgcagcagcggcagcagcaggctcgggcctccgaggctgcgtcccaggcctcaccctcagccgtcacctccaagcccaggaagccccccacacccccggagaagccacagcgtgacctgggatcagagggtggctgcctgaggatgctgtcccccagcccaggaaagggccccccgccagctgtggctcctcgacccaaggccccgctacagcttgggccctctagctccatcaaggaaaagcaggggccccttctggacctgtttggccagaagctgcctattgcccacacacccccacctccaccagcgccaccactgcctctgcccgaggacccagggaccctttcagcagagcgtcgttgcttgacacagcccgtggaggaccagggggtctccacccagctactcgcgccctctggcagcgtgtgcttctcctacaccggcacgccctggaagttgttcctacgcaaggaggtgttctacccacgggagaacttcagccatccctactacctgaggctcctctgtgagcagatcctacgggacaccttctccgagtcctgtatccggatttcccagaatgagcggcggaaaatgaaagacctgctgggaggcttggaggtggacctggattctctcaccaccaccgaagacagcgtcaagaagcgcatcgtggtggccgctcgggacaactgggccaattacttctcccgcttctttcctgtctcgggcgagagtggcagcgacgtgcagctgttagccgtgtcccaccgtgggctgcgactgctcaaggtgacccaaggccccggcctccgccccgaccagctgaagattctctgctcatacagctttgcggaggtgctgggtgtggagtgccggggcggctccaccctggagctgtcactgaagagcgagcagctggtgctgcacacagcccgggcaagggccatcgaggcgctggttgagctattcctgaatgagcttaagaaggactccggctatgtcatcgccctgcgcagctacatcactgacaactgcagcctcctcagcttccaccgtggggacctcatcaagctgctgccggtggccaccctggagccaggctggcagtttggctctgccgggggccgttccggactctttcctgccgacatagtgc

SEQ ID NO: 156930 - DNA, 3492 bp, Homo sapiens; identical to SEQ ID NO: 156569
  Payload ID: 10753
  Gene Symbol: MYO16
  Gene Name: myosin XVI
  Uniprot ID: Q9Y6X6
  ENST ID: ENST00000251041
  CDS Start-End: 42-2864

SEQ ID NO: 156931 - DNA, 6874 bp, Homo sapiens; identical to SEQ ID NO: 156570
  Payload ID: 10753
  Gene Symbol: MYO16
  Gene Name: myosin XVI
  Uniprot ID: Q9Y6X6
  ENST ID: ENST00000356711
  CDS Start-End: 127-5703

SEQ ID NO: 156932 - DNA, 6779 bp, Homo sapiens; identical to SEQ ID NO: 156567
  Payload ID: 10753
  Gene Symbol: MYO16
  Gene Name: myosin XVI
  Uniprot ID: Q9Y6X6
  ENST ID: ENST00000357550
  CDS Start-End: 42-5618

SEQ ID NO: 156933 - DNA, 7436 bp, Homo sapiens; identical to SEQ ID NO: 156568
  Payload ID: 10753
  Gene Symbol: MYO16
  Gene Name: myosin XVI
  ENST ID: ENST00000457511
  CDS Start-End: 623-6265

SEQ ID NO: 156934 - DNA, 7504 bp, Homo sapiens
  Payload ID: 10754
  Gene Symbol: MYO18A
  Gene Name: myosin XVIIIA
  Uniprot ID: Q92614
  ENST ID: ENST00000531253
  CDS Start-End: 134-6253
ctggatgccgcgtctccgcttctgctgcctgccgggcgggctccggtggccgcagcaaagtggggcaccaaggccctgtgctaagcactcataatcctctgggggtgctacccctacaaacagcacccccaccatgtttaacctaatgaagaaagacaaggacaaagatggcgggcggaaggagaagaaggagaaaaaggagaaaaaggagcggatgtcagcggcagagcttcggagcctggaggagatgagcctgcgacgtggcttcttcaacctgaaccgctcctccaagcgtgaatccaagacgcgcctggaaatctccaaccccatccccatcaaggtggccagcggctctgacctgcacctgactgacattgactccgatagtaaccggggcagcgtcatcctggactcgggccacctaagtacagccagctccagcgatgacctcaagggtgaggagggtagcttccgtggctcggtgctgcagcgggcagccaagttcggctcactggccaagcagaactcacagatgattgtcaagcgcttttccttctcccagcgtagccgggatgagagcgcctcagaaacctcgacgccctcagagcactctgccgccccctcgccacaggtggaggtgaggactctagagggacagctggtgcagcatcctggcccaggcatccctcgaccagggcaccgatcccgagcccctgagctagtgactaaaaagttcccagtcgacctgcgcctgccccccgtggtgcccctgcccccacctaccctccgggagctggagctgcaacgacggcccactggagactttggcttctccctgcggcgcacaaccatgctggatcggggccccgagggccaggcctgtcggcgtgtggtccactttgctgagcctggtgcaggcaccaaggacctggccctggggctggtgccaggagatcgactggtggagattaatgggcacaatgtggagagcaagtccagggatgagattgtggagatgatccggcagtcaggggacagcgtgcggctcaaggtgcagcccattccagagctcagcgagctcagcaggagctggctgcggagcggcgagggacctcgcagggagccatccgatgcgaaaacagaagaacagattgcagcagaagaggcctggaatgagacggagaaggtgtggctggtccatagggacggcttctcactggccagtcaactcaaatctgaggagctcaacttgcctgaggggaaggtgcgtgtgaagctggaccacgatggggccatcctggatgtggatgaggatgacgttgagaaggctaatgctccctcctgcgaccgtctggaggatctggcctcactggtgtacctcaatgagtccagcgtcctgcacaccttgcgccagcgctatggcgctagcctgctgcacacgtatgctggccccagcctgctggttcttggcccccgtggggcccctgctgtgtactctgagaaggtgatgcacatgttcaagggttgtcggcgggaggacatggcaccccacatctatgcagtggcccagaccgcatacagggcgatgctgatgagccgtcaggatcagtcaatcatcctcctgggcagtagtggcagtggcaagaccaccagctgccagcatctggtgcagtacctggccaccatcgcgggcatcagcgggaacaaggtgttttctgtggagaagtggcaggctctgtacaccctcctggaagcctttgggaacagccccaccatcattaatggcaatgccacccgcttctcccagatcctctccctggactttgaccaagctggccaggtggcctcagcctccattcagacaatgcttctggagaagctgcgtgtggctcggcgcccagccagtgaagccacattcaacgtcttctactacctgctggcctgtggggatggcaccctcaggacagagctccacctcaaccacttggcagagaacaatgtgtttgggattgtgccactggccaagcctgaggaaaagcagaaggcagctcagcagtttagtaagctgcaggcggccatgaaggtgctgggcatctcccccgatgaacagaaggcctgctggttcattctggctgccatctaccacctgggggctgcgggagccaccaaagaagctgctgaagctgggcgcaagcagtttgcccgccatgagtgggcccagaaggctgcgtacctactgggctgcagcctggaggagctgtcctcagccatcttcaagcaccagcacaagggtggcaccctgcagcgctccacctccttccgccagggccccgaggagagtggcctgggagatgggacaggcccgaaactgagtgcactggagtgccttgagggcatggcggccggcctctacagcgagctcttcacccttctcgtctccctggtgaatagggctctcaagtccagccagcactcactctgctccatgatgattgtcgacaccccgggcttccagaaccctgagcagggtgggtcagcccgcggagcctcctttgaggagctgtgccacaactacacccaagaccggctgcagaggctcttccacgagcgcaccttcgtgcaggagttggaaagatacaaggaggagaacatcgagctggcgtttgacgacttggaacccccgacggatgactctgtggctgctgtggaccaggcctcccatcagtccctggtccgctcgctggcccgcacagacgaggcgaggggcctgctctggctattggaagaggaggctctggtgccaggggccagtgaggacaccctcctggagcgccttttctcctattatggcccccaggaaggtgacaaaaaaggccaaagcccccttctgcacagcagcaaaccacaccactttctcctgggccacagccatggcaccaactgggtagagtacaatgtgactggctggctgaactacaccaagcagaacccagccacccagaatgccccccggctcctgcaggactcccagaaaaaaatcatcagcaacctgtttctgggccgcgcaggcagtgccacggtgctctctggctccatcgcgggcctggagggcggctcgcagctggcactgcgccgggccaccagcatgcggaaaacctttaccacaggcatggcggctgtcaaaaagaagtcactgtgcatccagatgaagctacaggtggacgccctcatcgacaccatcaagaagtcaaagctgcattttgtgcactgcttcctgcctgtagctgagggctgggctggggagccccgttccgcctcctcccgccgagtcagcagcagcagtgagctggacctgccctcgggagaccactgcgaggctgggctcctgcagctcgacgtgcccctgctccgcacccagctccgcggctcccgcctgctcgatgccatgcgcatgtaccgccaaggttaccctgaccacatggtgttttccgagttccgccgccgctttgatgtcctggccccgcacctgaccaagaaacacgggcgtaactacatcgtggtggatgaaaggcgggcagtggaggagctgctggagtgcttggatctggagaagagcagctgctgcatgggcctgagccgggtgttcttccgggcgggcaccttggcacggctggaggagcagcgggatgaacaaaccagcaggaacctaaccctgttccaagcagcctgcaggggctacctggcccgccagcacttcaagaagagaaagatccaggacctggccattcgctgtgtacagaagaacatcaagaagaacaaaggggtgaaggactggccctggtggaagctttttaccacagtgaggcccctcatcgaagtacagctgtcagaggagcagatccggaacaaagacgaggagatccagcagctgcggagcaagctcgagaaggcggagaaggagaggaacgagctgcggctcaacagtgaccggctggagagccggatctcagagctgacatcggagctgacagatgagcgtaacacaggagagtccgcctcccagctgctggacgcggagacagcagagaggctccgggctgagaaggagatgaaggaactgcagacccagtacgatgcactgaagaagcagatggaggttatggaaatggaggtgatggaggcccgtctcatccgggcagcggagatcaacggggaagtggatgatgatgatgcaggtggcgagtggcggctgaagtatgagcgggctgtgcgggaggtggacttcaccaagaaacggctccagcaggagtttgaggacaagctggaggtggagcagcagaacaagaggcagctggaacggcggctcggggacctgcaggcagatagtgaggagagtcagcgggctctgcagcagctcaagaagaagtgccagcgactgacggctgagctgcaagacaccaagctgcacctggagggccagcaggtccgcaaccacgaactggagaagaagcagaggaggtttgacagtgagctctcgcaggcgcatgaggaggcccagcgggagaagctgcagcgggagaagctgcagcgggagaaggacatgctcctcgctgaggctttcagcctgaagcagcaactagaggaaaaagacatggacattgcagggttcacccagaaggttgtgtctctagaggcagagctccaggacatttcttcccaagagtccaaggatgaggcttctctggccaaggtcaagaaacagctccgggacctggaggccaaagtcaaggatcaggaagaagagctggatgagcaggcagggaccatccagatgctggaacaggccaagctgcgtctggagatggagatggagcggatgagacagacccattctaaggagatggagagtcgggatgaggaggtggaggaggcccggcagtcgtgtcagaagaagttaaaacagatggaggtgcagctagaggaagagtatgaggacaagcagaaggttctgcgagagaagcgggagctggagggcaagctcgccaccctcagcgaccaggtgaaccggcgggactttgagtcagagaagcggctgcggaaggacctgaagcgcaccaaggccctgctggcagatgcccagctcatgctggaccacctgaagaacagtgctcccagcaagcgagagattgcccagctcaagaaccagctggaggagtcagagttcacctgtgcggcagccgtgaaagcacggaaagcaatggaggtggagatcgaagacctgcacctgcagattgatgacatcgccaaagccaagacagcgctggaggagcagctgagccgccttcagcgtgagaagaatgagatccagaaccggctggaggaagatcaggaagacatgaacgaattgatgaagaagcacaaggctgccgtggctcaggcttcccgggacctggctcagataaatgatctccaagctcagctagaagaagccaacaaagagaagcaggagctgcaggagaagctacaagccctccagagccaggtggagttcctggagcagtccatggtggacaagtccctggtgagcaggcaggaagctaagatacgggagctggagacacgcctggagtttgaaaggacgcaagtgaaacggctggagagcctggctagccgtctcaaggaaaacatggagaagctgactgaggagcgggatcagcgcattgcagccgagaaccgggagaaggaacagaacaagcggctacagaggcagctccgggacaccaaggaggagatgggcgagcttgccaggaaggaggccgaggcgagccgcaagaagcacgaactggagatggatctagaaagcctggaggctgctaaccagagcctgcaggctgacctaaagttggcattcaagcgcatcggggacctgcaggctgccattgaggatgagatggagagtgatgagaatgaggacctcatcaacagtgagggagactctgatgtggactcggagctggaggaccgtgttgacggggtcaagtcctggttgtcaaaaaacaagggaccttccaaggcagcttctgatgatggcagcttaaagagttccagccccaccagctactggaagtcccttgcccctgatcggtcagatgatgagcacgaccctctcgacaacacctccagaccgcgatactcccacagttatctgagtgacagcgacacagaggccaagctgacggagactaacgcatagcccaggggagtggttggcagccctctcaccccagggcctgtggctgcctgggcacctctcccaggaagtggtggggcaccggtctcccccacccgactgctgatctgcatgggaaacaccctgaccttcttctgtcaggggcactttccaggctatgggtgtctgatgtctccacgtggaagaggtgggggaaagaggagtttctgaagagaactttttgctcctctgtctcaaaatgccagactcttggcttctaccctgtgtcaccgtgggcagtggcaggtggcctggcactgcatggagccagcacgttgacctccctctcagctccctgctcagggacggtggacaggttgcctactgggacactctaggttgctgggtccatggggaggattgggggaggagaagcagtgccttccctctcgtgtggggtgggggctctctcttcttggtgcctgctgtctttctactttttaatttaaatacccaacctctccatcacagctgcatccctgagagtgggagggggctgtagtggtagctggggctcccaagaacgactcgggaatgtcatctccatcttcacccttcagagagcagtcctttctctgtgcagctggagacgctggtgaggagagccgggtccaggttcttaagaatgaggtgcggaggggctctccggtgctgctgggctgggttgagcaagcctacgcagacaagtgtgtgtgtggaccatccgcacctccagcccccaccccaccctctttgtctcagcgtgttatgtgcaatgacctatttaaggtaaacccattccaactacagcagttcagggctgatccaagcactgcctccctcctgctctgtccaggtggtctggaccataaactcaacttgagagggaaggcttggggttgaggacttgtgatcagaaaaactgaagatggaagttttggccggtgctcattagacatgagtcctcactctgtgtcctgagcccgtgtcattcttccaacctccctgcccccacacacttatcccagacacaacaccatgtggtctggaggtcccagcccccaccctaaaaaggttatccctgagaactccaccagacttgggagcccaagtgcagtgcctggtgctgctcccatctgccgccccccttctctcctgcaattggtttgtactcactgggctgtgctctcccctgtttacccgatgtatggaaataaaggcccttttcctcctggc

SEQ ID NO: 156935 - DNA, 6479 bp, Homo sapiens
  Payload ID: 10754
  Gene Symbol: MYO18A
  Gene Name: myosin XVIIIA
  ENST ID: ENST00000530254
  CDS Start-End: 1-82
agtctccttgctctgggctgctccaggccaggccatgcggaaagtgtgttgttatgaggattcaatgaggagacctgtatgaagtgccttcccctgtgcctggctcatagcgaaaacagaagaacagattgcagcagaagaggcctggaatgagacggagaaggtgtggctggtccatagggacggcttctcactggccagtcaactcaaatctgaggagctcaacttgcctgaggggaaggtgcgtgtgaagctggaccacgatggggccatcctggatgtggatgaggatgacgttgagaaggctaatgctccctcctgcgaccgtctggaggatctggcctcactggtgtacctcaatgagtccagcgtcctgcacaccttgcgccagcgctatggcgctagcctgctgcacacgtatgctggccccagcctgctggttcttggcccccgtggggcccctgctgtgtactctgagaaggtgatgcacatgttcaagggttgtcggcgggaggacatggcaccccacatctatgcagtggcccagaccgcatacagggcgatgctgatgagccgtcaggatcagtcaatcatcctcctgggcagtagtggcagtggcaagaccaccagctgccagcatctggtgcagtacctggccaccatcgcgggcatcagcgggaacaaggtgttttctgtggagaagtggcaggctctgtacaccctcctggaagcctttgggaacagccccaccatcattaatggcaatgccacccgcttctcccagatcctctccctggactttgaccaagctggccaggtggcctcagcctccattcagacaatgcttctggagaagctgcgtgtggctcggcgcccagccagtgaagccacattcaacgtcttctactacctgctggcctgtggggatggcaccctcaggacagagctccacctcaaccacttggcagagaacaatgtgtttgggattgtgccactggccaagcctgaggaaaagcagaaggcagctcagcagtttagtaagctgcaggcggccatgaaggtgctgggcatctcccccgatgaacagaaggcctgctggttcattctggctgccatctaccacctgggggctgcgggagccaccaaagaagctgctgaagctgggcgcaagcagtttgcccgccatgagtgggcccagaaggctgcgtacctactgggctgcagcctggaggagctgtcctcagccatcttcaagcaccagcacaagggtggcaccctgcagcgctccacctccttccgccagggccccgaggagagtggcctgggagatgggacaggcccgaaactgagtgcactggagtgccttgagggcatggcggccggcctctacagcgagctcttcacccttctcgtctccctggtgaatagggctctcaagtccagccagcactcactctgctccatgatgattgtcgacaccccgggcttccagaaccctgagcagggtgggtcagcccgcggagcctcctttgaggagctgtgccacaactacacccaagaccggctgcagaggctcttccacgagcgcaccttcgtgcaggagttggaaagatacaaggaggagaacatcgagctggcgtttgacgacttggaacccccgacggatgactctgtggctgctgtggaccaggcctcccatcagtccctggtccgctcgctggcccgcacagacgaggcgaggggcctgctctggctattggaagaggaggctctggtgccaggggccagtgaggacaccctcctggagcgccttttctcctattatggcccccaggaaggtgacaaaaaaggccaaagcccccttctgcacagcagcaaaccacaccactttctcctgggccacagccatggcaccaactgggtagagtacaatgtgactggctggctgaactacaccaagcagaacccagccacccagaatgccccccggctcctgcaggactcccagaaaaaaatcatcagcaacctgtttctgggccgcgcaggcagtgccacggtgctctctggctccatcgcgggcctggagggcggctcgcagctggcactgcgccgggccaccagcatgcggaaaacctttaccacaggcatggcggctgtcaaaaagaagtcactgtgcatccagatgaagctacaggtggacgccctcatcgacaccatcaagaagtcaaagctgcattttgtgcactgcttcctgcctgtagctgagggctgggctggggagccccgttccgcctcctcccgccgagtcagcagcagcagtgagctggacctgccctcgggagaccactgcgaggctgggctcctgcagctcgacgtgcccctgctccgcacccagctccgcggctcccgcctgctcgatgccatgcgcatgtaccgccaaggttaccctgaccacatggtgttttccgagttccgccgccgctttgatgtcctggccccgcacctgaccaagaaacacgggcgtaactacatcgtggtggatgaaaggcgggcagtggaggagctgctggagtgcttggatctggagaagagcagctgctgcatgggcctgagccgggtgttcttccgggcgggcaccttggcacggctggaggagcagcgggatgaacaaaccagcaggaacctaaccctgttccaagcagcctgcaggggctacctggcccgccagcacttcaagaagagaaagatccaggacctggccattcgctgtgtacagaagaacatcaagaagaacaaaggggtgaaggactggccctggtggaagctttttaccacagtgaggcccctcatcgaagtacagctgtcagaggagcagatccggaacaaagacgaggagatccagcagctgcggagcaagctcgagaaggcggagaaggagaggaacgagctgcggctcaacagtgaccggctggagagccggatctcagagctgacatcggagctgacagatgagcgtaacacaggagagtccgcctcccagctgctggacgcggagacagcagagaggctccgggctgagaaggagatgaaggaactgcagacccagtacgatgcactgaagaagcagatggaggttatggaaatggaggtgatggaggcccgtctcatccgggcagcggagatcaacggggaagtggatgatgatgatgcaggtggcgagtggcggctgaagtatgagcgggctgtgcgggaggtggacttcaccaagaaacggctccagcaggagtttgaggacaagctggaggtggagcagcagaacaagaggcagctggaacggcggctcggggacctgcaggcagatagtgaggagagtcagcgggctctgcagcagctcaagaagaagtgccagcgactgacggctgagctgcaagacaccaagctgcacctggagggccagcaggtccgcaaccacgaactggagaagaagcagaggaggtttgacagtgagctctcgcaggcgcatgaggaggcccagcgggagaagctgcagcgggagaagctgcagcgggagaaggacatgctcctcgctgaggctttcagcctgaagcagcaactagaggaaaaagacatggacattgcagggttcacccagaaggttgtgtctctagaggcagagctccaggacatttcttcccaagagtccaaggatgaggcttctctggccaaggtcaagaaacagctccgggacctggaggccaaagtcaaggatcaggaagaagagctggatgagcaggcagggaccatccagatgctggaacaggccaagctgcgtctggagatggagatggagcggatgagacagacccattctaaggagatggagagtcgggatgaggaggtggaggaggcccggcagtcgtgtcagaagaagttaaaacagatggaggtgcagctagaggaagagtatgaggacaagcagaaggttctgcgagagaagcgggagctggagggcaagctcgccaccctcagcgaccaggtgaaccggcgggactttgagtcagagaagcggctgcggaaggacctgaagcgcaccaaggccctgctggcagatgcccagctcatgctggaccacctgaagaacagtgctcccagcaagcgagagattgcccagctcaagaaccagctggaggagtcagagttcacctgtgcggcagccgtgaaagcacggaaagcaatggaggtggagatcgaagacctgcacctgcagattgatgacatcgccaaagccaagacagcgctggaggagcagctgagccgccttcagcgtgagaagaatgagatccagaaccggctggaggaagatcaggaagacatgaacgaattgatgaagaagcacaaggctgccgtggctcaggcttcccgggacctggctcagataaatgatctccaagctcagctagaagaagccaacaaagagaagcaggagctgcaggagaagctacaagccctccagagccaggtggagttcctggagcagtccatggtggacaagtccctggtgagcaggcaggaagctaagatacgggagctggagacacgcctggagtttgaaaggacgcaagtgaaacggctggagagcctggctagccgtctcaaggaaaacatggagaagctgactgaggagcgggatcagcgcattgcagccgagaaccgggagaaggaacagaacaagcggctacagaggcagctccgggacaccaaggaggagatgggcgagcttgccaggaaggaggccgaggcgagccgcaagaagcacgaactggagatggatctagaaagcctggaggctgctaaccagagcctgcaggctgacctaaagttggcattcaagcgcatcggggacctgcaggctgccattgaggatgagatggagagtgatgagaatgaggacctcatcaacagtgagggagactctgatgtggactcggagctggaggaccgtgttgacggggtcaagtcctggttgtcaaaaaacaagggaccttccaaggcagcttctgatgatggcagcttaaagagttccagccccaccagctactggaagtcccttgcccctgatcggtcagatgatgagcacgaccctctcgacaacacctccagaccgcgatactcccacagttatctgagtgacagcgacacagaggccaagctgacggagactaacgcatagcccaggggagtggttggcagccctctcaccccagggcctgtggctgcctgggcacctctcccaggaagtggtggggcaccggtctcccccacccgactgctgatctgcatgggaaacaccctgaccttcttctgtcaggggcactttccaggctatgggtgtctgatgtctccacgtggaagaggtgggggaaagaggagtttctgaagagaactttttgctcctctgtctcaaaatgccagactcttggcttctaccctgtgtcaccgtgggcagtggcaggtggcctggcactgcatggagccagcacgttgacctccctctcagctccctgctcagggacggtggacaggttgcctactgggacactctaggttgctgggtccatggggaggattgggggaggagaagcagtgccttccctctcgtgtggggtgggggctctctcttcttggtgcctgctgtctttctactttttaatttaaatacccaacctctccatcacagctgcatccctgagagtgggagggggctgtagtggtagctggggctcccaagaacgactcgggaatgtcatctccatcttcacccttcagagagcagtcctttctctgtgcagctggagacgctggtgaggagagccgggtccaggttcttaagaatgaggtgcggaggggctctccggtgctgctgggctgggttgagcaagcctacgcagacaagtgtgtgtgtggaccatccgcacctccagcccccaccccaccctctttgtctcagcgtgttatgtgcaatgacctatttaaggtaaacccattccaactacagcagttcagggctgatccaagcactgcctccctcctgctctgtccaggtggtctggaccataaactcaacttgagagggaaggcttggggttgaggacttgtgatcagaaaaactgaagatggaagttttggccggtgctcattagacatgagtcctcactctgtgtcctgagcccgtgtcattcttccaacctccctgcccccacacacttatcccagacacaacaccatgtggtctggaggtcccagcccccaccctaaaaaggttatccctgagaactccaccagacttgggagcccaagtgcagtgcctggtgctgctcccatctgccgccccccttctctcctgcaattggtttgtactcactgggctgtgctctcccctgtttacccgatgtatggaaataaaggcccttttcctcctg

SEQ ID NO: 156936 - DNA, 7522 bp, Homo sapiens
  Payload ID: 10754
  Gene Symbol: MYO18A
  Gene Name: myosin XVIIIA
  Uniprot ID: Q92614
  ENST ID: ENST00000533112
  CDS Start-End: 263-6271
gcagggagtcacccggcgctgcggagctcagcacagccggccgggaggaggctccccctggagcacggggccaggccaggtgctggctacccctccggccgctgctacaacccttggcgaggggcagagcgcggggagagagccggggtcccggggctggaggaaacggccgctcagggagcagcaaagtggggcaccaaggccctgtgctaagcactcataatcctctgggggtgctacccctacaaacagcacccccaccatgtttaacctaatgaagaaagacaaggacaaagatggcgggcggaaggagaagaaggagaaaaaggagaaaaaggagcggatgtcagcggcagagcttcggagcctggaggagatgagcctgcgacgtggcttcttcaacctgaaccgctcctccaagcgtgaatccaagacgcgcctggaaatctccaaccccatccccatcaaggtggccagcggctctgacctgcacctgactgacattgactccgatagtaaccggggcagcgtcatcctggactcgggccacctaagtacagccagctccagcgatgacctcaagggtgaggagggtagcttccgtggctcggtgctgcagcgggcagccaagttcggctcactggccaagcagaactcacagatgattgtcaagcgcttttccttctcccagcgtagccgggatgagagcgcctcagaaacctcgacgccctcagagcactctgccgccccctcgccacaggtggaggtgaggactctagagggacagctggtgcagcatcctggcccaggcatccctcgaccagggcaccgatcccgagcccctgagctagtgactaaaaagttcccagtcgacctgcgcctgccccccgtggtgcccctgcccccacctaccctccgggagctggagctgcaacgacggcccactggagactttggcttctccctgcggcgcacaaccatgctggatcggggccccgagggccaggcctgtcggcgtgtggtccactttgctgagcctggtgcaggcaccaaggacctggccctggggctggtgccaggagatcgactggtggagattaatgggcacaatgtggagagcaagtccagggatgagattgtggagatgatccggcagtcaggggacagcgtgcggctcaaggtgcagcccattccagagctcagcgagctcagcaggagctggctgcggagcggcgagggacctcgcagggagccatccgatgcgaaaacagaagaacagattgcagcagaagaggcctggaatgagacggagaaggtgtggctggtccatagggacggcttctcactggccagtcaactcaaatctgaggagctcaacttgcctgaggggaaggtgcgtgtgaagctggaccacgatggggccatcctggatgtggatgaggatgacgttgagaaggctaatgctccctcctgcgaccgtctggaggatctggcctcactggtgtacctcaatgagtccagcgtcctgcacaccttgcgccagcgctatggcgctagcctgctgcacacgtatgctggccccagcctgctggttcttggcccccgtggggcccctgctgtgtactctgagaaggtgatgcacatgttcaagggttgtcggcgggaggacatggcaccccacatctatgcagtggcccagaccgcatacagggcgatgctgatgagccgtcaggatcagtcaatcatcctcctgggcagtagtggcagtggcaagaccaccagctgccagcatctggtgcagtacctggccaccatcgcgggcatcagcgggaacaaggtgttttctgtggagaagtggcaggctctgtacaccctcctggaagcctttgggaacagccccaccatcattaatggcaatgccacccgcttctcccagatcctctccctggactttgaccaagctggccaggtggcctcagcctccattcagacaatgcttctggagaagctgcgtgtggctcggcgcccagccagtgaagccacattcaacgtcttctactacctgctggcctgtggggatggcaccctcaggacagagctccacctcaaccacttggcagagaacaatgtgtttgggattgtgccactggccaagcctgaggaaaagcagaaggcagctcagcagtttagtaagctgcaggcggccatgaaggtgctgggcatctcccccgatgaacagaaggcctgctggttcattctggctgccatctaccacctgggggctgcgggagccaccaaagaagctgctgaagctgggcgcaagcagtttgcccgccatgagtgggcccagaaggctgcgtacctactgggctgcagcctggaggagctgtcctcagccatcttcaagcaccagcacaagggtggcaccctgcagcgctccacctccttccgccagggccccgaggagagtggcctgggagatgggacaggcccgaaactgagtgcactggagtgccttgagggcatggcggccggcctctacagcgagctcttcacccttctcgtctccctggtgaatagggctctcaagtccagccagcactcactctgctccatgatgattgtcgacaccccgggcttccagaaccctgagcagggtgggtcagcccgcggagcctcctttgaggagctgtgccacaactacacccaagaccggctgcagaggctcttccacgagcgcaccttcgtgcaggagttggaaagatacaaggaggagaacatcgagctggcgtttgacgacttggaacccccgacggatgactctgtggctgctgtggaccaggcctcccatcagtccctggtccgctcgctggcccgcacagacgaggcgaggggcctgctctggctattggaagaggaggctctggtgccaggggccagtgaggacaccctcctggagcgccttttctcctattatggcccccaggaaggtgacaaaaaaggccaaagcccccttctgcacagcagcaaaccacaccactttctcctgggccacagccatggcaccaactgggtagagtacaatgtgactggctggctgaactacaccaagcagaacccagccacccagaatgccccccggctcctgcaggactcccagaaaaaaatcatcagcaacctgtttctgggccgcgcaggcagtgccacggtgctctctggctccatcgcgggcctggagggcggctcgcagctggcactgcgccgggccaccagcatgcggaaaacctttaccacaggcatggcggctgtcaaaaagaagtcactgtgcatccagatgaagctacaggtggacgccctcatcgacaccatcaagaagtcaaagctgcattttgtgcactgcttcctgcctgtagctgagggctgggctggggagccccgttccgcctcctcccgccgagtcagcagcagcagtgagctggacctgccctcgggagaccactgcgaggctgggctcctgcagctcgacgtgcccctgctccgcacccagctccgcggctcccgcctgctcgatgccatgcgcatgtaccgccaaggttaccctgaccacatggtgttttccgagttccgccgccgctttgatgtcctggccccgcacctgaccaagaaacacgggcgtaactacatcgtggtggatgaaaggcgggcagtggaggagctgctggagtgcttggatctggagaagagcagctgctgcatgggcctgagccgggtgttcttccgggcgggcaccttggcacggctggaggagcagcgggatgaacaaaccagcaggaacctaaccctgttccaagcagcctgcaggggctacctggcccgccagcacttcaagaagagaaagatccaggacctggccattcgctgtgtacagaagaacatcaagaagaacaaaggggtgaaggactggccctggtggaagctttttaccacagtgaggcccctcatcgaagtacagctgtcagaggagcagatccggaacaaagacgaggagatccagcagctgcggagcaagctcgagaaggcggagaaggagaggaacgagctgcggctcaacagtgaccggctggagagccggatctcagagctgacatcggagctgacagatgagcgtaacacaggagagtccgcctcccagctgctggacgcggagacagcagagaggctccgggctgagaaggagatgaaggaactgcagacccagtacgatgcactgaagaagcagatggaggttatggaaatggaggtgatggaggcccgtctcatccgggcagcggagatcaacggggaagtggatgatgatgatgcaggtggcgagtggcggctgaagtatgagcgggctgtgcgggaggtggacttcaccaagaaacggctccagcaggagtttgaggacaagctggaggtggagcagcagaacaagaggcagctggaacggcggctcggggacctgcaggcagatagtgaggagagtcagcgggctctgcagcagctcaagaagaagtgccagcgactgacggctgagctgcaagacaccaagctgcacctggagggccagcaggtccgcaaccacgaactggagaagaagcagaggaggtttgacagtgagctctcgcaggcgcatgaggaggcccagcgggagaagctgcagcgggagaagctgcagcgggagaaggacatgctcctcgctgaggctttcagcctgaagcagcaactagaggaaaaagacatggacattgcagggttcacccagaaggttgtgtctctagaggcagagctccaggacatttcttcccaagagtccaaggatgaggcttctctggccaaggtcaagaaacagctccgggacctggaggccaaagtcaaggatcaggaagaagagctggatgagcaggcagggaccatccagatgctggaacagttaaaacagatggaggtgcagctagaggaagagtatgaggacaagcagaaggttctgcgagagaagcgggagctggagggcaagctcgccaccctcagcgaccaggtgaaccggcgggactttgagtcagagaagcggctgcggaaggacctgaagcgcaccaaggccctgctggcagatgcccagctcatgctggaccacctgaagaacagtgctcccagcaagcgagagattgcccagctcaagaaccagctggaggagtcagagttcacctgtgcggcagccgtgaaagcacggaaagcaatggaggtggagatcgaagacctgcacctgcagattgatgacatcgccaaagccaagacagcgctggaggagcagctgagccgccttcagcgtgagaagaatgagatccagaaccggctggaggaagatcaggaagacatgaacgaattgatgaagaagcacaaggctgccgtggctcaggcttcccgggacctggctcagataaatgatctccaagctcagctagaagaagccaacaaagagaagcaggagctgcaggagaagctacaagccctccagagccaggtggagttcctggagcagtccatggtggacaagtccctggtgagcaggcaggaagctaagatacgggagctggagacacgcctggagtttgaaaggacgcaagtgaaacggctggagagcctggctagccgtctcaaggaaaacatggagaagctgactgaggagcgggatcagcgcattgcagccgagaaccgggagaaggaacagaacaagcggctacagaggcagctccgggacaccaaggaggagatgggcgagcttgccaggaaggaggccgaggcgagccgcaagaagcacgaactggagatggatctagaaagcctggaggctgctaaccagagcctgcaggctgacctaaagttggcattcaagcgcatcggggacctgcaggctgccattgaggatgagatggagagtgatgagaatgaggacctcatcaacagtgagggagactctgatgtggactcggagctggaggaccgtgttgacggggtcaagtcctggttgtcaaaaaacaagggaccttccaaggcagcttctgatgatggcagcttaaagagttccagccccaccagctactggaagtcccttgcccctgatcggtcagatgatgagcacgaccctctcgacaacacctccagaccgcgatactcccacagttatctgagtgacagcgacacagaggccaagctgacggagactaacgcatagcccaggggagtggttggcagccctctcaccccagggcctgtggctgcctgggcacctctcccaggaagtggtggggcaccggtctcccccacccgactgctgatctgcatgggaaacaccctgaccttcttctgtcaggggcactttccaggctatgggtgtctgatgtctccacgtggaagaggtgggggaaagaggagtttctgaagagaactttttgctcctctgtctcaaaatgccagactcttggcttctaccctgtgtcaccgtgggcagtggcaggtggcctggcactgcatggagccagcacgttgacctccctctcagctccctgctcagggacggtggacaggttgcctactgggacactctaggttgctgggtccatggggaggattgggggaggagaagcagtgccttccctctcgtgtggggtgggggctctctcttcttggtgcctgctgtctttctactttttaatttaaatacccaacctctccatcacagctgcatccctgagagtgggagggggctgtagtggtagctggggctcccaagaacgactcgggaatgtcatctccatcttcacccttcagagagcagtcctttctctgtgcagctggagacgctggtgaggagagccgggtccaggttcttaagaatgaggtgcggaggggctctccggtgctgctgggctgggttgagcaagcctacgcagacaagtgtgtgtgtggaccatccgcacctccagcccccaccccaccctctttgtctcagcgtgttatgtgcaatgacctatttaaggtaaacccattccaactacagcagttcagggctgatccaagcactgcctccctcctgctctgtccaggtggtctggaccataaactcaacttgagagggaaggcttggggttgaggacttgtgatcagaaaaactgaagatggaagttttggccggtgctcattagacatgagtcctcactctgtgtcctgagcccgtgtcattcttccaacctccctgcccccacacacttatcccagacacaacaccatgtggtctggaggtcccagcccccaccctaaaaaggttatccctgagaactccaccagacttgggagcccaagtgcagtgcctggtgctgctcccatctgccgccccccttctctcctgcaattggtttgtactcactgggctgtgctctcccctgtttacccgatgtatggaaataaaggcccttttcctcctggc

SEQ ID NO: 156937 - DNA, 589 bp, Homo sapiens
  Payload ID: 10754
  Gene Symbol: MYO18A
  Gene Name: myosin XVIIIA
  ENST ID: ENST00000528564
  CDS Start-End: 1-589
ttttgagctgctaacggagccagagcagcatcagagcggagtctccttgctctgggctgctccaggccaggccatgcggctggactctgaggccgcctctcatgcccacagccaggcgaaaacagaagaacagattgcagcagaagaggcctggaatgagacggagaaggtgtggctggtccatagggacggcttctcactggccagtcaactcaaatctgaggagctcaacttgcctgaggggaaggtgcgtgtgaagctggaccacgatggggccatcctggatgtggatgaggatgacgttgagaaggctaatgctccctcctgcgaccgtctggaggatctggcctcactggtgtacctcaatgagtccagcgtcctgcacaccttgcgccagcgctatggcgctagcctgctgcacacgtatgctggccccagcctgctggttcttggcccccgtggggcccctgctgtgtactctgagaaggtgatgcacatgttcaagggttgtcggcgggaggacatggcaccccacatctatgcagtggcccagaccgcatacagggcgatgctgatgagccgtcaggat

SEQ ID NO: 156938 - DNA, 7597 bp, Homo sapiens
  Payload ID: 10754
  Gene Symbol: MYO18A
  Gene Name: myosin XVIIIA
  Uniprot ID: Q92614
  ENST ID: ENST00000527372
  CDS Start-End: 182-6346
agctgcgccgcgctgcgctctgctccatccctgaccgggccgaggctgctggatgccgcgtctccgcttctgctgcctgccgggcgggctccggtggccgcagcaaagtggggcaccaaggccctgtgctaagcactcataatcctctgggggtgctacccctacaaacagcacccccaccatgtttaacctaatgaagaaagacaaggacaaagatggcgggcggaaggagaagaaggagaaaaaggagaaaaaggagcggatgtcagcggcagagcttcggagcctggaggagatgagcctgcgacgtggcttcttcaacctgaaccgctcctccaagcgtgaatccaagacgcgcctggaaatctccaaccccatccccatcaaggtggccagcggctctgacctgcacctgactgacattgactccgatagtaaccggggcagcgtcatcctggactcgggccacctaagtacagccagctccagcgatgacctcaagggtgaggagggtagcttccgtggctcggtgctgcagcgggcagccaagttcggctcactggccaagcagaactcacagatgattgtcaagcgcttttccttctcccagcgtagccgggatgagagcgcctcagaaacctcgacgccctcagagcactctgccgccccctcgccacaggtggaggtgaggactctagagggacagctggtgcagcatcctggcccaggcatccctcgaccagggcaccgatcccgagcccctgagctagtgactaaaaagttcccagtcgacctgcgcctgccccccgtggtgcccctgcccccacctaccctccgggagctggagctgcaacgacggcccactggagactttggcttctccctgcggcgcacaaccatgctggatcggggccccgagggccaggcctgtcggcgtgtggtccactttgctgagcctggtgcaggcaccaaggacctggccctggggctggtgccaggagatcgactggtggagattaatgggcacaatgtggagagcaagtccagggatgagattgtggagatgatccggcagtcaggggacagcgtgcggctcaaggtgcagcccattccagagctcagcgagctcagcaggagctggctgcggagcggcgagggacctcgcagggagccatccgatgcgaaaacagaagaacagattgcagcagaagaggcctggaatgagacggagaaggtgtggctggtccatagggacggcttctcactggccagtcaactcaaatctgaggagctcaacttgcctgaggggaaggtgcgtgtgaagctggaccacgatggggccatcctggatgtggatgaggatgacgttgagaaggctaatgctccctcctgcgaccgtctggaggatctggcctcactggtgtacctcaatgagtccagcgtcctgcacaccttgcgccagcgctatggcgctagcctgctgcacacgtatgctggccccagcctgctggttcttggcccccgtggggcccctgctgtgtactctgagaaggtgatgcacatgttcaagggttgtcggcgggaggacatggcaccccacatctatgcagtggcccagaccgcatacagggcgatgctgatgagccgtcaggatcagtcaatcatcctcctgggcagtagtggcagtggcaagaccaccagctgccagcatctggtgcagtacctggccaccatcgcgggcatcagcgggaacaaggtgttttctgtggagaagtggcaggctctgtacaccctcctggaagcctttgggaacagccccaccatcattaatggcaatgccacccgcttctcccagatcctctccctggactttgaccaagctggccaggtggcctcagcctccattcagacaatgcttctggagaagctgcgtgtggctcggcgcccagccagtgaagccacattcaacgtcttctactacctgctggcctgtggggatggcaccctcaggacagagctccacctcaaccacttggcagagaacaatgtgtttgggattgtgccactggccaagcctgaggaaaagcagaaggcagctcagcagtttagtaagctgcaggcggccatgaaggtgctgggcatctcccccgatgaacagaaggcctgctggttcattctggctgccatctaccacctgggggctgcgggagccaccaaagaagctgctgaagctgggcgcaagcagtttgcccgccatgagtgggcccagaaggctgcgtacctactgggctgcagcctggaggagctgtcctcagccatcttcaagcaccagcacaagggtggcaccctgcagcgctccacctccttccgccagggccccgaggagagtggcctgggagatgggacaggcccgaaactgagtgcactggagtgccttgagggcatggcggccggcctctacagcgagctcttcacccttctcgtctccctggtgaatagggctctcaagtccagccagcactcactctgctccatgatgattgtcgacaccccgggcttccagaaccctgagcagggtgggtcagcccgcggagcctcctttgaggagctgtgccacaactacacccaagaccggctgcagaggctcttccacgagcgcaccttcgtgcaggagttggaaagatacaaggaggagaacatcgagctggcgtttgacgacttggaacccccgacggatgactctgtggctgctgtggaccaggcctcccatcagtccctggtccgctcgctggcccgcacagacgaggcgaggggcctgctctggctattggaagaggaggctctggtgccaggggccagtgaggacaccctcctggagcgccttttctcctattatggcccccaggaaggtgacaaaaaaggccaaagcccccttctgcacagcagcaaaccacaccactttctcctgggccacagccatggcaccaactgggtagagtacaatgtgactggctggctgaactacaccaagcagaacccagccacccagaatgccccccggctcctgcaggactcccagaaaaaaatcatcagcaacctgtttctgggccgcgcaggcagtgccacggtgctctctggctccatcgcgggcctggagggcggctcgcagctggcactgcgccgggccaccagcatgcggaaaacctttaccacaggcatggcggctgtcaaaaagaagtcactgtgcatccagatgaagctacaggtggacgccctcatcgacaccatcaagaagtcaaagctgcattttgtgcactgcttcctgcctgtagctgagggctgggctggggagccccgttccgcctcctcccgccgagtcagcagcagcagtgagctggacctgccctcgggagaccactgcgaggctgggctcctgcagctcgacgtgcccctgctccgcacccagctccgcggctcccgcctgctcgatgccatgcgcatgtaccgccaaggttaccctgaccacatggtgttttccgagttccgccgccgctttgatgtcctggccccgcacctgaccaagaaacacgggcgtaactacatcgtggtggatgaaaggcgggcagtggaggagctgctggagtgcttggatctggagaagagcagctgctgcatgggcctgagccgggtgttcttccgggcgggcaccttggcacggctggaggagcagcgggatgaacaaaccagcaggaacctaaccctgttccaagcagcctgcaggggctacctggcccgccagcacttcaagaagagaaagatccaggacctggccattcgctgtgtacagaagaacatcaagaagaacaaaggggtgaaggactggccctggtggaagctttttaccacagtgaggcccctcatcgaagtacagctgtcagaggagcagatccggaacaaagacgaggagatccagcagctgcggagcaagctcgagaaggcggagaaggagaggaacgagctgcggctcaacagtgaccggctggagagccggatctcagagctgacatcggagctgacagatgagcgtaacacaggagagtccgcctcccagctgctggacgcggagacagcagagaggctccgggctgagaaggagatgaaggaactgcagacccagtacgatgcactgaagaagcagatggaggttatggaaatggaggtgatggaggcccgtctcatccgggcagcggagatcaacggggaagtggatgatgatgatgcaggtggcgagtggcggctgaagtatgagcgggctgtgcgggaggtggacttcaccaagaaacggctccagcaggagtttgaggacaagctggaggtggagcagcagaacaagaggcagctggaacggcggctcggggacctgcaggcagatagtgaggagagtcagcgggctctgcagcagctcaagaagaagtgccagcgactgacggctgagctgcaagacaccaagctgcacctggagggccagcaggtccgcaaccacgaactggagaagaagcagaggaggtttgacagtgagctctcgcaggcgcatgaggaggcccagcgggagaagctgcagcgggagaagctgcagcgggagaaggacatgctcctcgctgaggctttcagcctgaagcagcaactagaggaaaaagacatggacattgcagggttcacccagaaggttgtgtctctagaggcagagctccaggacatttcttcccaagagtccaaggatgaggcttctctggccaaggtcaagaaacagctccgggacctggaggccaaagtcaaggatcaggaagaagagctggatgagcaggcagggaccatccagatgctggaacaggccaagctgcgtctggagatggagatggagcggatgagacagacccattctaaggagatggagagtcgggatgaggaggtggaggaggcccggcagtcgtgtcagaagaagttaaaacagatggaggtgcagctagaggaagagtatgaggacaagcagaaggttctgcgagagaagcgggagctggagggcaagctcgccaccctcagcgaccaggtgaaccggcgggactttgagtcagagaagcggctgcggaaggacctgaagcgcaccaaggccctgctggcagatgcccagctcatgctggaccacctgaagaacagtgctcccagcaagcgagagattgcccagctcaagaaccagctggaggagtcagagttcacctgtgcggcagccgtgaaagcacggaaagcaatggaggtggagatcgaagacctgcacctgcagattgatgacatcgccaaagccaagacagcgctggaggagcagctgagccgccttcagcgtgagaagaatgagatccagaaccggctggaggaagatcaggaagacatgaacgaattgatgaagaagcacaaggctgccgtggctcaggcttcccgggacctggctcagataaatgatctccaagctcagctagaagaagccaacaaagagaagcaggagctgcaggagaagctacaagccctccagagccaggtggagttcctggagcagtccatggtggacaagtccctggtgagcaggcaggaagctaagatacgggagctggagacacgcctggagtttgaaaggacgcaagtgaaacggctggagagcctggctagccgtctcaaggaaaacatggagaagctgactgaggagcgggatcagcgcattgcagccgagaaccgggagaaggaacagaacaagcggctacagaggcagctccgggacaccaaggaggagatgggcgagcttgccaggaaggaggccgaggcgagccgcaagaagcacgaactggagatggatctagaaagcctggaggctgctaaccagagcctgcaggctgacctaaagttggcattcaagcgcatcggggacctgcaggctgccattgaggatgagatggagagtgatgagaatgaggacctcatcaacagtttgcaggacatggtgacaaagtatcagaaaagaaagaataaacttgagggagactctgatgtggactcggagctggaggaccgtgttgacggggtcaagtcctggttgtcaaaaaacaagggaccttccaaggcagcttctgatgatggcagcttaaagagttccagccccaccagctactggaagtcccttgcccctgatcggtcagatgatgagcacgaccctctcgacaacacctccagaccgcgatactcccacagttatctgagtgacagcgacacagaggccaagctgacggagactaacgcatagcccaggggagtggttggcagccctctcaccccagggcctgtggctgcctgggcacctctcccaggaagtggtggggcaccggtctcccccacccgactgctgatctgcatgggaaacaccctgaccttcttctgtcaggggcactttccaggctatgggtgtctgatgtctccacgtggaagaggtgggggaaagaggagtttctgaagagaactttttgctcctctgtctcaaaatgccagactcttggcttctaccctgtgtcaccgtgggcagtggcaggtggcctggcactgcatggagccagcacgttgacctccctctcagctccctgctcagggacggtggacaggttgcctactgggacactctaggttgctgggtccatggggaggattgggggaggagaagcagtgccttccctctcgtgtggggtgggggctctctcttcttggtgcctgctgtctttctactttttaatttaaatacccaacctctccatcacagctgcatccctgagagtgggagggggctgtagtggtagctggggctcccaagaacgactcgggaatgtcatctccatcttcacccttcagagagcagtcctttctctgtgcagctggagacgctggtgaggagagccgggtccaggttcttaagaatgaggtgcggaggggctctccggtgctgctgggctgggttgagcaagcctacgcagacaagtgtgtgtgtggaccatccgcacctccagcccccaccccaccctctttgtctcagcgtgttatgtgcaatgacctatttaaggtaaacccattccaactacagcagttcagggctgatccaagcactgcctccctcctgctctgtccaggtggtctggaccataaactcaacttgagagggaaggcttggggttgaggacttgtgatcagaaaaactgaagatggaagttttggccggtgctcattagacatgagtcctcactctgtgtcctgagcccgtgtcattcttccaacctccctgcccccacacacttatcccagacacaacaccatgtggtctggaggtcccagcccccaccctaaaaaggttatccctgagaactccaccagacttgggagcccaagtgcagtgcctggtgctgctcccatctgccgccccccttctctcctgcaattggtttgtactcactgggctgtgctctcccctgtttacccgatgtatggaaataaaggcccttttcctcctggc

SEQ ID NO: 156939 - DNA, 650 bp, Homo sapiens
  Payload ID: 10754
  Gene Symbol: MYO18A
  Gene Name: myosin XVIIIA
  ENST ID: ENST00000588791
  CDS Start-End: 1-280
tcccagatcctctccctggactttgaccaagctggccaggtggcctcagcctccattcagacaatgcttctggagaagctgcgtgtggctcggcgcccagccagtgaagccacattcaacgtcttctactacctgctggcctgtggggatggcaccctcaggacagagctccacctcaaccacttggcagagaacaatgtgtttgggattgtgccactggccaagcctgaggaaaagcagaaggcagctcagcagtttagtaagctgcaggcggccatgaaggtgctgggcatctcccccgatgaacagaaggcctgctggttcattctggctgccatctaccacctgggggctgcgggagccaccaaaggtaacctgcagtggctgggcgcaagcagtttgcccgccatgagtgggcccagaaggctgcgtacctactgggctgcagcctggaggagctgtcctcagccatcttcaagcaccagcacaagggtggcaccctgcagcgctccacctccttccgccagggccccgaggagagtggcctgggagatgggacaggcccgaaactgagtgcactggagtgccttgagggcatggcggccggcctctacagcgagctcttcacccttctcgtctccctggtgaat

SEQ ID NO: 156940 - DNA, 7501 bp, Homo sapiens
  Payload ID: 10754
  Gene Symbol: MYO18A
  Gene Name: myosin XVIIIA
  ENST ID: ENST00000628822
  CDS Start-End: 134-6250
ctggatgccgcgtctccgcttctgctgcctgccgggcgggctccggtggccgcagcaaagtggggcaccaaggccctgtgctaagcactcataatcctctgggggtgctacccctacaaacagcacccccaccatgtttaacctaatgaagaaagacaaggacaaagatggcgggcggaaggagaagaaggagaaaaaggagaaaaaggagcggatgtcagcggcagagcttcggagcctggaggagatgagcctgcgacgtggcttcttcaacctgaaccgctcctccaagcgtgaatccaagacgcgcctggaaatctccaaccccatccccatcaaggtggccagcggctctgacctgcacctgactgacattgactccgatagtaaccggggcagcgtcatcctggactcgggccacctaagtacagccagctccagcgatgacctcaagggtgaggagggtagcttccgtggctcggtgctgcagcgggcagccaagttcggctcactggccaagcagaactcacagatgattgtcaagcgcttttccttctcccagcgtagccgggatgagagcgcctcagaaacctcgacgccctcagagcactctgccgccccctcgccacaggtggaggtgaggactctagagggacagctggtgcagcatcctggcccaggcatccctcgaccagggcaccgatcccgagcccctgagctagtgactaaaaagttcccagtcgacctgcgcctgccccccgtggtgcccctgcccccacctaccctccgggagctggagctgcaacgacggcccactggagactttggcttctccctgcggcgcacaaccatgctggatcggggccccgagggccaggcctgtcggcgtgtggtccactttgctgagcctggtgcaggcaccaaggacctggccctggggctggtgccaggagatcgactggtggagattaatgggcacaatgtggagagcaagtccagggatgagattgtggagatgatccggcagtcaggggacagcgtgcggctcaaggtgcagcccattccagagctcagcgagctcagcaggagctggctgcggagcggcgagggacctcgcagggagccatccgatgcgaaaacagaagaacagattgcagcagaagaggcctggaatgagacggagaaggtgtggctggtccatagggacggcttctcactggccagtcaactcaaatctgaggagctcaacttgcctgaggggaaggtgcgtgtgaagctggaccacgatggggccatcctggatgtggatgaggatgacgttgagaaggctaatgctccctcctgcgaccgtctggaggatctggcctcactggtgtacctcaatgagtccagcgtcctgcacaccttgcgccagcgctatggcgctagcctgctgcacacgtatgctggccccagcctgctggttcttggcccccgtggggcccctgctgtgtactctgagaaggtgatgcacatgttcaagggttgtcggcgggaggacatggcaccccacatctatgcagtggcccagaccgcatacagggcgatgctgatgagccgtcaggatcagtcaatcatcctcctgggcagtagtggcagtggcaagaccaccagctgccagcatctggtgcagtacctggccaccatcgcgggcatcagcgggaacaaggtgttttctgtggagaagtggcaggctctgtacaccctcctggaagcctttgggaacagccccaccatcattaatggcaatgccacccgcttctcccagatcctctccctggactttgaccaagctggccaggtggcctcagcctccattcagacaatgcttctggagaagctgcgtgtggctcggcgcccagccagtgaagccacattcaacgtcttctactacctgctggcctgtggggatggcaccctcaggacagagctccacctcaaccacttggcagagaacaatgtgtttgggattgtgccactggccaagcctgaggaaaagcagaaggcagctcagcagtttagtaagctgcaggcggccatgaaggtgctgggcatctcccccgatgaacagaaggcctgctggttcattctggctgccatctaccacctgggggctgcgggagccaccaaacctgcagtggctgggcgcaagcagtttgcccgccatgagtgggcccagaaggctgcgtacctactgggctgcagcctggaggagctgtcctcagccatcttcaagcaccagcacaagggtggcaccctgcagcgctccacctccttccgccagggccccgaggagagtggcctgggagatgggacaggcccgaaactgagtgcactggagtgccttgagggcatggcggccggcctctacagcgagctcttcacccttctcgtctccctggtgaatagggctctcaagtccagccagcactcactctgctccatgatgattgtcgacaccccgggcttccagaaccctgagcagggtgggtcagcccgcggagcctcctttgaggagctgtgccacaactacacccaagaccggctgcagaggctcttccacgagcgcaccttcgtgcaggagttggaaagatacaaggaggagaacatcgagctggcgtttgacgacttggaacccccgacggatgactctgtggctgctgtggaccaggcctcccatcagtccctggtccgctcgctggcccgcacagacgaggcgaggggcctgctctggctattggaagaggaggctctggtgccaggggccagtgaggacaccctcctggagcgccttttctcctattatggcccccaggaaggtgacaaaaaaggccaaagcccccttctgcacagcagcaaaccacaccactttctcctgggccacagccatggcaccaactgggtagagtacaatgtgactggctggctgaactacaccaagcagaacccagccacccagaatgccccccggctcctgcaggactcccagaaaaaaatcatcagcaacctgtttctgggccgcgcaggcagtgccacggtgctctctggctccatcgcgggcctggagggcggctcgcagctggcactgcgccgggccaccagcatgcggaaaacctttaccacaggcatggcggctgtcaaaaagaagtcactgtgcatccagatgaagctacaggtggacgccctcatcgacaccatcaagaagtcaaagctgcattttgtgcactgcttcctgcctgtagctgagggctgggctggggagccccgttccgcctcctcccgccgagtcagcagcagcagtgagctggacctgccctcgggagaccactgcgaggctgggctcctgcagctcgacgtgcccctgctccgcacccagctccgcggctcccgcctgctcgatgccatgcgcatgtaccgccaaggttaccctgaccacatggtgttttccgagttccgccgccgctttgatgtcctggccccgcacctgaccaagaaacacgggcgtaactacatcgtggtggatgaaaggcgggcagtggaggagctgctggagtgcttggatctggagaagagcagctgctgcatgggcctgagccgggtgttcttccgggcgggcaccttggcacggctggaggagcagcgggatgaacaaaccagcaggaacctaaccctgttccaagcagcctgcaggggctacctggcccgccagcacttcaagaagagaaagatccaggacctggccattcgctgtgtacagaagaacatcaagaagaacaaaggggtgaaggactggccctggtggaagctttttaccacagtgaggcccctcatcgaagtacagctgtcagaggagcagatccggaacaaagacgaggagatccagcagctgcggagcaagctcgagaaggcggagaaggagaggaacgagctgcggctcaacagtgaccggctggagagccggatctcagagctgacatcggagctgacagatgagcgtaacacaggagagtccgcctcccagctgctggacgcggagacagcagagaggctccgggctgagaaggagatgaaggaactgcagacccagtacgatgcactgaagaagcagatggaggttatggaaatggaggtgatggaggcccgtctcatccgggcagcggagatcaacggggaagtggatgatgatgatgcaggtggcgagtggcggctgaagtatgagcgggctgtgcgggaggtggacttcaccaagaaacggctccagcaggagtttgaggacaagctggaggtggagcagcagaacaagaggcagctggaacggcggctcggggacctgcaggcagatagtgaggagagtcagcgggctctgcagcagctcaagaagaagtgccagcgactgacggctgagctgcaagacaccaagctgcacctggagggccagcaggtccgcaaccacgaactggagaagaagcagaggaggtttgacagtgagctctcgcaggcgcatgaggaggcccagcgggagaagctgcagcgggagaagctgcagcgggagaaggacatgctcctcgctgaggctttcagcctgaagcagcaactagaggaaaaagacatggacattgcagggttcacccagaaggttgtgtctctagaggcagagctccaggacatttcttcccaagagtccaaggatgaggcttctctggccaaggtcaagaaacagctccgggacctggaggccaaagtcaaggatcaggaagaagagctggatgagcaggcagggaccatccagatgctggaacaggccaagctgcgtctggagatggagatggagcggatgagacagacccattctaaggagatggagagtcgggatgaggaggtggaggaggcccggcagtcgtgtcagaagaagttaaaacagatggaggtgcagctagaggaagagtatgaggacaagcagaaggttctgcgagagaagcgggagctggagggcaagctcgccaccctcagcgaccaggtgaaccggcgggactttgagtcagagaagcggctgcggaaggacctgaagcgcaccaaggccctgctggcagatgcccagctcatgctggaccacctgaagaacagtgctcccagcaagcgagagattgcccagctcaagaaccagctggaggagtcagagttcacctgtgcggcagccgtgaaagcacggaaagcaatggaggtggagatcgaagacctgcacctgcagattgatgacatcgccaaagccaagacagcgctggaggagcagctgagccgccttcagcgtgagaagaatgagatccagaaccggctggaggaagatcaggaagacatgaacgaattgatgaagaagcacaaggctgccgtggctcaggcttcccgggacctggctcagataaatgatctccaagctcagctagaagaagccaacaaagagaagcaggagctgcaggagaagctacaagccctccagagccaggtggagttcctggagcagtccatggtggacaagtccctggtgagcaggcaggaagctaagatacgggagctggagacacgcctggagtttgaaaggacgcaagtgaaacggctggagagcctggctagccgtctcaaggaaaacatggagaagctgactgaggagcgggatcagcgcattgcagccgagaaccgggagaaggaacagaacaagcggctacagaggcagctccgggacaccaaggaggagatgggcgagcttgccaggaaggaggccgaggcgagccgcaagaagcacgaactggagatggatctagaaagcctggaggctgctaaccagagcctgcaggctgacctaaagttggcattcaagcgcatcggggacctgcaggctgccattgaggatgagatggagagtgatgagaatgaggacctcatcaacagtgagggagactctgatgtggactcggagctggaggaccgtgttgacggggtcaagtcctggttgtcaaaaaacaagggaccttccaaggcagcttctgatgatggcagcttaaagagttccagccccaccagctactggaagtcccttgcccctgatcggtcagatgatgagcacgaccctctcgacaacacctccagaccgcgatactcccacagttatctgagtgacagcgacacagaggccaagctgacggagactaacgcatagcccaggggagtggttggcagccctctcaccccagggcctgtggctgcctgggcacctctcccaggaagtggtggggcaccggtctcccccacccgactgctgatctgcatgggaaacaccctgaccttcttctgtcaggggcactttccaggctatgggtgtctgatgtctccacgtggaagaggtgggggaaagaggagtttctgaagagaactttttgctcctctgtctcaaaatgccagactcttggcttctaccctgtgtcaccgtgggcagtggcaggtggcctggcactgcatggagccagcacgttgacctccctctcagctccctgctcagggacggtggacaggttgcctactgggacactctaggttgctgggtccatggggaggattgggggaggagaagcagtgccttccctctcgtgtggggtgggggctctctcttcttggtgcctgctgtctttctactttttaatttaaatacccaacctctccatcacagctgcatccctgagagtgggagggggctgtagtggtagctggggctcccaagaacgactcgggaatgtcatctccatcttcacccttcagagagcagtcctttctctgtgcagctggagacgctggtgaggagagccgggtccaggttcttaagaatgaggtgcggaggggctctccggtgctgctgggctgggttgagcaagcctacgcagacaagtgtgtgtgtggaccatccgcacctccagcccccaccccaccctctttgtctcagcgtgttatgtgcaatgacctatttaaggtaaacccattccaactacagcagttcagggctgatccaagcactgcctccctcctgctctgtccaggtggtctggaccataaactcaacttgagagggaaggcttggggttgaggacttgtgatcagaaaaactgaagatggaagttttggccggtgctcattagacatgagtcctcactctgtgtcctgagcccgtgtcattcttccaacctccctgcccccacacacttatcccagacacaacaccatgtggtctggaggtcccagcccccaccctaaaaaggttatccctgagaactccaccagacttgggagcccaagtgcagtgcctggtgctgctcccatctgccgccccccttctctcctgcaattggtttgtactcactgggctgtgctctcccctgtttacccgatgtatggaaataaaggcccttttcctcctggc

SEQ ID NO: 156941 - DNA, 8565 bp, Homo sapiens
  Payload ID: 10755
  Gene Symbol: MYO18B
  Gene Name: myosin XVIIIB
  ENST ID: ENST00000335473
  CDS Start-End: 251-7954
gggaagggatgtgtgtcggtgtgtgtggagagggtgctccttcgctcctgctttcccggctcggtggggtcccttcgcggccacccggggagacgtcttagacagtcgtggttcctgtgatctgtgtcctctttgcagaagttctgtgtccatctcatgtgctgcgtgtgtctgtaaagcctcattccgtgctgtctggcaggaagctccatctcatctcatcatctcacggccctggcactgcctcagcatggccatctcatcacgcctcgccctgtgggagcagaagattcgggaagaggacaagagccctccaccatcctcgccccctcctcttttctctgtcatcccagggggcttcattaagcaactggtccgggggactgaaaaagaggccaaggaagcgagacagaggaagcagttagctgtcgcctctccagaacgagagatcccagaaatttccatcagccaacccaacagcaagtccagcagtggcaccagatctggaagccagcagatctctcaggacgaccagtcaagctctcctgggagctcagacattctgggcaaggagagcgaggggtcccgcagccccgaccctgagcagatgacaagcatcaatggtgagaaggcccaggagctgggctccagtgcgacaccaaccaaaaagactgtccccttcaagaggggcgtgaggaggggtgatgtgttgttgatggtggccaagctggacccggactcagccaagccagagaagactcatccccatgacgcccccccttgcaagacctctccccccgccacagatactggaaaggaaaagaaaggggagacctctaggactccttgtggctcccaggccagcaccgagatcttggccccgaaagctgagaagacccggactgggggtcttggggacccaggccaaggaactgtggcactgaaaaaaggcgaggagggtcaaagcatagtggggaaggggcttgggacccccaagaccacagagctgaaagaggctgagccccagggcaaagacaggcaggggaccaggccccaagcccaagggcccggcgagggggtgcgaccagggaaagcagagaaggagggagcagagcccacaaacacggtggaaaaggggaatgtctctaaggacgtagggagtgaagggaagcacgtaaggccccaaatccctgggagaaagtggggaggtttcctgggaagaaggagtaagtgggacggtccccagaataagaaggacaaagaaggggtgctcttaagtaaggcagagaagacaggtgagcctcagacccagatggagaagacaagccaagtgcagggcgagttgggggacgatctgagaatgggggagaaagcaggtgagcttcggagcacgactgggaaggcaggtgagtcctgggataagaaggaaaagatggggcaaccccagggtaagtccgggaacgcaggtgaagctcggagtcagacagagaagggctgtgaagccccaaaggaggtgagcacaatggtggagtcgccagcagctcctgggaagggaggctggccaggaagccgtgggcaggaagcagaggagccctgctcaagagcaggtgatggggctggtgccctggagacagagctggaaggacccagccagcctgctctggagaaggatgcagaaaggcctcggatacggaaggagaaccaagacgggccagccccgcaggaggagggcaaaggaggccagagcagagactcagaccaggctcctgaggacagatggtatgaggcagagaaagtctggctggctcagaaggatggatttactcttgctacggtgctaaagccagatgagggaacagcagacctgccagcaggaagggtgagactttggattgatgctgacaaaaccatcactgaggtggatgaggagcatgtccatcgggccaaccctcctgagctggaccaggtcgaggacctggcctctctcatcagtgtcaacgaatccagtgtcctgaacacgcttctgcagcgctacaaagctcagctgctgcacacctgcacagggcctgatctgattgtcctccagccccgggggccctcggtgccttctgcagggaaggtgcccaagggccgccgggatggcctgcctgcccacattggctccatggcacagcgggcatactgggcgctgctgaaccagcggagagaccagagcattgtggccctgggctggagtggcgctgggaagaccacctgctgtgagcaggtcctggaacacctggtggggatggcaggcagtgtggatggcagggtctcagtggagaagatccgagccaccttcactgtcctccgggccttcggctctgtgtccatggcccacagccgcagtgccacccggttctccatggtgatgtcgctggacttcaacgctacaggccgcatcacagctgctcagctccagacaatgcttttggagaagagccgcgtggcacggcagccggaaggggaaagtaacttcctggttttctcccagatgctggctggattggacttggatctcaggacggagctgaacctgcaccagatggcagatagcagctcctttggcatgggcgtgtggtccaagcctgaagataaacagaaggcggcagctgcctttgcccagctccagggtgccatggagatgctcggcatctcagagagcgagcagcgggctgtttggcgggtcctggcagccatctaccacctgggtgcggcgggggcctgcaaagtgggtcggaagcagttcatgaggtttgagtgggcaaactacgcagctgaggccctgggctgcgagtatgaggagctgaacacggccaccttcaagcaccaccttcgacagatcatccagcaaatgacgtttgggccaagccgatggggcctcgaggatgaggaaaccagctcagggctcaagatgacaggagtggactgtgtggaggggatggcctcgggcctgtaccaggaactctttgcggctgtggtctcactcatcaacagatccttttcctcccaccatctctccatggcctccatcatggtggtggactctccaggcttccagaacccccggcaccagggcaaggaccgggcggccacctttgaggagctgtgccacaactacgcccatgagcgcctgcagctgctgttctaccagcggacctttgtctccacgctacagcgatatcaagaggaaggtgttcctgtgcagtttgacctcccggacccctccccagggaccaccgtggctgttgtggatcaaaatccctctcaggtccgcttaccagctggaggaggtgcccaggatgccagaggccttttctgggtcttagatgaggaagtccatgtagagggctccagtgacagtgtggtgctcgagcgtctgtgtgctgctttcgagaagaaaggagctgggactgaagggtcctctgccctgcggacctgtgagcagcccctccagtgtgagattttccaccagttgggatgggaccctgtgcggtacgacctcacgggctggctccacagagccaagcccaacctctcggccctggatgcaccccaggtcctgcaccagtcaaaaagagaggagctgcggagtctattccaggcccgggccaagctgcctcctgtgtgccgggctgtggcaggcctggagggcacctcccagcaggccctgcagaggagccgcatggtgaggaggacctttgccagcagccttgccgcggtgaggaggaaagccccgtgctcccagatcaagctgcagatggatgcgctgaccagcatgatcaaaaggtcccggctgcactttatccactgcctggtaccaaaccctgtggtggaaagcaggagtgggcaggaatctccaccaccaccgcagcctggtagagacaagcctggggcaggtggacctctggccctggatatcccagcactgagggtccagcttgctgggttccacatcctggaggctctgcgtctgcataggacaggctatgctgaccacatggggctcactcgcttccgccggcaattccaggtgctggacgctccactcctgaagaagctcatgtcgacctccgagggaatagatgaaaggaaggccgtggaggagctcctggagaccctggatctggaaaagaaggcggtggctgtggggcacagccaagtttttctcaaggcaggtgtgatctccaggcttgagaagcagcgagagaagctggtatctcagagcatcgttctcttccaggcggcttgcaagggctttctgtctcgccaggaattcaagaagctgaagattcgccgactggctgcacagtgcatccagaagaatgtggctgtgttcctcgcagtcaaggactggccatggtggcagctgcttggttccctccagcctctacttagtgccaccattggaactgagcagctccgagccaaggaggaggagcttacaacgctaagacggaagctagaaaaatcagagaagttgcggaatgaactccggcagaacacagatctgctagaaagcaagattgctgacttgacctctgaccttgccgatgagcgcttcaaaggtgatgtggcctgccaggtgctggagagtgagcgggcagagcggctacaggccttccgggaggtccaggagctcaagagcaagcatgaacaagtccagaaaaaactgggagatgtgaataaacagttggaagaagcccagcagaaaattcagttgaatgacttggaaaggaatcccactggaggagcagacgagtggcagatgcgcttcgactgtgctcagatggagaacgagttcctcagaaagcgtctgcagcaatgcgaggagaggctggactcggagctgacagccaggaaagagctggagcaaaagcttggggagttgcaaagtgcttatgacggggccaagaagatggctcaccaactgaagaggaagtgccaccatcttacctgtgaccttgaggatacctgcgtcctgctagagaaccaacaaagtcgaaaccatgagctggagaagaagcagaagaagtttgacctgcagctggcccaggccctaggtgagtcagtgtttgagaagggtctccgtgagaaagtgacccaggagaacaccagtgtccggtgggagctaggccagcttcagcagcagctgaagcaaaaggagcaggaagcctcacagctgaagcagcaggtggagatgctacaggaccataaacgggagctgctggggtcaccctctctgggggaaaattgcgttgctggcttgaaggagaggctctggaagttggaatccagcgcccttgagcaacagaaaatccagagccagcaggaaaacaccatcaagcagctggagcagctccgccagcggtttgagctggagatcgagcggatgaagcagatgcaccagaaggaccgtgaggaccaggaggaggaactggaggatgtccgtcagtcctgccagaagcggcttcatcagctggaaatgcagctggagcaagagtatgaagagaagcagatggtcctccatgagaagcaagatttggaaggcttgatcggaaccctctgtgaccagattggccatcgggactttgatgtggagaagcgacttcggagagacctcaggaggacacatgcactgttgtcagacgtgcagctccttctgggcaccatggaggatggcaagacatcagtcagcaaggaggagctggagaaagtgcacagccagctggagcagagtgaagccaagtgtgaggaggccttgaagacgcagaaggtgctcacagcggacctggagagcatgcacagcgagctggagaacatgacgcggaacaagagcctggtggatgagcagctgtacaggctgcagtttgagaaggcggacctcctgaagcgcatcgatgaggaccaggatgacctgaatgagctgatgcagaagcacaaggacctcattgctcagtctgctgctgacattgggcagatccaagaactgcagctgcagctggaggaagccaagaaggagaagcacaagctacaagaacaactgcaggtggctcagatgcgcatcgagtacctggaacagtccaccgtggatcgagccatcgtcagcaggcaggaggcggtcatctgtgacctagagaacaagacagagttccagaaggtgcagattaagagatttgaggtcctggtgatccggcttcgggacagcctgatcaagatgggggaggagctttcacaggcggccacctccgagtcccagcagcgggagagcagccagtactaccagcggcgcctggaagagctgaaggccgacatggaagagctggtgcagcgggaggcagaggccagccggcggtgcatggagctggagaagtacgtggaggaacttgcagcagtgaggcaaaccctccagacagacctggagacatccattcggcggattgccgacctgcaggctgccttggaagaagtggcatccagtgacagtgatactgagagtgtccagacggcagtggattgtggcagcagcggccgaaaagagatggataacgtctccatcctcagctcccagccagagggcagcctgcagtcctggttgagctgtactctgtccctggccacagatactatgaggactccttctcgacagtcagccaccagcagccgcatcctcagccccaggataaacgaagaggctggggacactgagaggacccagtcggcattggcactgagcagagcccggtccaccaatgtccacagcaagacctcaggagacaagcctgtttctccccactttgtccgccggcaaaagtactgtcattttggggacggcgaagtgcttgccgtccagagaaagtccacagagagattagaacctgcttcctctcccctggcttctcggagtacaaatacatccccgctgtcgagggaaaagctgcccagtccttcagcggccctctcggagttcgtggaagggctccggaggaagagagcccagagaggccaggggtccacgctgggcctagaggactggcccactctccccatttaccagacgactggggcctccacactaaggaggggcagggctggcagtgacgagggaaacctctcgctgagggttggggcaaagtcacccctggaaatcgaaggggccgctggtggtctcttgaggtccaccagcctcaaatgcatctcttcagacggtgttgggggcacaaccctactccccgaaaagtcgaaaacccaattcagttcctgcgagtccctcttagaatccagaccgagcatggggagaaaactgagctctccgaccacacccagggacatgctgttgtcgcccacactgcgtcctcggaggcggtgtctggagtcctctgtggacgatgcgggctgtccagaccttggaaaggagccgcttgttttccagaaccgccagtttgcccacctgatggaggaacctctaggcagtgacccattcagctggaaactcccaagcctcgactacgaacgcaagaccaaagtggacttcgatgacttcctcccagctatccggaagccccagacacctacctccttggctggatcagccaaaggtgggcaagacggttcacagcgttcaagcatccactttgaaacggaagaggctaaccgttcctttctctcggggatcaagaccattttgaagaagagcccggagcccaaggaggatcccgctcacctgtctgactcgtcctcatcctccggctccatcgtgtccttcaaaagtgctgacagcatcaaaagtcgaccaggaatcccacgacttgcgggtgacggtggcgagcgaacgtcccccgagcggagagagccagggacggggaggaaagacgacgatgttgcgagcataatgaagaaatacctccagaagtaggaaccagttcagcctccttgaagctgcccttgaagacttcccgactctacaataacttggagacagagagactggccaggcctccccggtggccagagccagccagcatggccaccctcaagaggcgagatgagcccacagaggcatatcctgcggggatgctgggctcccagtgtggttggcctgaacaaaataaagtgttgactcctgggcatctgtgccttctctatggccttgctacctgggattccagagagttgatggggtgcagataggggtaggactgttagaatagaaccaacccaaactgtgtgtagtttggggtgtatacttctatttctcttcctacatgtctacatgccatgaccttcctcctcctcttcacttggccagtttcagctcacttcctccaggaagtctttcctgatatatcaaactgaaacaaatgctcctcctccatgctcccttaatccccatgcttgtcgattatattcctttgccaattcatttctctatcctgtgtatgtataagtgtgtacaagcattcaagaaactgatgaatgatgaatgaatgaatgagccaaagaacaaataaatgagcccacacaccc

SEQ ID NO: 156942 - DNA, 8090 bp, Homo sapiens
  Payload ID: 10755
  Gene Symbol: MYO18B
  Gene Name: myosin XVIIIB
  ENST ID: ENST00000407587
  CDS Start-End: 170-7876
cacccggggagacgtcttagacagtcgtggttcctgtgatctgtgtcctctttgcagaagttctgtgtccatctcatgtgctgcgtgtgtctgtaaagcctcattccgtgctgtctggcaggaagctccatctcatctcatcatctcacggccctggcactgcctcagcatggccatctcatcacgcctcgccctgtgggagcagaagattcgggaagaggacaagagccctccaccatcctcgccccctcctcttttctctgtcatcccagggggcttcattaagcaactggtccgggggactgaaaaagaggccaaggaagcgagacagaggaagcagttagctgtcgcctctccagaacgagagatcccagaaatttccatcagccaacccaacagcaagtccagcagtggcaccagatctggaagccagcagatctctcaggacgaccagtcaagctctcctgggagctcagacattctgggcaaggagagcgaggggtcccgcagccccgaccctgagcagatgacaagcatcaatggtgagaaggcccaggagctgggctccagtgcgacaccaaccaaaaagactgtccccttcaagaggggcgtgaggaggggtgatgtgttgttgatggtggccaagctggacccggactcagccaagccagagaagactcatccccatgacgcccccccttgcaagacctctccccccgccacagatactggaaaggaaaagaaaggggagacctctaggactccttgtggctcccaggccagcaccgagatcttggccccgaaagctgagaagacccggactgggggtcttggggacccaggccaaggaactgtggcactgaaaaaaggcgaggagggtcaaagcatagtggggaaggggcttgggacccccaagaccacagagctgaaagaggctgagccccagggcaaagacaggcaggggaccaggccccaagcccaagggcccggcgagggggtgcgaccagggaaagcagagaaggagggagcagagcccacaaacacggtggaaaaggggaatgtctctaaggacgtagggagtgaagggaagcacgtaaggccccaaatccctgggagaaagtggggaggtttcctgggaagaaggagtaagtgggacggtccccagaataagaaggacaaagaaggggtgctcttaagtaaggcagagaagacaggtgagcctcagacccagatggagaagacaagccaagtgcagggcgagttgggggacgatctgagaatgggggagaaagcaggtgagcttcggagcacgactgggaaggcaggtgagtcctgggataagaaggaaaagatggggcaaccccagggtaagtccgggaacgcaggtgaagctcggagtcagacagagaagggctgtgaagccccaaaggaggtgagcacaatggtggagtcgccagcagctcctgggaagggaggctggccaggaagccgtgggcaggaagcagaggagccctgctcaagagcaggtgatggggctggtgccctggagacagagctggaaggacccagccagcctgctctggagaaggatgcagaaaggcctcggatacggaaggagaaccaagacgggccagccccgcaggaggagggcaaaggaggccagagcagagactcagaccaggctcctgaggacagatggtatgaggcagagaaagtctggctggctcagaaggatggatttactcttgctacggtgctaaagccagatgagggaacagcagacctgccagcaggaagggtgagactttggattgatgctgacaaaaccatcactgaggtggatgaggagcatgtccatcgggccaaccctcctgagctggaccaggtcgaggacctggcctctctcatcagtgtcaacgaatccagtgtcctgaacacgcttctgcagcgctacaaagctcagctgctgcacacctgcacagggcctgatctgattgtcctccagccccgggggccctcggtgccttctgcagggaaggtgcccaagggccgccgggatggcctgcctgcccacattggctccatggcacagcgggcatactgggcgctgctgaaccagcggagagaccagagcattgtggccctgggctggagtggcgctgggaagaccacctgctgtgagcaggtcctggaacacctggtggggatggcaggcagtgtggatggcagggtctcagtggagaagatccgagccaccttcactgtcctccgggccttcggctctgtgtccatggcccacagccgcagtgccacccggttctccatggtgatgtcgctggacttcaacgctacaggccgcatcacagctgctcagctccagacaatgcttttggagaagagccgcgtggcacggcagccggaaggggaaagtaacttcctggttttctcccagatgctggctggattggacttggatctcaggacggagctgaacctgcaccagatggcagatagcagctcctttggcatgggcgtgtggtccaagcctgaagataaacagaaggcggcagctgcctttgcccagctccagggtgccatggagatgctcggcatctcagagagcgagcagcgggctgtttggcgggtcctggcagccatctaccacctgggtgcggcgggggcctgcaaagtgggtcggaagcagttcatgaggtttgagtgggcaaactacgcagctgaggccctgggctgcgagtatgaggagctgaacacggccaccttcaagcaccaccttcgacagatcatccagcaaatgacgtttgggccaagccgatggggcctcgaggatgaggaaaccagctcagggctcaagatgacaggagtggactgtgtggaggggatggcctcgggcctgtaccaggaactctttgcggctgtggtctcactcatcaacagatccttttcctcccaccatctctccatggcctccatcatggtggtggactctccaggcttccagaacccccggcaccagggcaaggaccgggcggccacctttgaggagctgtgccacaactacgcccatgagcgcctgcagctgctgttctaccagcggacctttgtctccacgctacagcgatatcaagaggaaggtgttcctgtgcagtttgacctcccggacccctccccagggaccaccgtggctgttgtggatcaaaatccctctcagcaggtccgcttaccagctggaggaggtgcccaggatgccagaggccttttctgggtcttagatgaggaagtccatgtagagggctccagtgacagtgtggtgctcgagcgtctgtgtgctgctttcgagaagaaaggagctgggactgaagggtcctctgccctgcggacctgtgagcagcccctccagtgtgagattttccaccagttgggatgggaccctgtgcggtacgacctcacgggctggctccacagagccaagcccaacctctcggccctggatgcaccccaggtcctgcaccagtcaaaaagagaggagctgcggagtctattccaggcccgggccaagctgcctcctgtgtgccgggctgtggcaggcctggagggcacctcccagcaggccctgcagaggagccgcatggtgaggaggacctttgccagcagccttgccgcggtgaggaggaaagccccgtgctcccagatcaagctgcagatggatgcgctgaccagcatgatcaaaaggtcccggctgcactttatccactgcctggtaccaaaccctgtggtggaaagcaggagtgggcaggaatctccaccaccaccgcagcctggtagagacaagcctggggcaggtggacctctggccctggatatcccagcactgagggtccagcttgctgggttccacatcctggaggctctgcgtctgcataggacaggctatgctgaccacatggggctcactcgcttccgccggcaattccaggtgctggacgctccactcctgaagaagctcatgtcgacctccgagggaatagatgaaaggaaggccgtggaggagctcctggagaccctggatctggaaaagaaggcggtggctgtggggcacagccaagtttttctcaaggcaggtgtgatctccaggcttgagaagcagcgagagaagctggtatctcagagcatcgttctcttccaggcggcttgcaagggctttctgtctcgccaggaattcaagaagctgaagattcgccgactggctgcacagtgcatccagaagaatgtggctgtgttcctcgcagtcaaggactggccatggtggcagctgcttggttccctccagcctctacttagtgccaccattggaactgagcagctccgagccaaggaggaggagcttacaacgctaagacggaagctagaaaaatcagagaagttgcggaatgaactccggcagaacacagatctgctagaaagcaagattgctgacttgacctctgaccttgccgatgagcgcttcaaaggtgatgtggcctgccaggtgctggagagtgagcgggcagagcggctacaggccttccgggaggtccaggagctcaagagcaagcatgaacaagtccagaaaaaactgggagatgtgaataaacagttggaagaagcccagcagaaaattcagttgaatgacttggaaaggaatcccactggaggagcagacgagtggcagatgcgcttcgactgtgctcagatggagaacgagttcctcagaaagcgtctgcagcaatgcgaggagaggctggactcggagctgacagccaggaaagagctggagcaaaagcttggggagttgcaaagtgcttatgacggggccaagaagatggctcaccaactgaagaggaagtgccaccatcttacctgtgaccttgaggatacctgcgtcctgctagagaaccaacaaagtcgaaaccatgagctggagaagaagcagaagaagtttgacctgcagctggcccaggccctaggtgagtcagtgtttgagaagggtctccgtgagaaagtgacccaggagaacaccagtgtccggtgggagctaggccagcttcagcagcagctgaagcaaaaggagcaggaagcctcacagctgaagcagcaggtggagatgctacaggaccataaacgggagctgctggggtcaccctctctgggggaaaattgcgttgctggcttgaaggagaggctctggaagttggaatccagcgcccttgagcaacagaaaatccagagccagcaggaaaacaccatcaagcagctggagcagctccgccagcggtttgagctggagatcgagcggatgaagcagatgcaccagaaggaccgtgaggaccaggaggaggaactggaggatgtccgtcagtcctgccagaagcggcttcatcagctggaaatgcagctggagcaagagtatgaagagaagcagatggtcctccatgagaagcaagatttggaaggcttgatcggaaccctctgtgaccagattggccatcgggactttgatgtggagaagcgacttcggagagacctcaggaggacacatgcactgttgtcagacgtgcagctccttctgggcaccatggaggatggcaagacatcagtcagcaaggaggagctggagaaagtgcacagccagctggagcagagtgaagccaagtgtgaggaggccttgaagacgcagaaggtgctcacagcggacctggagagcatgcacagcgagctggagaacatgacgcggaacaagagcctggtggatgagcagctgtacaggctgcagtttgagaaggcggacctcctgaagcgcatcgatgaggaccaggatgacctgaatgagctgatgcagaagcacaaggacctcattgctcagtctgctgctgacattgggcagatccaagaactgcagctgcagctggaggaagccaagaaggagaagcacaagctacaagaacaactgcaggtggctcagatgcgcatcgagtacctggaacagtccaccgtggatcgagccatcgtcagcaggcaggaggcggtcatctgtgacctagagaacaagacagagttccagaaggtgcagattaagagatttgaggtcctggtgatccggcttcgggacagcctgatcaagatgggggaggagctttcacaggcggccacctccgagtcccagcagcgggagagcagccagtactaccagcggcgcctggaagagctgaaggccgacatggaagagctggtgcagcgggaggcagaggccagccggcggtgcatggagctggagaagtacgtggaggaacttgcagcagtgaggcaaaccctccagacagacctggagacatccattcggcggattgccgacctgcaggctgccttggaagaagtggcatccagtgacagtgatactgagagtgtccagacggcagtggattgtggcagcagcggccgaaaagagatggataacgtctccatcctcagctcccagccagagggcagcctgcagtcctggttgagctgtactctgtccctggccacagatactatgaggactccttctcgacagtcagccaccagcagccgcatcctcagccccaggataaacgaagaggctggggacactgagaggacccagtcggcattggcactgagcagagcccggtccaccaatgtccacagcaagacctcaggagacaagcctgtttctccccactttgtccgccggcaaaagtactgtcattttggggacggcgaagtgcttgccgtccagagaaagtccacagagagattagaacctgcttcctctcccctggcttctcggagtacaaatacatccccgctgtcgagggaaaagctgcccagtccttcagcggccctctcggagttcgtggaagggctccggaggaagagagcccagagaggccaggggtccacgctgggcctagaggactggcccactctccccatttaccagacgactggggcctccacactaaggaggggcagggctggcagtgacgagggaaacctctcgctgagggttggggcaaagtcacccctggaaatcgaaggggccgctggtggtctcttgaggtccaccagcctcaaatgcatctcttcagacggtgttgggggcacaaccctactccccgaaaagtcgaaaacccaattcagttcctgcgagtccctcttagaatccagaccgagcatggggagaaaactgagctctccgaccacacccagggacatgctgttgtcgcccacactgcgtcctcggaggcggtgtctggagtcctctgtggacgatgcgggctgtccagaccttggaaaggagccgcttgttttccagaaccgccagtttgcccacctgatggaggaacctctaggcagtgacccattcagctggaaactcccaagcctcgactacgaacgcaagaccaaagtggacttcgatgacttcctcccagctatccggaagccccagacacctacctccttggctggatcagccaaaggtgggcaagacggttcacagcgttcaagcatccactttgaaacggaagaggctaaccgttcctttctctcggggatcaagaccattttgaagaagagcccggagcccaaggaggatcccgctcacctgtctgactcgtcctcatcctccggctccatcgtgtccttcaaaagtgctgacagcatcaaaagtcgaccaggaatcccacgacttgcgggtgacggtggcgagcgaacgtcccccgagcggagagagccagggacggggaggaaagacgacgatgttgcgagcataatgaagaaatacctccagaagtaggaaccagttcagcctccttgaagctgcccttgaagacttcccgactctacaataacttggagacagagagactggccaggcctccccggtggccagagccagccagcatggccaccctcaagaggcgagatgagcccacagaggcatatcctgcggggatgctgggctcccagtgtggttggcctgaacaaaataaagtgttgactcctgggca

SEQ ID NO: 156943 - DNA, 7774 bp, Homo sapiens
  Payload ID: 10755
  Gene Symbol: MYO18B
  Gene Name: myosin XVIIIB
  ENST ID: ENST00000539302
  CDS Start-End: 60-2456
ctgtctggcaggaagctccatctcatctcatcatctcacggccctggcactgcctcagcatggccatctcatcacgcctcgccctgtgggagcagaagattcgggaagaggacaagagccctccaccatcctcgccccctcctcttttctctgtcatcccagggggcttcattaagcaactggtccgggggactgaaaaagaggccaaggaagcgagacagaggaagcagttagctgtcgcctctccagaacgagagatcccagaaatttccatcagccaacccaacagcaagtccagcagtggcaccagatctggaagccagcagatctctcaggacgaccagtcaagctctcctgggagctcagacattctgggcaaggagagcgaggggtcccgcagccccgaccctgagcagatgacaagcatcaatggtgagaaggcccaggagctgggctccagtgcgacaccaaccaaaaagactgtccccttcaagaggggcgtgaggaggggtgatgtgttgttgatggtggccaagctggacccggactcagccaagccagagaagactcatccccatgacgcccccccttgcaagacctctccccccgccacagatactggaaaggaaaagaaaggggagacctctaggactccttgtggctcccaggccagcaccgagatcttggccccgaaagctgagaagacccggactgggggtcttggggacccaggccaaggaactgtggcactgaaaaaaggcgaggagggtcaaagcatagtggggaaggggcttgggacccccaagaccacagagctgaaagaggctgagccccagggcaaagacaggcaggggaccaggccccaagcccaagggcccggcgagggggtgcgaccagggaaagcagagaaggagggagcagagcccacaaacacggtggaaaaggggaatgtctctaaggacgtagggagtgaagggaagcacgtaaggccccaaatccctgggagaaagtggggaggtttcctgggaagaaggagtaagtgggacggtccccagaataagaaggacaaagaaggggtgctcttaagtaaggcagagaagacaggtgagcctcagacccagatggagaagacaagccaagtgcagggcgagttgggggacgatctgagaatgggggagaaagcaggtgagcttcggagcacgactgggaaggcaggtgagtcctgggataagaaggaaaagatggggcaaccccagggtaagtccgggaacgcaggtgaagctcggagtcagacagagaagggctgtgaagccccaaaggaggtgagcacaatggtggagtcgccagcagctcctgggaagggaggctggccaggaagccgtgggcaggaagcagaggagccctgctcaagagcaggtgatggggctggtgccctggagacagagctggaaggacccagccagcctgctctggagaaggatgcagaaaggcctcggatacggaaggagaaccaagacgggccagccccgcaggaggagggcaaaggaggccagagcagagactcagaccaggctcctgaggacagatggtatgaggcagagaaagtctggctggctcagaaggatggatttactcttgctacggtgctaaagccagatgagggaacagcagacctgccagcaggaagggtgagactttggattgatgctgacaaaaccatcactgaggtggatgaggagcatgtccatcgggccaaccctcctgagctggaccaggtcgaggacctggcctctctcatcagtgtcaacgaatccagtgtcctgaacacgcttctgcagcgctacaaagctcagctgctgcacacctgcacagggcctgatctgattgtcctccagccccgggggccctcggtgccttctgcagggaaggtgcccaagggccgccgggatggcctgcctgcccacattggctccatggcacagcgggcatactgggcgctgctgaaccagcggagagaccagagcattgtggccctgggctggagtggcgctgggaagaccacctgctgtgagcaggtcctggaacacctggtggggatggcaggcagtgtggatggcagggtctcagtggagaagatccgagccaccttcactgtcctccgggccttcggctctgtgtccatggcccacagccgcagtgccacccggttctccatggtgatgtcgctggacttcaacgctacaggccgcatcacagctgctcagctccagacaatgcttttggagaagagccgcgtggcacggcagccggaaggggaaagtaacttcctggttttctcccagatgctggctggattggacttggatctcaggacggagctgaacctgcaccagatggcagatagcagctcctttggcatgggcgtgtggtccaagtgggtcggaagcagttcatgaggtttgagtgggcaaactacgcagctgaggccctgggctgcgagtatgaggagctgaacacggccaccttcaagcaccaccttcgacagatcatccagcaaatgacgtttgggccaagccgatggggcctcgaggatgaggaaaccagctcagggctcaagatgacaggagtggactgtgtggaggggatggcctcgggcctgtaccaggaactctttgcggctgtggtctcactcatcaacagatccttttcctcccaccatctctccatggcctccatcatggtggtggactctccaggcttccagaacccccggcaccagggcaaggaccgggcggccacctttgaggagctgtgccacaactacgcccatgagcgcctgcagctgctgttctaccagcggacctttgtctccacgctacagcgatatcaagaggaaggtgttcctgtgcagtttgacctcccggacccctccccagggaccaccgtggctgttgtggatcaaaatccctctcaggtccgcttaccagctggaggaggtgcccaggatgccagaggccttttctgggtcttagatgaggaagtccatgtagagggctccagtgacagtgtggtgctcgagcgtctgtgtgctgctttcgagaagaaaggagctgggactgaagggtcctctgccctgcggacctgtgagcagcccctccagtgtgagattttccaccagttgggatgggaccctgtgcggtacgacctcacgggctggctccacagagccaagcccaacctctcggccctggatgcaccccaggtcctgcaccagtcaaaaagagaggagctgcggagtctattccaggcccgggccaagctgcctcctgtgtgccgggctgtggcaggcctggagggcacctcccagcaggccctgcagaggagccgcatggtgaggaggacctttgccagcagccttgccgcggtgaggaggaaagccccgtgctcccagatcaagctgcagatggatgcgctgaccagcatgatcaaaaggtcccggctgcactttatccactgcctggtaccaaaccctgtggtggaaagcaggagtgggcaggaatctccaccaccaccgcagcctggtagagacaagcctggggcaggtggacctctggccctggatatcccagcactgagggtccagcttgctgggttccacatcctggaggctctgcgtctgcataggacaggctatgctgaccacatggggctcactcgcttccgccggcaattccaggtgctggacgctccactcctgaagaagctcatgtcgacctccgagggaatagatgaaaggaaggccgtggaggagctcctggagaccctggatctggaaaagaaggcggtggctgtggggcacagccaagtttttctcaaggcaggtgtgatctccaggcttgagaagcagcgagagaagctggtatctcagagcatcgttctcttccaggcggcttgcaagggctttctgtctcgccaggaattcaagaagctgaagattcgccgactggctgcacagtgcatccagaagaatgtggctgtgttcctcgcagtcaaggactggccatggtggcagctgcttggttccctccagcctctacttagtgccaccattggaactgagcagctccgagccaaggaggaggagcttacaacgctaagacggaagctagaaaaatcagagaagttgcggaatgaactccggcagaacacagatctgctagaaagcaagattgctgacttgacctctgaccttgccgatgagcgcttcaaaggtgatgtggcctgccaggtgctggagagtgagcgggcagagcggctacaggccttccgggaggtccaggagctcaagagcaagcatgaacaagtccagaaaaaactgggagatgtgaataaacagttggaagaagcccagcagaaaattcagttgaatgacttggaaaggaatcccactggaggagcagacgagtggcagatgcgcttcgactgtgctcagatggagaacgagttcctcagaaagcgtctgcagcaatgcgaggagaggctggactcggagctgacagccaggaaagagctggagcaaaagcttggggagttgcaaagtgcttatgacggggccaagaagatggctcaccaactgaagaggaagtgccaccatcttacctgtgaccttgaggatacctgcgtcctgctagagaaccaacaaagtcgaaaccatgagctggagaagaagcagaagaagtttgacctgcagctggcccaggccctaggtgagtcagtgtttgagaagggtctccgtgagaaagtgacccaggagaacaccagtgtccggtgggagctaggccagcttcagcagcagctgaagcaaaaggagcaggaagcctcacagctgaagcagcaggtggagatgctacaggaccataaacgggagctgctggggtcaccctctctgggggaaaattgcgttgctggcttgaaggagaggctctggaagttggaatccagcgcccttgagcaacagaaaatccagagccagcaggaaaacaccatcaagcagctggagcagctccgccagcggtttgagctggagatcgagcggatgaagcagatgcaccagaaggaccgtgaggaccaggaggaggaactggaggatgtccgtcagtcctgccagaagcggcttcatcagctggaaatgcagctggagcaagagtatgaagagaagcagatggtcctccatgagaagcaagatttggaaggcttgatcggaaccctctgtgaccagattggccatcgggactttgatgtggagaagcgacttcggagagacctcaggaggacacatgcactgttgtcagacgtgcagctccttctgggcaccatggaggatggcaagacatcagtcagcaaggaggagctggagaaagtgcacagccagctggagcagagtgaagccaagtgtgaggaggccttgaagacgcagaaggtgctcacagcggacctggagagcatgcacagcgagctggagaacatgacgcggaacaagagcctggtggatgagcagctgtacaggctgcagtttgagaaggcggacctcctgaagcgcatcgatgaggaccaggatgacctgaatgagctgatgcagaagcacaaggacctcattgctcagtctgctgctgacattgggcagatccaagaactgcagctgcagctggaggaagccaagaaggagaagcacaagctacaagaacaactgcaggtggctcagatgcgcatcgagtacctggaacagtccaccgtggatcgagccatcgtcagcaggcaggaggcggtcatctgtgacctagagaacaagacagagttccagaaggtgcagattaagagatttgaggtcctggtgatccggcttcgggacagcctgatcaagatgggggaggagctttcacaggcggccacctccgagtcccagcagcgggagagcagccagtactaccagcggcgcctggaagagctgaaggccgacatggaagagctggtgcagcgggaggcagaggccagccggcggtgcatggagctggagaagtacgtggaggaacttgcagcagtgaggcaaaccctccagacagacctggagacatccattcggcggattgccgacctgcaggctgccttggaagaagtggcatccagtgacagtgatactgagagtgtccagacggcagtggattgtggcagcagcggccgaaaagagatggataacgtctccatcctcagctcccagccagagggcagcctgcagtcctggttgagctgtactctgtccctggccacagatactatgaggactccttctcgacagtcagccaccagcagccgcatcctcagccccaggataaacgaagaggctggggacactgagaggacccagtcggcattggcactgagcagagcccggtccaccaatgtccacagcaagacctcaggagacaagcctgtttctccccactttgtccgccggcaaaagtactgtcattttggggacggcgaagtgcttgccgtccagagaaagtccacagagagattagaacctgcttcctctcccctggcttctcggagtacaaatacatccccgctgtcgagggaaaagctgcccagtccttcagcggccctctcggagttcgtggaagggctccggaggaagagagcccagagaggccaggggtccacgctgggcctagaggactggcccactctccccatttaccagacgactggggcctccacactaaggaggggcagggctggcagtgacgagggaaacctctcgctgagggttggggcaaagtcacccctggaaatcgaaggggccgctggtggtctcttgaggtccaccagcctcaaatgcatctcttcagacggtgttgggggcacaaccctactccccgaaaagtcgaaaacccaattcagttcctgcgagtccctcttagaatccagaccgagcatggggagaaaactgagctctccgaccacacccagggacatgctgttgtcgcccacactgcgtcctcggaggcggtgtctggagtcctctgtggacgatgcgggctgtccagaccttggaaaggagccgcttgttttccagaaccgccagtttgcccacctgatggaggaacctctaggcagtgacccattcagctggaaactcccaagcctcgactacgaacgcaagaccaaagtggacttcgatgacttcctcccagctatccggaagccccagacacctacctccttggctggatcagccaaaggtgggcaagacggttcacagcgttcaagcatccactttgaaacggaagaggctaaccgttcctttctctcggggatcaagaccattttgaagaagagcccggagcccaaggaggatcccgctcacctgtctgactcgtcctcatcctccggctccatcgtgtccttcaaaagtgctgacagcatcaaaagtcgaccaggaatcccacgacttgcgggtgacggtggcgagcgaacgtcccccgagcggagagagccagggacggggaggaaagacgacgatgttgcgagcataatgaagaaatacctccagaagtaggaaccagttcagcctccttgaagctgcccttgaagacttcccgactctacaataacttggagacagagagactggccaggcctccccggtggccagagccagccagcatggccaccctcaagaggcgagatgagcccacagaggcatatcctgcgg

SEQ ID NO: 156944 - DNA, 8051 bp, Homo sapiens
  Payload ID: 10755
  Gene Symbol: MYO18B
  Gene Name: myosin XVIIIB
  ENST ID: ENST00000536101
  CDS Start-End: 260-7963
ggcagtaaggggaagggatgtgtgtcggtgtgtgtggagagggtgctccttcgctcctgctttcccggctcggtggggtcccttcgcggccacccggggagacgtcttagacagtcgtggttcctgtgatctgtgtcctctttgcagaagttctgtgtccatctcatgtgctgcgtgtgtctgtaaagcctcattccgtgctgtctggcaggaagctccatctcatctcatcatctcacggccctggcactgcctcagcatggccatctcatcacgcctcgccctgtgggagcagaagattcgggaagaggacaagagccctccaccatcctcgccccctcctcttttctctgtcatcccagggggcttcattaagcaactggtccgggggactgaaaaagaggccaaggaagcgagacagaggaagcagttagctgtcgcctctccagaacgagagatcccagaaatttccatcagccaacccaacagcaagtccagcagtggcaccagatctggaagccagcagatctctcaggacgaccagtcaagctctcctgggagctcagacattctgggcaaggagagcgaggggtcccgcagccccgaccctgagcagatgacaagcatcaatggtgagaaggcccaggagctgggctccagtgcgacaccaaccaaaaagactgtccccttcaagaggggcgtgaggaggggtgatgtgttgttgatggtggccaagctggacccggactcagccaagccagagaagactcatccccatgacgcccccccttgcaagacctctccccccgccacagatactggaaaggaaaagaaaggggagacctctaggactccttgtggctcccaggccagcaccgagatcttggccccgaaagctgagaagacccggactgggggtcttggggacccaggccaaggaactgtggcactgaaaaaaggcgaggagggtcaaagcatagtggggaaggggcttgggacccccaagaccacagagctgaaagaggctgagccccagggcaaagacaggcaggggaccaggccccaagcccaagggcccggcgagggggtgcgaccagggaaagcagagaaggagggagcagagcccacaaacacggtggaaaaggggaatgtctctaaggacgtagggagtgaagggaagcacgtaaggccccaaatccctgggagaaagtggggaggtttcctgggaagaaggagtaagtgggacggtccccagaataagaaggacaaagaaggggtgctcttaagtaaggcagagaagacaggtgagcctcagacccagatggagaagacaagccaagtgcagggcgagttgggggacgatctgagaatgggggagaaagcaggtgagcttcggagcacgactgggaaggcaggtgagtcctgggataagaaggaaaagatggggcaaccccagggtaagtccgggaacgcaggtgaagctcggagtcagacagagaagggctgtgaagccccaaaggaggtgagcacaatggtggagtcgccagcagctcctgggaagggaggctggccaggaagccgtgggcaggaagcagaggagccctgctcaagagcaggtgatggggctggtgccctggagacagagctggaaggacccagccagcctgctctggagaaggatgcagaaaggcctcggatacggaaggagaaccaagacgggccagccccgcaggaggagggcaaaggaggccagagcagagactcagaccaggctcctgaggacagatggtatgaggcagagaaagtctggctggctcagaaggatggatttactcttgctacggtgctaaagccagatgagggaacagcagacctgccagcaggaagggtgagactttggattgatgctgacaaaaccatcactgaggtggatgaggagcatgtccatcgggccaaccctcctgagctggaccaggtcgaggacctggcctctctcatcagtgtcaacgaatccagtgtcctgaacacgcttctgcagcgctacaaagctcagctgctgcacacctgcacagggcctgatctgattgtcctccagccccgggggccctcggtgccttctgcagggaaggtgcccaagggccgccgggatggcctgcctgcccacattggctccatggcacagcgggcatactgggcgctgctgaaccagcggagagaccagagcattgtggccctgggctggagtggcgctgggaagaccacctgctgtgagcaggtcctggaacacctggtggggatggcaggcagtgtggatggcagggtctcagtggagaagatccgagccaccttcactgtcctccgggccttcggctctgtgtccatggcccacagccgcagtgccacccggttctccatggtgatgtcgctggacttcaacgctacaggccgcatcacagctgctcagctccagacaatgcttttggagaagagccgcgtggcacggcagccggaaggggaaagtaacttcctggttttctcccagatgctggctggattggacttggatctcaggacggagctgaacctgcaccagatggcagatagcagctcctttggcatgggcgtgtggtccaagcctgaagataaacagaaggcggcagctgcctttgcccagctccagggtgccatggagatgctcggcatctcagagagcgagcagcgggctgtttggcgggtcctggcagccatctaccacctgggtgcggcgggggcctgcaaagtgggtcggaagcagttcatgaggtttgagtgggcaaactacgcagctgaggccctgggctgcgagtatgaggagctgaacacggccaccttcaagcaccaccttcgacagatcatccagcaaatgacgtttgggccaagccgatggggcctcgaggatgaggaaaccagctcagggctcaagatgacaggagtggactgtgtggaggggatggcctcgggcctgtaccaggaactctttgcggctgtggtctcactcatcaacagatccttttcctcccaccatctctccatggcctccatcatggtggtggactctccaggcttccagaacccccggcaccagggcaaggaccgggcggccacctttgaggagctgtgccacaactacgcccatgagcgcctgcagctgctgttctaccagcggacctttgtctccacgctacagcgatatcaagaggaaggtgttcctgtgcagtttgacctcccggacccctccccagggaccaccgtggctgttgtggatcaaaatccctctcaggtccgcttaccagctggaggaggtgcccaggatgccagaggccttttctgggtcttagatgaggaagtccatgtagagggctccagtgacagtgtggtgctcgagcgtctgtgtgctgctttcgagaagaaaggagctgggactgaagggtcctctgccctgcggacctgtgagcagcccctccagtgtgagattttccaccagttgggatgggaccctgtgcggtacgacctcacgggctggctccacagagccaagcccaacctctcggccctggatgcaccccaggtcctgcaccagtcaaaaagagaggagctgcggagtctattccaggcccgggccaagctgcctcctgtgtgccgggctgtggcaggcctggagggcacctcccagcaggccctgcagaggagccgcatggtgaggaggacctttgccagcagccttgccgcggtgaggaggaaagccccgtgctcccagatcaagctgcagatggatgcgctgaccagcatgatcaaaaggtcccggctgcactttatccactgcctggtaccaaaccctgtggtggaaagcaggagtgggcaggaatctccaccaccaccgcagcctggtagagacaagcctggggcaggtggacctctggccctggatatcccagcactgagggtccagcttgctgggttccacatcctggaggctctgcgtctgcataggacaggctatgctgaccacatggggctcactcgcttccgccggcaattccaggtgctggacgctccactcctgaagaagctcatgtcgacctccgagggaatagatgaaaggaaggccgtggaggagctcctggagaccctggatctggaaaagaaggcggtggctgtggggcacagccaagtttttctcaaggcaggtgtgatctccaggcttgagaagcagcgagagaagctggtatctcagagcatcgttctcttccaggcggcttgcaagggctttctgtctcgccaggaattcaagaagctgaagattcgccgactggctgcacagtgcatccagaagaatgtggctgtgttcctcgcagtcaaggactggccatggtggcagctgcttggttccctccagcctctacttagtgccaccattggaactgagcagctccgagccaaggaggaggagcttacaacgctaagacggaagctagaaaaatcagagaagttgcggaatgaactccggcagaacacagatctgctagaaagcaagattgctgacttgacctctgaccttgccgatgagcgcttcaaaggtgatgtggcctgccaggtgctggagagtgagcgggcagagcggctacaggccttccgggaggtccaggagctcaagagcaagcatgaacaagtccagaaaaaactgggagatgtgaataaacagttggaagaagcccagcagaaaattcagttgaatgacttggaaaggaatcccactggaggagcagacgagtggcagatgcgcttcgactgtgctcagatggagaacgagttcctcagaaagcgtctgcagcaatgcgaggagaggctggactcggagctgacagccaggaaagagctggagcaaaagcttggggagttgcaaagtgcttatgacggggccaagaagatggctcaccaactgaagaggaagtgccaccatcttacctgtgaccttgaggatacctgcgtcctgctagagaaccaacaaagtcgaaaccatgagctggagaagaagcagaagaagtttgacctgcagctggcccaggccctaggtgagtcagtgtttgagaagggtctccgtgagaaagtgacccaggagaacaccagtgtccggtgggagctaggccagcttcagcagcagctgaagcaaaaggagcaggaagcctcacagctgaagcagcaggtggagatgctacaggaccataaacgggagctgctggggtcaccctctctgggggaaaattgcgttgctggcttgaaggagaggctctggaagttggaatccagcgcccttgagcaacagaaaatccagagccagcaggaaaacaccatcaagcagctggagcagctccgccagcggtttgagctggagatcgagcggatgaagcagatgcaccagaaggaccgtgaggaccaggaggaggaactggaggatgtccgtcagtcctgccagaagcggcttcatcagctggaaatgcagctggagcaagagtatgaagagaagcagatggtcctccatgagaagcaagatttggaaggcttgatcggaaccctctgtgaccagattggccatcgggactttgatgtggagaagcgacttcggagagacctcaggaggacacatgcactgttgtcagacgtgcagctccttctgggcaccatggaggatggcaagacatcagtcagcaaggaggagctggagaaagtgcacagccagctggagcagagtgaagccaagtgtgaggaggccttgaagacgcagaaggtgctcacagcggacctggagagcatgcacagcgagctggagaacatgacgcggaacaagagcctggtggatgagcagctgtacaggctgcagtttgagaaggcggacctcctgaagcgcatcgatgaggaccaggatgacctgaatgagctgatgcagaagcacaaggacctcattgctcagtctgctgctgacattgggcagatccaagaactgcagctgcagctggaggaagccaagaaggagaagcacaagctacaagaacaactgcaggtggctcagatgcgcatcgagtacctggaacagtccaccgtggatcgagccatcgtcagcaggcaggaggcggtcatctgtgacctagagaacaagacagagttccagaaggtgcagattaagagatttgaggtcctggtgatccggcttcgggacagcctgatcaagatgggggaggagctttcacaggcggccacctccgagtcccagcagcgggagagcagccagtactaccagcggcgcctggaagagctgaaggccgacatggaagagctggtgcagcgggaggcagaggccagccggcggtgcatggagctggagaagtacgtggaggaacttgcagcagtgaggcaaaccctccagacagacctggagacatccattcggcggattgccgacctgcaggctgccttggaagaagtggcatccagtgacagtgatactgagagtgtccagacggcagtggattgtggcagcagcggccgaaaagagatggataacgtctccatcctcagctcccagccagagggcagcctgcagtcctggttgagctgtactctgtccctggccacagatactatgaggactccttctcgacagtcagccaccagcagccgcatcctcagccccaggataaacgaagaggctggggacactgagaggacccagtcggcattggcactgagcagagcccggtccaccaatgtccacagcaagacctcaggagacaagcctgtttctccccactttgtccgccggcaaaagtactgtcattttggggacggcgaagtgcttgccgtccagagaaagtccacagagagattagaacctgcttcctctcccctggcttctcggagtacaaatacatccccgctgtcgagggaaaagctgcccagtccttcagcggccctctcggagttcgtggaagggctccggaggaagagagcccagagaggccaggggtccacgctgggcctagaggactggcccactctccccatttaccagacgactggggcctccacactaaggaggggcagggctggcagtgacgagggaaacctctcgctgagggttggggcaaagtcacccctggaaatcgaaggggccgctggtggtctcttgaggtccaccagcctcaaatgcatctcttcagacggtgttgggggcacaaccctactccccgaaaagtcgaaaacccaattcagttcctgcgagtccctcttagaatccagaccgagcatggggagaaaactgagctctccgaccacacccagggacatgctgttgtcgcccacactgcgtcctcggaggcggtgtctggagtcctctgtggacgatgcgggctgtccagaccttggaaaggagccgcttgttttccagaaccgccagtttgcccacctgatggaggaacctctaggcagtgacccattcagctggaaactcccaagcctcgactacgaacgcaagaccaaagtggacttcgatgacttcctcccagctatccggaagccccagacacctacctccttggctggatcagccaaaggtgggcaagacggttcacagcgttcaagcatccactttgaaacggaagaggctaaccgttcctttctctcggggatcaagaccattttgaagaagagcccggagcccaaggaggatcccgctcacctgtctgactcgtcctcatcctccggctccatcgtgtccttcaaaagtgctgacagcatcaaaagtcgaccaggaatcccacgacttgcgggtgacggtggcgagcgaacgtcccccgagcggagagagccagggacggggaggaaagacgacgatgttgcgagcataatgaagaaatacctccagaagtaggaaccagttcaggtaaaagcaacaggctggggctattcttgggggaatgagagttcaccttgcagccttggggagagcaggtgccact

SEQ ID NO: 156945 - DNA, 1099 bp, Homo sapiens
  Payload ID: 10755
  Gene Symbol: MYO18B
  Gene Name: myosin XVIIIB
  Uniprot ID: Q8IUG5
  ENST ID: ENST00000540454
  CDS Start-End: 1-630
ccgagcatggggagaaaactgagctctccgaccacacccagggacatgctgttgtcgcccacactgcgtcctcggaggcggtgtctggagtcctctgtggacgatgcgggctgtccagaccttggaaaggagccgcttgttttccagaaccgccagtttgcccacctgatggaggaacctctaggcagtgacccattcagctggaaactcccaagcctcgactacgaacgcaagaccaaagtggacttcgatgacttcctcccagctatccggaagccccagacacctacctccttggctggatcagccaaaggtgggcaagacggttcacagcgttcaagcatccactttgaaacggaagaggctaaccgttcctttctctcggggatcaagaccattttgaagaagagcccggagcccaaggaggatcccgctcacctgtctgactcgtcctcatcctccggctccatcgtgtccttcaaaagtgctgacagcatcaaaagtcgaccaggaatcccacgacttgcgggtgacggtggcgagcgaacgtcccccgagcggagagagccagggacggggaggaaagacgacgatgttgcgagcataatgaagaaatacctccagaagtaggaaccagttcaggagctgtgatggcgttctgtccacataatgacagaagatccgtggtgggatcacagacatgcaaagggccaagttggaagagaccttcagaatagtggagtccacttgcattgcatatggagagaaactgaggccctaggttcaggggggagggaacaagtacaaaaatcacagagcaacaatgcaggataagtaactacttgctgcccttcctccctctcctagcactcatcctgccactcatctggagtcaagcctccttgaagctgcccttgaagacttcccgactctacaataacttggagacagagagactggccaggcctccccggtggccagagccagccagcatggccaccctcaagaggcgagatgagcccacagaggcatatcctgcggggatgctgggctcccagtgtggttggcctgaacaaaataaagtgttgactcctgggca

SEQ ID NO: 156946 - DNA, 1768 bp, Homo sapiens
  Payload ID: 10755
  Gene Symbol: MYO18B
  Gene Name: myosin XVIIIB
  ENST ID: ENST00000543971
  CDS Start-End: 1-1553
aagagctggtgcagcgggaggcagaggccagccggcggtgcatggagctggagaagtacgtggaggaacttgcagcagtgaggcaaaccctccagacagacctggagacatccattcggcggattgccgacctgcaggctgccttggaagaagtggcatccagtgacagtgatactgagagggataacgtctccatcctcagctcccagccagagggcagcctgcagtcctggttgagctgtactctgtccctggccacagatactatgaggactccttctcgacagtcagccaccagcagccgcatcctcagccccaggataaacgaagaggctggggacactgagaggacccagtcggcattggcactgagcagagcccggtccaccaatgtccacagcaagacctcaggagacaagcctgtttctccccactttgtccgccggcaaaagtactgtcattttggggacggcgaagtgcttgccgtccagagaaagtccacagagagattagaacctgcttcctctcccctggcttctcggagtacaaatacatccccgctgtcgagggaaaagctgcccagtccttcagcggccctctcggagttcgtggaagggctccggaggaagagagcccagagaggccaggggtccacgctgggcctagaggactggcccactctccccatttaccagacgactggggcctccacactaaggaggggcagggctggcagtgacgagggaaacctctcgctgagggttggggcaaagtcacccctggaaatcgaaggggccgctggtggtctcttgaggtccaccagcctcaaatgcatctcttcagacggtgttgggggcacaaccctactccccgaaaagtcgaaaacccaattcagttcctgcgagtccctcttagaatccagaccgagcatggggagaaaactgagctctccgaccacacccagggacatgctgttgtcgcccacactgcgtcctcggaggcggtgtctggagtcctctgtggacgatgcgggctgtccagaccttggaaaggagccgcttgttttccagaaccgccagtttgcccacctgatggaggaacctctaggcagtgacccattcagctggaaactcccaagcctcgactacgaacgcaagaccaaagtggacttcgatgacttcctcccagctatccggaagccccagacacctacctccttggctggatcagccaaaggtgggcaagacggttcacagcgttcaagcatccactttgaaacggaagaggctaaccgttcctttctctcggggatcaagaccattttgaagaagagcccggagcccaaggaggatcccgctcacctgtctgactcgtcctcatcctccggctccatcgtgtccttcaaaagtgctgacagcatcaaaagtcgaccaggaatcccacgacttgcgggtgacggtggcgagcgaacgtcccccgagcggagagagccagggacggggaggaaagacgacgatgttgcgagcataatgaagaaatacctccagaagtaggaaccagttcagcctccttgaagctgcccttgaagacttcccgactctacaataacttggagacagagagactggccaggcctccccggtggccagagccagccagcatggccaccctcaagaggcgagatgagcccacagaggcatatcctgcggggatgctgggctcccagtgtggttggcctgaacaaaataaagtgttgactcctgggcat

SEQ ID NO: 156947 - DNA, 6024 bp, Homo sapiens
  Payload ID: 10756
  Gene Symbol: MYH1
  Gene Name: myosin, heavy chain 1, skeletal muscle, adult
  Uniprot ID: P12882
  ENST ID: ENST00000226207
  CDS Start-End: 96-5915
tgtctctcctcataaagcttcaagttctgatccactttaaggtcgcatctctacgccagggtccttaactgggctaccatcaataacctgcagccatgagttccgactctgagatggccatttttggggaggctgctcctttcctccgaaagtctgaaagggagcgaattgaagcccagaacaagccttttgatgccaagacatcagtctttgtggtggaccctaaggagtcctttgtgaaagcaacagtgcagagcagggaaggggggaaggtgacagctaagaccgaagctggagctactgtaacagtgaaagatgaccaagtcttccccatgaaccctcccaaatatgacaagatcgaggacatggccatgatgactcatctacacgagcctgctgtgctgtacaacctcaaagagcgctacgcagcctggatgatctacacctactcaggcttgttctgtgtcactgtcaacccctacaagtggttgccagtgtataatgcagaggtggtgacagcctaccgaggcaaaaagcgccaggaggccccaccccacatcttctccatctctgacaatgcctatcagttcatgctgactgatcgggagaatcagtctatcttgatcaccggagaatctggcgcagggaagactgtgaacaccaagcgtgtcatccagtactttgcaacaattgcagttactggggagaagaagaaggaagaagttacttctggcaaaatgcaggggactctggaagatcaaatcatcagtgccaaccccctactggaggcctttggcaacgccaagaccgtgaggaatgacaactcctctcgctttggtaaattcatcaggatccacttcggtaccacagggaaactggcttctgctgatattgaaacatatcttctggagaagtctagagttactttccagctaaaggctgaaagaagctatcatattttttatcagatcatgtctaacaagaagccagatctaattgaaatgctcctgatcaccaccaacccatacgattatgccttcgtcagtcaaggggagatcacagtgcccagcattgatgaccaagaagagttgatggctacagatagtgccattgaaattctgggctttacttcagatgaaagagtgtccatctataagctcacaggggctgtgatgcattatgggaacatgaaattcaagcaaaagcagcgtgaggagcaagctgagccagatggcactgaagttgctgacaaggcagcctatctccaaaatctgaactctgcagatctgctcaaagccctctgctaccctagggtcaaggtcggcaatgagtatgtcaccaaaggtcaaactgtgcagcaggtgtacaatgcagtgggtgctctggccaaagctgtctacgataagatgttcttgtggatggtcacccgcatcaaccagcagctggacaccaagcagcccaggcagtacttcattggggtcttggacattgctggctttgagatctttgatttcaacagcctggagcagctgtgcatcaacttcaccaatgagaaactgcaacagtttttcaaccaccacatgttcgtgctggagcaggaggagtacaagaaggaaggcattgagtggacgttcattgactttgggatggacctggctgcctgcatcgagctcatcgagaagcctatgggcatcttctccatcctggaagaggagtgcatgttccccaaggcgacagacacctccttcaagaacaagctgtatgaacaacatcttggaaaatccaataacttccagaagcccaagcctgccaaaggcaagcctgaggcccacttctctttgattcactatgctggcaccgtggactacaacattgccggctggcttgacaagaacaaggaccccctgaatgagactgtggtggggctgtaccagaagtctgcaatgaagactctggctctcctctttgttggggcaacgggagcggaagcagaggctggcggtggaaagaaaggtggtaagaagaagggttcttctttccagactgtgtctgctctcttcagggagaatttgaataagctgatgaccaacttgaggagcactcacccccactttgtgcggtgcatcatccccaatgaaactaaaactcctggtgccatggagcatgagcttgtcctgcatcagctgaggtgtaacggtgtgctggaaggcatccgcatctgcaggaaaggcttcccaagcagaatcctttatgcagacttcaaacagagatacaaggtgttaaatgcaagtgctatccctgaaggacaattcatcgatagcaagaaggcttcagagaagctcctggggtccattgacattgaccacacccagtataaatttggtcacaccaaggtctttttcaaagctggtcttctggggctcctagaggagatgcgagatgagaagctggcccagctgattacccgaacccaggccatgtgcagagggttcttggcaagagtggagtaccagaaaatggtggaaagaagagagtccatcttctgcatccagtacaatgtccgtgccttcatgaatgtgaagcactggccctggatgaagctgtatttcaagatcaaacccctcctcaaaagtgcagagacagagaaggagatggccaacatgaaggaagaatttgagaaaaccaaagaagagctggctaagaccgaggcaaaaaggaaagagctggaagaaaaaatggttactctgatgcaagaaaaaaatgacttgcaactccaggttcaagctgaagctgacagcttggctgatgcagaggaaaggtgtgaccagctaatcaaaaccaaaatccagctagaagccaaaatcaaagaggtgactgagagagctgaggatgaggaagagatcaatgctgagctgacagccaagaagaggaaactggaggatgaatgttcagaactcaagaaagacattgatgaccttgagctgacactggccaaggttgagaaggagaaacatgccacagaaaacaaggtgaaaaacctcacagaagagatggcgggtctggatgaaaccattgctaagctgaccaaggagaagaaggctctccaggaggcccaccagcagaccctggatgacctgcaggcagaggaggacaaagtcaacaccctgaccaaagctaaaatcaaacttgaacaacaagtggatgatcttgaaggatctttggaacaagaaaagaaaatccggatggatctagaaagagcaaagagaaaactagagggagacctaaaattggctcaagaatccacaatggatatagaaaatgacaaacaacaacttgatgaaaagcttaaaaagaaagagtttgaaatgagcggtctgcaaagcaagattgaagatgaacaagcccttggtatgcagctgcagaagaaaatcaaggagttacaagcccgcattgaggagctggaggaggaaatcgaggcagagcgggcctcccgggccaaagcagagaagcagcgctctgatctctcccgggagctggaggagatcagcgagaggctggaagaagccggtggggccacctcagcccagattgagatgaacaagaagcgggaggctgagttccagaaaatgcgcagggacctggaggaggccaccctacagcatgaagccacggcggccaccctgaggaagaagcatgcagatagtgtggccgagcttggggagcagattgacaacctgcagcgagtgaagcagaagctggagaaggagaagagtgagatgaagatggagatcgatgaccttgctagtaacatggagactgtctccaaagccaagggaaaccttgaaaagatgtgccgcgctctagaagatcaactgagtgaaattaagaccaaggaagaggagcagcagcggctgatcaatgacctcacagcacagagagcgcgcctgcaaacagaatcaggtgaatattcacgccagctagatgaaaaggacacactagtttcacagctctcgaggggcaaacaagcctttacacaacagattgaggaactgaaaaggcaacttgaagaggagataaaggccaagagtgccctggcacatgccctgcagtcctcccgccatgactgtgacctgctgcgggaacagtatgaggaggagcaggaagccaaggccgagctacagagagcaatgtccaaggccaacagtgaggttgcccagtggaggaccaaatatgagacagatgccatccagcgcacagaggagctggaggaggccaagaagaagctggctcagcgtctgcaggatgctgaggaacatgtagaagctgtgaatgccaaatgtgcttcccttgagaagacgaagcagaggctccagaatgaagttgaggacctcatgattgatgttgagaggacaaatgctgcctgtgccgccctggacaaaaagcaaaggaactttgataagatcctggcagaatggaaacagaagtgtgaagaaactcatgctgaacttgaagcttctcaaaaggaatcccgctcactcagcacagaactatttaagattaagaatgcttatgaggaatctttagaccaacttgaaaccttgaaacgggaaaataagaatttgcaacaggagatttctgatctcactgaacagattgcagaaggaggaaagcgcatccatgaactggaaaaaataaagaagcaagttgagcaagaaaagtctgaacttcaggctgccttagaggaggcagaggcatctcttgaacatgaagagggaaagatcctgcgcatccagcttgagttgaaccaagtcaagtctgaggttgataggaaaattgctgaaaaagatgaggaaattgaccagatgaagagaaaccacattagaatcgtggagtccatgcagagcacactggatgctgagatcaggagcaggaatgatgccattaggctcaagaagaagatggagggagacctcaatgaaatggaaatccagctgaaccatgccaaccgcatggctgctgaggccctgaggaactataggaacacccaagccatcctcaaggatacccagctccacctggatgatgctctccggagccaggaggacctgaaggaacagctggctatggtggagcgcagagccaacctgctgcaggctgagatcgaggagctgcgggccactctggaacagacagagaggagcaggaaaatcgcagaacaggagctcctggatgccagtgagcgtgttcagctcctgcacacccagaacaccagcctgatcaacaccaagaagaagctggagacagacatttcccaaatccagggagagatggaagacatcatccaggaagcccgcaatgcagaagagaaggccaagaaggccatcactgatgctgccatgatggctgaggagctgaagaaggaacaggacaccagcgcccatctggagcggatgaagaagaacctggaacagacggtgaaggacctgcagcatcgtctggatgaggctgagcagctggccctgaagggtgggaagaagcagatccagaaactggaggccagggttcgtgaacttgaaggtgaagttgaaagtgaacagaagcgcaatgttgaagctgtcaagggtctacgcaaacatgagagaaaagtgaaggaactcacttaccaaactgaggaagaccgcaagaatattctcaggctccaggacctggtggacaaactgcaagcaaaggtgaaatcctacaagagacaagctgaagaagcggaggaacaatccaacgtcaacctctccaaattccgcaggatccagcacgagctggaggaggccgaggaacgggctgacattgctgagtcccaggtcaacaagctgagggtgaagagcagggaggttcacacaaaaatcataagtgaagagtaatttatctaactgctgaaaggtgaccaaagaaatgcacaaaatgtgaaaatctttgtcactccattttgtacttatgacttttggagataaaaaatttatctgccaaaaa

SEQ ID NO: 156948 - DNA, 7662 bp, Homo sapiens
  Payload ID: 10757
  Gene Symbol: MYH10
  Gene Name: myosin, heavy chain 10, non-muscle
  Uniprot ID: P35580
  ENST ID: ENST00000269243
  CDS Start-End: 140-6070
agcagtgctaaaggagcccggcggaggcagcggtgggtttgggactgaggcgctggatctgtggtcgcggctggggacgtgcgcccgcgccaccatcttcggctgaagaggcaattgcttttggatcgttccatttacaatggcgcagagaactggactcgaggatccagagaggtatctctttgtggacagggctgtcatctacaaccctgccactcaagctgattggacagctaaaaagctagtgtggattccatcagaacgccatggttttgaggcagctagtatcaaagaagaacggggagatgaagttatggtggagttggcagagaatggaaagaaagcaatggtcaacaaagatgatattcagaagatgaacccacctaagttttccaaggtggaggatatggcagaattgacatgcttgaatgaagcttccgttttacataatctgaaggatcgctactattcaggactaatctatacttattctggactcttctgtgtagttataaacccttacaagaatcttccaatttactctgagaatattattgaaatgtacagagggaagaagcgtcatgagatgcctccacacatctatgctatatctgaatctgcttacagatgcatgcttcaagatcgtgaggaccagtcaattctttgcacgggtgagtcaggtgctgggaagacagaaaatacaaagaaagttattcagtaccttgcccatgttgcttcttcacataaaggaagaaaggaccataatattcctggggaacttgaacggcagcttttgcaagcaaatccaattctggaatcatttggaaatgcgaagactgtgaaaaatgataactcatctcgttttggcaaatttattcggatcaactttgatgtaactggctatatcgttggggccaacattgaaacataccttctggaaaagtctcgtgctgttcgtcaagcaaaagatgaacgtacttttcatatcttttaccagttgttatctggagcaggagaacacctaaagtctgatttgcttcttgaaggatttaataactacaggtttctctccaatggctatattcctattccgggacagcaagacaaagataatttccaggagaccatggaagcaatgcacataatgggcttctcccatgaagagattctgtcaatgcttaaagtagtatcttcagtgctacagtttggaaatatttctttcaaaaaggagagaaatactgatcaagcttccatgccagaaaatacagttgcgcagaagctctgccatcttcttgggatgaatgtgatggagtttactcgggccatcctgactccccggatcaaggtcggccgagactatgtgcaaaaagcccagaccaaagaacaggcagattttgcagtagaagcattggcaaaagctacctatgagcggctctttcgctggctcgttcatcgcatcaataaagctctggataggaccaaacgtcagggagcatctttcattggaatcctggatattgctggatttgaaatttttgagctgaactcctttgaacaactttgcatcaactacaccaatgagaagctgcagcagctgttcaaccacaccatgtttatcctagaacaagaggaataccagcgcgaaggcatcgagtggaacttcatcgatttcgggctggatctgcagccatgcatcgacctaatagagagacctgcgaaccctcctggtgtactggcccttttggatgaagaatgctggttccctaaagccacagataaaacctttgttgaaaaactggttcaagagcaaggttcccactccaagtttcagaaacctcgacaattaaaagacaaagctgatttttgcattatacattatgcagggaaggtggactataaggcagatgagtggctgatgaagaatatggaccccctgaatgacaacgtggccacccttttgcaccagtcatcagacagatttgtggcagagctttggaaagatgtggaccgtatcgtgggtctggatcaagtcactggtatgactgagacagcttttggctccgcatataaaaccaagaagggcatgtttcgtaccgttgggcaactctacaaagaatctctcaccaagctgatggcaactctccgaaacaccaaccctaactttgttcgttgtatcattccaaatcacgagaagagggctggaaaattggatccacacctagtcctagatcagcttcgctgtaacggtgtcctggaagggatccgaatctgtcgccagggcttccctaaccgaatagttttccaggaattcagacagagatatgagatcctaactccaaatgctattcctaaaggttttatggatggtaaacaggcctgtgaacgaatgatccgggctttagaattggacccaaacttgtacagaattggacagagcaagatatttttcagagctggagttctggcacacttagaggaagaaagagatttaaaaatcaccgatatcattatcttcttccaggccgtttgcagaggttacctggccagaaaggcctttgccaagaagcagcagcaactaagtgccttaaaggtcttgcagcggaactgtgccgcgtacctgaaattacggcactggcagtggtggcgagtcttcacaaaggtgaagccgcttctacaagtgactcgccaggaggaagaacttcaggccaaagatgaagagctgttgaaggtgaaggagaagcagacgaaggtggaaggagagctggaggagatggagcggaagcaccagcagcttttagaagagaagaatatccttgcagaacaactacaagcagagactgagctctttgctgaagcagaagagatgagggcaagacttgctgctaaaaagcaggaattagaagagattctacatgacttggagtctagggttgaagaagaagaagaaagaaaccaaatcctccaaaatgaaaagaaaaaaatgcaagcacatattcaggacctggaagaacagctagacgaggaggaaggggctcggcaaaagctgcagctggaaaaggtgacagcagaggccaagatcaagaagatggaagaggagattctgcttctcgaggaccaaaattccaagttcatcaaagaaaagaaactcatggaagatcgcattgctgagtgttcctctcagctggctgaagaggaagaaaaggcgaaaaacttggccaaaatcaggaataagcaagaagtgatgatctcagatttagaagaacgcttaaagaaggaagaaaagactcgtcaggaactggaaaaggccaaaagaaaactcgacggggagacgaccgacctgcaggaccagatcgcagagctgcaggcgcagattgatgagctcaagctgcagctggccaagaaggaggaggagctgcagggcgcactggccagaggtgatgatgaaacactccataagaacaatgcccttaaagttgtgcgagagctacaagcccaaattgctgaacttcaggaagactttgaatccgagaaggcttcacggaacaaggccgaaaagcagaaaagggacttgagtgaggaactggaagctctgaaaacagagctggaggacacgctggacaccacggcagcccagcaggaactacgtacaaaacgtgaacaagaagtggcagagctgaagaaagctcttgaggaggaaactaagaaccatgaagctcaaatccaggacatgagacaaagacacgcaacagccctggaggagctctcagagcagctggaacaggccaagcggttcaaagcaaatctagagaagaacaagcagggcctggagacagataacaaggagctggcgtgtgaggtgaaggtcctgcagcaggtcaaggctgagtctgagcacaagaggaagaagctcgacgcgcaggtccaggagctccatgccaaggtctctgaaggcgacaggctcagggtggagctggcggagaaagcaagtaagctgcagaatgagctagataatgtctccacccttctggaagaagcagagaagaagggtattaaatttgctaaggatgcagctagtcttgagtctcaactacaggatacacaggagcttcttcaggaggagacacgccagaaactaaacctgagcagtcggatccggcagctggaagaggagaagaacagtcttcaggagcagcaggaggaggaggaggaggccaggaagaacctggagaagcaagtgctggccctgcagtcccagttggctgataccaagaagaaagtagatgacgacctgggaacaattgaaagtctggaagaagccaagaagaagcttctgaaggacgcggaggccctgagccagcgcctggaggagaaggcactggcgtatgacaaactggagaagaccaagaaccgcctgcagcaggagctggacgacctcacggtggacctggaccaccagcgccaggtcgcctccaacttggagaagaagcagaagaagtttgaccagctgttagcagaagagaagagcatctctgctcgctatgccgaagagcgggaccgggccgaagccgaggccagagagaaagaaaccaaagccctgtcactggcccgggccctcgaggaagccctggaggccaaggaggagtttgagaggcagaacaagcagctccgagcagacatggaagacctcatgagctccaaagatgatgtgggaaaaaacgttcacgaacttgaaaaatccaaacgggccctagagcagcaggtggaggaaatgaggacccagctggaggagctggaagacgaactccaggccacggaagatgccaagcttcgtctggaggtcaacatgcaggccatgaaggcgcagttcgagagagacctgcaaaccagggatgagcagaatgaagagaagaagcggctgctgatcaaacaggtgcgggagctcgaggcggagctggaggatgagaggaaacagcgggcgcttgctgtagcttcaaagaaaaagatggagatagacctgaaggacctcgaagcccaaatcgaggctgcgaacaaagctcgggatgaggtgattaagcagctccgcaagctccaggctcagatgaaggattaccaacgtgaattagaagaagctcgtgcatccagagatgagatttttgctcaatccaaagagagtgaaaagaaattgaagagtctggaagcagaaatccttcaattgcaggaggaacttgcctcatctgagcgagcccgccgacacgccgagcaggagagagatgagctggcggacgagatcaccaacagcgcctctggcaagtccgcgctgctggatgagaagcggcgtctggaagctcggatcgcacagctggaggaggagctggaagaggagcagagcaacatggagctgctcaacgaccgcttccgcaagaccactctacaggtggacacactgaacgccgagctagcagccgagcgcagcgccgcccagaagagtgacaatgcacgccagcaactggagcggcagaacaaggagctgaaggccaagctgcaggaactcgagggtgctgtcaagtctaagttcaaggccaccatctcagccctggaggccaagattgggcagctggaggagcagcttgagcaggaagccaaggaacgagcagccgccaacaaattagtccgtcgcactgagaagaagctgaaagaaatcttcatgcaggttgaggatgagcgtcgacacgcggaccagtataaagagcagatggagaaggccaacgctcggatgaagcagcttaaacgccagctggaggaagcagaagaagaagcgacgcgtgccaacgcatctcggcgtaaactccagcgggaactggatgatgccaccgaggccaacgagggcctgagccgcgaggtcagcaccctgaagaaccggctgaggcggggtggccccatcagcttctcttccagccgatctggccggcgccagctgcaccttgaaggagcttccctggagctctccgacgatgacacagaaagtaagaccagtgatgtcaacgagacgcagccaccccagtcagagtaaagttgcaggaagccagaggaggcaatacagtgggacagttaggaatgcacccggggcctcctgcagatttcggaaattggcaagctacgggattccttcctgaaagatcaactgtgtcttaaggctctccagcctatgcatactgtatcctgcttcagacttaggtacaattgctcccctttttatatatagacacacacaggacacatatattaaacagattgtttcatcattgcatctattttccatatagtcatcaagagaccattttataaaacatggtaagaccctttttaaaacaaactccaggcccttggttgcgggtcgctgggttattggggcagcgccgtggtcgtcactcagtcgctctgcatgctctctgtcatacagacaggtaacctagttctgtgttcacgtggcccccgactcctcagccacatcaagtctcctagaccactgtggactctaaactgcacttgtctctctcatttccttcaaataatgatcaatgctatttcagtgagcaaactgtgaaaggggctttggaaagagtaggaggggtgggctggatcggaagcaacacccatttggggttaccatgtccatcccccaaggggggccctgcccctcgagtcgatggtgtcccgcatctactcatgtgaactggccttggcgagggctggtctgtgcatagaagggatagtggccacactgcagctgaggccccaggtggcagccatggatcatgtagacttccagatggtctcccgaaccgcctggctctgccggcgccctcctcacgtcaggagcaagcagccgtggacccctaagccgagctggtggaaggcccctccccatcgccagccgggccctcatgctgaccttgcaaattcagccgctgctttgagcccaaaatgggaatattggttttgtgtccgaggcttgttccaagtttgtcaatgaggtttatggagcctccagaacagatgccatcttcctgaatgttgacatgccagtgggtgtgactccttcatttttccttctcccttccctttggacagtgttacagtgaacacttagcatcctgtttttggttggtagttaagcaaactgacattacggaaagtgccttagacactacagtactaagacaatgttgaatatatcattcgcctctataacaatttaatgtattcagttttgactgtgcttcatatcatgtacctctctagtcaaagtggtattacagacattcagtgacaatgaatcagtgttaattctaaatccttgatcctctgcaatgtgcttgaaaacacaaaccttttgggttaaaagctttaacatctattaggaagaatttgtcctgtgggtttggaatcttggattttccccctttatgaactgtactggctgttgaccaccagacacctgaccgcaaatatcttttcttgtattcccatatttctagacaatgatttttgtaagacaataaatttattcattatagatatttgcgcctgctctgtttacttgaagaaaaaagcacccgtggagaataaagagacctcaataaacaagaataatcatgtgaa

SEQ ID NO: 156949 - DNA, 7762 bp, Homo sapiens
  Payload ID: 10757
  Gene Symbol: MYH10
  Gene Name: myosin, heavy chain 10, non-muscle
  Uniprot ID: P35580
  ENST ID: ENST00000360416
  CDS Start-End: 140-6163
agcagtgctaaaggagcccggcggaggcagcggtgggtttgggactgaggcgctggatctgtggtcgcggctggggacgtgcgcccgcgccaccatcttcggctgaagaggcaattgcttttggatcgttccatttacaatggcgcagagaactggactcgaggatccagagaggtatctctttgtggacagggctgtcatctacaaccctgccactcaagctgattggacagctaaaaagctagtgtggattccatcagaacgccatggttttgaggcagctagtatcaaagaagaacggggagatgaagttatggtggagttggcagagaatggaaagaaagcaatggtcaacaaagatgatattcagaagatgaacccacctaagttttccaaggtggaggatatggcagaattgacatgcttgaatgaagcttccgttttacataatctgaaggatcgctactattcaggactaatctatacttattctggactcttctgtgtagttataaacccttacaagaatcttccaatttactctgagaatattattgaaatgtacagagggaagaagcgtcatgagatgcctccacacatctatgctatatctgaatctgcttacagatgcatgcttcaagatcgtgaggaccagtcaattctttgcacgggtgagtcaggtgctgggaagacagaaaatacaaagaaagttattcagtaccttgcccatgttgcttcttcacataaaggaagaaaggaccataatattcctcaggaatcgcctaaaccagtgaaacaccagggggaacttgaacggcagcttttgcaagcaaatccaattctggaatcatttggaaatgcgaagactgtgaaaaatgataactcatctcgttttggcaaatttattcggatcaactttgatgtaactggctatatcgttggggccaacattgaaacataccttctggaaaagtctcgtgctgttcgtcaagcaaaagatgaacgtacttttcatatcttttaccagttgttatctggagcaggagaacacctaaagtctgatttgcttcttgaaggatttaataactacaggtttctctccaatggctatattcctattccgggacagcaagacaaagataatttccaggagaccatggaagcaatgcacataatgggcttctcccatgaagagattctgtcaatgcttaaagtagtatcttcagtgctacagtttggaaatatttctttcaaaaaggagagaaatactgatcaagcttccatgccagaaaatacagttgcgcagaagctctgccatcttcttgggatgaatgtgatggagtttactcgggccatcctgactccccggatcaaggtcggccgagactatgtgcaaaaagcccagaccaaagaacaggcagattttgcagtagaagcattggcaaaagctacctatgagcggctctttcgctggctcgttcatcgcatcaataaagctctggataggaccaaacgtcagggagcatctttcattggaatcctggatattgctggatttgaaatttttgagctgaactcctttgaacaactttgcatcaactacaccaatgagaagctgcagcagctgttcaaccacaccatgtttatcctagaacaagaggaataccagcgcgaaggcatcgagtggaacttcatcgatttcgggctggatctgcagccatgcatcgacctaatagagagacctgcgaaccctcctggtgtactggcccttttggatgaagaatgctggttccctaaagccacagataaaacctttgttgaaaaactggttcaagagcaaggttcccactccaagtttcagaaacctcgacaattaaaagacaaagctgatttttgcattatacattatgcagggaaggtggactataaggcagatgagtggctgatgaagaatatggaccccctgaatgacaacgtggccacccttttgcaccagtcatcagacagatttgtggcagagctttggaaagatgagattcagaatattcagagagcttctttctatgacagtgtttctggtcttcatgagccaccagtggaccgtatcgtgggtctggatcaagtcactggtatgactgagacagcttttggctccgcatataaaaccaagaagggcatgtttcgtaccgttgggcaactctacaaagaatctctcaccaagctgatggcaactctccgaaacaccaaccctaactttgttcgttgtatcattccaaatcacgagaagagggctggaaaattggatccacacctagtcctagatcagcttcgctgtaacggtgtcctggaagggatccgaatctgtcgccagggcttccctaaccgaatagttttccaggaattcagacagagatatgagatcctaactccaaatgctattcctaaaggttttatggatggtaaacaggcctgtgaacgaatgatccgggctttagaattggacccaaacttgtacagaattggacagagcaagatatttttcagagctggagttctggcacacttagaggaagaaagagatttaaaaatcaccgatatcattatcttcttccaggccgtttgcagaggttacctggccagaaaggcctttgccaagaagcagcagcaactaagtgccttaaaggtcttgcagcggaactgtgccgcgtacctgaaattacggcactggcagtggtggcgagtcttcacaaaggtgaagccgcttctacaagtgactcgccaggaggaagaacttcaggccaaagatgaagagctgttgaaggtgaaggagaagcagacgaaggtggaaggagagctggaggagatggagcggaagcaccagcagcttttagaagagaagaatatccttgcagaacaactacaagcagagactgagctctttgctgaagcagaagagatgagggcaagacttgctgctaaaaagcaggaattagaagagattctacatgacttggagtctagggttgaagaagaagaagaaagaaaccaaatcctccaaaatgaaaagaaaaaaatgcaagcacatattcaggacctggaagaacagctagacgaggaggaaggggctcggcaaaagctgcagctggaaaaggtgacagcagaggccaagatcaagaagatggaagaggagattctgcttctcgaggaccaaaattccaagttcatcaaagaaaagaaactcatggaagatcgcattgctgagtgttcctctcagctggctgaagaggaagaaaaggcgaaaaacttggccaaaatcaggaataagcaagaagtgatgatctcagatttagaagaacgcttaaagaaggaagaaaagactcgtcaggaactggaaaaggccaaaagaaaactcgacggggagacgaccgacctgcaggaccagatcgcagagctgcaggcgcagattgatgagctcaagctgcagctggccaagaaggaggaggagctgcagggcgcactggccagaggtgatgatgaaacactccataagaacaatgcccttaaagttgtgcgagagctacaagcccaaattgctgaacttcaggaagactttgaatccgagaaggcttcacggaacaaggccgaaaagcagaaaagggacttgagtgaggaactggaagctctgaaaacagagctggaggacacgctggacaccacggcagcccagcaggaactacgtacaaaacgtgaacaagaagtggcagagctgaagaaagctcttgaggaggaaactaagaaccatgaagctcaaatccaggacatgagacaaagacacgcaacagccctggaggagctctcagagcagctggaacaggccaagcggttcaaagcaaatctagagaagaacaagcagggcctggagacagataacaaggagctggcgtgtgaggtgaaggtcctgcagcaggtcaaggctgagtctgagcacaagaggaagaagctcgacgcgcaggtccaggagctccatgccaaggtctctgaaggcgacaggctcagggtggagctggcggagaaagcaagtaagctgcagaatgagctagataatgtctccacccttctggaagaagcagagaagaagggtattaaatttgctaaggatgcagctagtcttgagtctcaactacaggatacacaggagcttcttcaggaggagacacgccagaaactaaacctgagcagtcggatccggcagctggaagaggagaagaacagtcttcaggagcagcaggaggaggaggaggaggccaggaagaacctggagaagcaagtgctggccctgcagtcccagttggctgataccaagaagaaagtagatgacgacctgggaacaattgaaagtctggaagaagccaagaagaagcttctgaaggacgcggaggccctgagccagcgcctggaggagaaggcactggcgtatgacaaactggagaagaccaagaaccgcctgcagcaggagctggacgacctcacggtggacctggaccaccagcgccaggtcgcctccaacttggagaagaagcagaagaagtttgaccagctgttagcagaagagaagagcatctctgctcgctatgccgaagagcgggaccgggccgaagccgaggccagagagaaagaaaccaaagccctgtcactggcccgggccctcgaggaagccctggaggccaaggaggagtttgagaggcagaacaagcagctccgagcagacatggaagacctcatgagctccaaagatgatgtgggaaaaaacgttcacgaacttgaaaaatccaaacgggccctagagcagcaggtggaggaaatgaggacccagctggaggagctggaagacgaactccaggccacggaagatgccaagcttcgtctggaggtcaacatgcaggccatgaaggcgcagttcgagagagacctgcaaaccagggatgagcagaatgaagagaagaagcggctgctgatcaaacaggtgcgggagctcgaggcggagctggaggatgagaggaaacagcgggcgcttgctgtagcttcaaagaaaaagatggagatagacctgaaggacctcgaagcccaaatcgaggctgcgaacaaagctcgggatgaggtgattaagcagctccgcaagctccaggctcagatgaaggattaccaacgtgaattagaagaagctcgtgcatccagagatgagatttttgctcaatccaaagagagtgaaaagaaattgaagagtctggaagcagaaatccttcaattgcaggaggaacttgcctcatctgagcgagcccgccgacacgccgagcaggagagagatgagctggcggacgagatcaccaacagcgcctctggcaagtccgcgctgctggatgagaagcggcgtctggaagctcggatcgcacagctggaggaggagctggaagaggagcagagcaacatggagctgctcaacgaccgcttccgcaagaccactctacaggtggacacactgaacgccgagctagcagccgagcgcagcgccgcccagaagagtgacaatgcacgccagcaactggagcggcagaacaaggagctgaaggccaagctgcaggaactcgagggtgctgtcaagtctaagttcaaggccaccatctcagccctggaggccaagattgggcagctggaggagcagcttgagcaggaagccaaggaacgagcagccgccaacaaattagtccgtcgcactgagaagaagctgaaagaaatcttcatgcaggttgaggatgagcgtcgacacgcggaccagtataaagagcagatggagaaggccaacgctcggatgaagcagcttaaacgccagctggaggaagcagaagaagaagcgacgcgtgccaacgcatctcggcgtaaactccagcgggaactggatgatgccaccgaggccaacgagggcctgagccgcgaggtcagcaccctgaagaaccggctgaggcggggtggccccatcagcttctcttccagccgatctggccggcgccagctgcaccttgaaggagcttccctggagctctccgacgatgacacagaaagtaagaccagtgatgtcaacgagacgcagccaccccagtcagagtaaagttgcaggaagccagaggaggcaatacagtgggacagttaggaatgcacccggggcctcctgcagatttcggaaattggcaagctacgggattccttcctgaaagatcaactgtgtcttaaggctctccagcctatgcatactgtatcctgcttcagacttaggtacaattgctcccctttttatatatagacacacacaggacacatatattaaacagattgtttcatcattgcatctattttccatatagtcatcaagagaccattttataaaacatggtaagaccctttttaaaacaaactccaggcccttggttgcgggtcgctgggttattggggcagcgccgtggtcgtcactcagtcgctctgcatgctctctgtcatacagacaggtaacctagttctgtgttcacgtggcccccgactcctcagccacatcaagtctcctagaccactgtggactctaaactgcacttgtctctctcatttccttcaaataatgatcaatgctatttcagtgagcaaactgtgaaaggggctttggaaagagtaggaggggtgggctggatcggaagcaacacccatttggggttaccatgtccatcccccaaggggggccctgcccctcgagtcgatggtgtcccgcatctactcatgtgaactggccttggcgagggctggtctgtgcatagaagggatagtggccacactgcagctgaggccccaggtggcagccatggatcatgtagacttccagatggtctcccgaaccgcctggctctgccggcgccctcctcacgtcaggagcaagcagccgtggacccctaagccgagctggtggaaggcccctccccatcgccagccgggccctcatgctgaccttgcaaattcagccgctgctttgagcccaaaatgggaatattggttttgtgtccgaggcttgttccaagtttgtcaatgaggtttatggagcctccagaacagatgccatcttcctgaatgttgacatgccagtgggtgtgactccttcatttttccttctcccttccctttggacagtgttacagtgaacacttagcatcctgtttttggttggtagttaagcaaactgacattacggaaagtgccttagacactacagtactaagacaatgttgaatatatcattcgcctctataacaatttaatgtattcagttttgactgtgcttcatatcatgtacctctctagtcaaagtggtattacagacattcagtgacaatgaatcagtgttaattctaaatccttgatcctctgcaatgtgcttgaaaacacaaaccttttgggttaaaagctttaacatctattaggaagaatttgtcctgtgggtttggaatcttggattttccccctttatgaactgtactggctgttgaccaccagacacctgaccgcaaatatcttttcttgtattcccatatttctagacaatgatttttgtaagacaataaatttattcattatagatatttgcgcctgctctgtttacttgaagaaaaaagcacccgtggagaataaagagacctcaataaacaagaataatcatgtgaacgtggaa

SEQ ID NO: 156950 - DNA, 7694 bp, Homo sapiens
  Payload ID: 10757
  Gene Symbol: MYH10
  Gene Name: myosin, heavy chain 10, non-muscle
  Uniprot ID: P35580
  ENST ID: ENST00000379980
  CDS Start-End: 140-6097
agcagtgctaaaggagcccggcggaggcagcggtgggtttgggactgaggcgctggatctgtggtcgcggctggggacgtgcgcccgcgccaccatcttcggctgaagaggcaattgcttttggatcgttccatttacaatggcgcagagaactggactcgaggatccagagaggtatctctttgtggacagggctgtcatctacaaccctgccactcaagctgattggacagctaaaaagctagtgtggattccatcagaacgccatggttttgaggcagctagtatcaaagaagaacggggagatgaagttatggtggagttggcagagaatggaaagaaagcaatggtcaacaaagatgatattcagaagatgaacccacctaagttttccaaggtggaggatatggcagaattgacatgcttgaatgaagcttccgttttacataatctgaaggatcgctactattcaggactaatctatacttattctggactcttctgtgtagttataaacccttacaagaatcttccaatttactctgagaatattattgaaatgtacagagggaagaagcgtcatgagatgcctccacacatctatgctatatctgaatctgcttacagatgcatgcttcaagatcgtgaggaccagtcaattctttgcacgggtgagtcaggtgctgggaagacagaaaatacaaagaaagttattcagtaccttgcccatgttgcttcttcacataaaggaagaaaggaccataatattcctgaatcgcctaaaccagtgaaacaccagggggaacttgaacggcagcttttgcaagcaaatccaattctggaatcatttggaaatgcgaagactgtgaaaaatgataactcatctcgttttggcaaatttattcggatcaactttgatgtaactggctatatcgttggggccaacattgaaacataccttctggaaaagtctcgtgctgttcgtcaagcaaaagatgaacgtacttttcatatcttttaccagttgttatctggagcaggagaacacctaaagtctgatttgcttcttgaaggatttaataactacaggtttctctccaatggctatattcctattccgggacagcaagacaaagataatttccaggagaccatggaagcaatgcacataatgggcttctcccatgaagagattctgtcaatgcttaaagtagtatcttcagtgctacagtttggaaatatttctttcaaaaaggagagaaatactgatcaagcttccatgccagaaaatacagttgcgcagaagctctgccatcttcttgggatgaatgtgatggagtttactcgggccatcctgactccccggatcaaggtcggccgagactatgtgcaaaaagcccagaccaaagaacaggcagattttgcagtagaagcattggcaaaagctacctatgagcggctctttcgctggctcgttcatcgcatcaataaagctctggataggaccaaacgtcagggagcatctttcattggaatcctggatattgctggatttgaaatttttgagctgaactcctttgaacaactttgcatcaactacaccaatgagaagctgcagcagctgttcaaccacaccatgtttatcctagaacaagaggaataccagcgcgaaggcatcgagtggaacttcatcgatttcgggctggatctgcagccatgcatcgacctaatagagagacctgcgaaccctcctggtgtactggcccttttggatgaagaatgctggttccctaaagccacagataaaacctttgttgaaaaactggttcaagagcaaggttcccactccaagtttcagaaacctcgacaattaaaagacaaagctgatttttgcattatacattatgcagggaaggtggactataaggcagatgagtggctgatgaagaatatggaccccctgaatgacaacgtggccacccttttgcaccagtcatcagacagatttgtggcagagctttggaaagatgtggaccgtatcgtgggtctggatcaagtcactggtatgactgagacagcttttggctccgcatataaaaccaagaagggcatgtttcgtaccgttgggcaactctacaaagaatctctcaccaagctgatggcaactctccgaaacaccaaccctaactttgttcgttgtatcattccaaatcacgagaagagggctggaaaattggatccacacctagtcctagatcagcttcgctgtaacggtgtcctggaagggatccgaatctgtcgccagggcttccctaaccgaatagttttccaggaattcagacagagatatgagatcctaactccaaatgctattcctaaaggttttatggatggtaaacaggcctgtgaacgaatgatccgggctttagaattggacccaaacttgtacagaattggacagagcaagatatttttcagagctggagttctggcacacttagaggaagaaagagatttaaaaatcaccgatatcattatcttcttccaggccgtttgcagaggttacctggccagaaaggcctttgccaagaagcagcagcaactaagtgccttaaaggtcttgcagcggaactgtgccgcgtacctgaaattacggcactggcagtggtggcgagtcttcacaaaggtgaagccgcttctacaagtgactcgccaggaggaagaacttcaggccaaagatgaagagctgttgaaggtgaaggagaagcagacgaaggtggaaggagagctggaggagatggagcggaagcaccagcagcttttagaagagaagaatatccttgcagaacaactacaagcagagactgagctctttgctgaagcagaagagatgagggcaagacttgctgctaaaaagcaggaattagaagagattctacatgacttggagtctagggttgaagaagaagaagaaagaaaccaaatcctccaaaatgaaaagaaaaaaatgcaagcacatattcaggacctggaagaacagctagacgaggaggaaggggctcggcaaaagctgcagctggaaaaggtgacagcagaggccaagatcaagaagatggaagaggagattctgcttctcgaggaccaaaattccaagttcatcaaagaaaagaaactcatggaagatcgcattgctgagtgttcctctcagctggctgaagaggaagaaaaggcgaaaaacttggccaaaatcaggaataagcaagaagtgatgatctcagatttagaagaacgcttaaagaaggaagaaaagactcgtcaggaactggaaaaggccaaaagaaaactcgacggggagacgaccgacctgcaggaccagatcgcagagctgcaggcgcagattgatgagctcaagctgcagctggccaagaaggaggaggagctgcagggcgcactggccagaggtgatgatgaaacactccataagaacaatgcccttaaagttgtgcgagagctacaagcccaaattgctgaacttcaggaagactttgaatccgagaaggcttcacggaacaaggccgaaaagcagaaaagggacttgagtgaggaactggaagctctgaaaacagagctggaggacacgctggacaccacggcagcccagcaggaactacgtacaaaacgtgaacaagaagtggcagagctgaagaaagctcttgaggaggaaactaagaaccatgaagctcaaatccaggacatgagacaaagacacgcaacagccctggaggagctctcagagcagctggaacaggccaagcggttcaaagcaaatctagagaagaacaagcagggcctggagacagataacaaggagctggcgtgtgaggtgaaggtcctgcagcaggtcaaggctgagtctgagcacaagaggaagaagctcgacgcgcaggtccaggagctccatgccaaggtctctgaaggcgacaggctcagggtggagctggcggagaaagcaagtaagctgcagaatgagctagataatgtctccacccttctggaagaagcagagaagaagggtattaaatttgctaaggatgcagctagtcttgagtctcaactacaggatacacaggagcttcttcaggaggagacacgccagaaactaaacctgagcagtcggatccggcagctggaagaggagaagaacagtcttcaggagcagcaggaggaggaggaggaggccaggaagaacctggagaagcaagtgctggccctgcagtcccagttggctgataccaagaagaaagtagatgacgacctgggaacaattgaaagtctggaagaagccaagaagaagcttctgaaggacgcggaggccctgagccagcgcctggaggagaaggcactggcgtatgacaaactggagaagaccaagaaccgcctgcagcaggagctggacgacctcacggtggacctggaccaccagcgccaggtcgcctccaacttggagaagaagcagaagaagtttgaccagctgttagcagaagagaagagcatctctgctcgctatgccgaagagcgggaccgggccgaagccgaggccagagagaaagaaaccaaagccctgtcactggcccgggccctcgaggaagccctggaggccaaggaggagtttgagaggcagaacaagcagctccgagcagacatggaagacctcatgagctccaaagatgatgtgggaaaaaacgttcacgaacttgaaaaatccaaacgggccctagagcagcaggtggaggaaatgaggacccagctggaggagctggaagacgaactccaggccacggaagatgccaagcttcgtctggaggtcaacatgcaggccatgaaggcgcagttcgagagagacctgcaaaccagggatgagcagaatgaagagaagaagcggctgctgatcaaacaggtgcgggagctcgaggcggagctggaggatgagaggaaacagcgggcgcttgctgtagcttcaaagaaaaagatggagatagacctgaaggacctcgaagcccaaatcgaggctgcgaacaaagctcgggatgaggtgattaagcagctccgcaagctccaggctcagatgaaggattaccaacgtgaattagaagaagctcgtgcatccagagatgagatttttgctcaatccaaagagagtgaaaagaaattgaagagtctggaagcagaaatccttcaattgcaggaggaacttgcctcatctgagcgagcccgccgacacgccgagcaggagagagatgagctggcggacgagatcaccaacagcgcctctggcaagtccgcgctgctggatgagaagcggcgtctggaagctcggatcgcacagctggaggaggagctggaagaggagcagagcaacatggagctgctcaacgaccgcttccgcaagaccactctacaggtggacacactgaacgccgagctagcagccgagcgcagcgccgcccagaagagtgacaatgcacgccagcaactggagcggcagaacaaggagctgaaggccaagctgcaggaactcgagggtgctgtcaagtctaagttcaaggccaccatctcagccctggaggccaagattgggcagctggaggagcagcttgagcaggaagccaaggaacgagcagccgccaacaaattagtccgtcgcactgagaagaagctgaaagaaatcttcatgcaggttgaggatgagcgtcgacacgcggaccagtataaagagcagatggagaaggccaacgctcggatgaagcagcttaaacgccagctggaggaagcagaagaagaagcgacgcgtgccaacgcatctcggcgtaaactccagcgggaactggatgatgccaccgaggccaacgagggcctgagccgcgaggtcagcaccctgaagaaccggctgaggcggggtggccccatcagcttctcttccagccgatctggccggcgccagctgcaccttgaaggagcttccctggagctctccgacgatgacacagaaagtaagaccagtgatgtcaacgagacgcagccaccccagtcagagtaaagttgcaggaagccagaggaggcaatacagtgggacagttaggaatgcacccggggcctcctgcagatttcggaaattggcaagctacgggattccttcctgaaagatcaactgtgtcttaaggctctccagcctatgcatactgtatcctgcttcagacttaggtacaattgctcccctttttatatatagacacacacaggacacatatattaaacagattgtttcatcattgcatctattttccatatagtcatcaagagaccattttataaaacatggtaagaccctttttaaaacaaactccaggcccttggttgcgggtcgctgggttattggggcagcgccgtggtcgtcactcagtcgctctgcatgctctctgtcatacagacaggtaacctagttctgtgttcacgtggcccccgactcctcagccacatcaagtctcctagaccactgtggactctaaactgcacttgtctctctcatttccttcaaataatgatcaatgctatttcagtgagcaaactgtgaaaggggctttggaaagagtaggaggggtgggctggatcggaagcaacacccatttggggttaccatgtccatcccccaaggggggccctgcccctcgagtcgatggtgtcccgcatctactcatgtgaactggccttggcgagggctggtctgtgcatagaagggatagtggccacactgcagctgaggccccaggtggcagccatggatcatgtagacttccagatggtctcccgaaccgcctggctctgccggcgccctcctcacgtcaggagcaagcagccgtggacccctaagccgagctggtggaaggcccctccccatcgccagccgggccctcatgctgaccttgcaaattcagccgctgctttgagcccaaaatgggaatattggttttgtgtccgaggcttgttccaagtttgtcaatgaggtttatggagcctccagaacagatgccatcttcctgaatgttgacatgccagtgggtgtgactccttcatttttccttctcccttccctttggacagtgttacagtgaacacttagcatcctgtttttggttggtagttaagcaaactgacattacggaaagtgccttagacactacagtactaagacaatgttgaatatatcattcgcctctataacaatttaatgtattcagttttgactgtgcttcatatcatgtacctctctagtcaaagtggtattacagacattcagtgacaatgaatcagtgttaattctaaatccttgatcctctgcaatgtgcttgaaaacacaaaccttttgggttaaaagctttaacatctattaggaagaatttgtcctgtgggtttggaatcttggattttccccctttatgaactgtactggctgttgaccaccagacacctgaccgcaaatatcttttcttgtattcccatatttctagacaatgatttttgtaagacaataaatttattcattatagatatttgcgcctgctctgtttacttgaagaaaaaagcacccgtggagaataaagagacctcaataaacaagaataatcatgtgaacgtgg

SEQ ID NO: 156951 - DNA, 732 bp, Homo sapiens
  Payload ID: 10757
  Gene Symbol: MYH10
  Gene Name: myosin, heavy chain 10, non-muscle
  ENST ID: ENST00000411957
  CDS Start-End: 170-732
ctgaggcgctggatctgtggtcgcggctggggacgtgcgcccgcgccaccatcttcggctgaagtaactgagggcaaacccatcagacaaccagagccataatttgtggtcaccgctgaaatttaccttggaaactcgaggcaattgcttttggatcgttccatttacaatggcgcagagaactggactcgaggatccagagaggtatctctttgtggacagggctgtcatctacaaccctgccactcaagctgattggacagctaaaaagctagtgtggattccatcagaacgccatggttttgaggcagctagtatcaaagaagaacggggagatgaagttatggtggagttggcagagaatggaaagaaagcaatggtcaacaaagatgatattcagaagatgaacccacctaagttttccaaggtggaggatatggcagaattgacatgcttgaatgaagcttccgttttacataatctgaaggatcgctactattcaggactaatctatacttattctggactcttctgtgtagttataaacccttacaagaatcttccaatttactctgagaatattattgaaatgtacagagggaagaagcgtcatgagatgcctccacacatctatgctatatctgaatctgcttacagatgcatgcttcaagatcgtgaggaccagtcaattctttgcacgggtgagtcaggtgctgggaagacagaaaatac

SEQ ID NO: 156952 - DNA, 6029 bp, Homo sapiens
  Payload ID: 10758
  Gene Symbol: MYH11
  Gene Name: myosin, heavy chain 11, smooth muscle
  Uniprot ID: P35749
  ENST ID: ENST00000300036
  CDS Start-End: 111-6029
gcagggagatttggacgctccggcctgggaggtgcgtcagatccgagctcgccatccagtttcctctccactagtccccccagttggagatctgggaccaacaaggcaccatggcgcagaagggccaactcagtgacgatgagaagttcctctttgtggacaaaaacttcatcaacagcccagtggcccaggctgactgggccgccaagagactcgtctgggtcccctcggagaagcagggcttcgaggcagccagcattaaggaggagaagggggatgaggtggttgtggagctggtggagaatggcaagaaggtcacggttgggaaagatgacatccagaagatgaacccacccaagttctccaaggtggaggacatggcggagctgacgtgcctcaacgaagcctccgtgctacacaacctgagggagcggtacttctcagggctaatatatacgtactctggcctcttctgcgtggtggtcaacccctataaacacctgcccatctactcggagaagatcgtcgacatgtacaagggcaagaagaggcacgagatgccgcctcacatctacgccatcgcagacacggcctaccggagcatgcttcaagatcgggaggaccagtccattctatgcacaggcgagtctggagccgggaaaaccgaaaacaccaagaaggtcattcagtacctggccgtggtggcctcctcccacaagggcaagaaagacacaagtatcacgggagagctggaaaagcagcttctacaagcaaacccgattctggaggctttcggcaacgccaaaacagtgaagaacgacaactcctcacgattcggcaaattcatccgcatcaacttcgacgtcacgggttacatcgtgggagccaacattgagacctatctgctagaaaaatcacgggcaattcgccaagccagagacgagaggacattccacatcttttactacatgattgctggagccaaggagaagatgagaagtgacttgcttttggagggcttcaacaactacaccttcctctccaatggctttgtgcccatcccagcagcccaggatgatgagatgttccaggaaaccgtggaggccatggcaatcatgggtttcagcgaggaggagcagctatccatattgaaggtggtatcatcggtcctgcagcttggaaatatcgtcttcaagaaggaaagaaacacagaccaggcgtccatgccagataacacagctgctcagaaagtttgccacctcatgggaattaatgtgacagatttcaccagatccatcctcactcctcgtatcaaggttgggcgagatgtggtacagaaagctcagacaaaagaacaggctgactttgctgtagaggctttggccaaggcaacatatgagcgccttttccgctggatactcacccgcgtgaacaaagccctggacaagacccatcggcaaggggcttccttcctggggatcctggatatagctggatttgagatctttgaggtgaactccttcgagcagctgtgcatcaactacaccaacgagaagctgcagcagctcttcaaccacaccatgttcatcctggagcaggaggagtaccagcgcgagggcatcgagtggaacttcatcgactttgggctggacctacagccctgcatcgagctcatcgagcgaccgaacaaccctccaggtgtgctggccctgctggacgaggaatgctggttccccaaagccacggacaagtctttcgtggagaagctgtgcacggagcagggcagccaccccaagttccagaagcccaagcagctcaaggacaagactgagttctccatcatccattatgctgggaaggtggactataatgcgagtgcctggctgaccaagaatatggacccgctgaatgacaacgtgacttccctgctcaatgcctcctccgacaagtttgtggccgacctgtggaaggacgtggaccgcatcgtgggcctggaccagatggccaagatgacggagagctcgctgcccagcgcctccaagaccaagaagggcatgttccgcacagtggggcagctgtacaaggagcagctgggcaagctgatgaccacgctacgcaacaccacgcccaacttcgtgcgctgcatcatccccaaccacgagaagaggtccggcaagctggatgcgttcctggtgctggagcagctgcggtgcaatggggtgctggaaggcattcgcatctgccggcagggcttccccaaccggatcgtcttccaggagttccgccaacgctacgagatcctggcggcgaatgccatccccaaaggcttcatggacgggaagcaggcctgcattctcatgatcaaagccctggaacttgaccccaacttatacaggatagggcagagcaaaatcttcttccgaactggcgtcctggcccacctagaggaggagcgagatttgaagatcaccgatgtcatcatggccttccaggcgatgtgtcgtggctacttggccagaaaggcttttgccaagaggcagcagcagctgaccgccatgaaggtgattcagaggaactgcgccgcctacctcaagctgcggaactggcagtggtggaggcttttcaccaaagtgaagccactgctgcaggtgacacggcaggaggaggagatgcaggccaaggaggatgaactgcagaagaccaaggagcggcagcagaaggcagagaatgagcttaaggagctggaacagaagcactcgcagctgaccgaggagaagaacctgctacaggaacagctgcaggcagagacagagctgtatgcagaggctgaggagatgcgggtgcggctggcggccaagaagcaggagctggaggagatactgcatgagatggaggcccgcctggaggaggaggaagacaggggccagcagctacaggctgaaaggaagaagatggcccagcagatgctggaccttgaagaacagctggaggaggaggaagctgccaggcagaagctgcaacttgagaaggtcacggctgaggccaagatcaagaaactggaggatgagatcctggtcatggatgatcagaacaataaactatcaaaagaacgaaaactccttgaggagaggattagtgacttaacgacaaatcttgcagaagaggaagaaaaggccaagaatcttaccaagctgaaaaacaagcatgaatctatgatttcagaactggaagtgcggctaaagaaggaagagaagagccgacaggagctggagaagctgaaacggaagctggagggtgatgccagcgacttccacgagcagatcgctgacctccaggcgcagatcgcagagctcaagatgcagctggccaagaaggaggaggagctgcaggcggccctggccaggcttgacgatgaaatcgctcagaagaacaatgccctgaagaagatccgggagctggagggccacatctcagacctccaggaggacctggactcagagcgggccgccaggaacaaggctgaaaagcagaagcgagacctcggcgaggagctggaggccctaaagacagagctggaagacacactggacagcacagccactcagcaggagctcagggccaagagggagcaggaggtgacggtgctgaagaaggccctggatgaagagacgcggtcccatgaggctcaggtccaggagatgaggcagaaacacgcacaggcggtggaggagctcacagagcagcttgagcagttcaagagggccaaggcgaacctagacaagaataagcagacgctggagaaagagaacgcagacctggccggggagctgcgggtcctgggccaggccaagcaggaggtggaacataagaagaagaagctggaggcgcaggtgcaggagctgcagtccaagtgcagcgatggggagcgggcccgggcggagctcaatgacaaagtccacaagctgcagaatgaagttgagagcgtcacagggatgcttaacgaggccgaggggaaggccattaagctggccaaggacgtggcgtccctcagttcccagctccaggacacccaggagctgcttcaagaagaaacccggcagaagctcaacgtgtctacgaagctgcgccagctggaggaggagcggaacagcctgcaagaccagctggacgaggagatggaggccaagcagaacctggagcgccacatctccactctcaacatccagctctccgactcgaagaagaagctgcaggactttgccagcaccgtggaagctctggaagaggggaagaagaggttccagaaggagatcgagaacctcacccagcagtacgaggagaaggcggccgcttatgataaactggaaaagaccaagaacaggcttcagcaggagctggacgacctggttgttgatttggacaaccagcggcaactcgtgtccaacctggaaaagaagcagaggaaatttgatcagttgttagccgaggagaaaaacatctcttccaaatacgcggatgagagggacagagctgaggcagaagccagggagaaggaaaccaaggccctgtccctggctcgggcccttgaagaggccttggaagccaaagaggaactcgagcggaccaacaaaatgctcaaagccgaaatggaagacctggtcagctccaaggatgacgtgggcaagaacgtccatgagctggagaagtccaagcgggccctggagacccagatggaggagatgaagacgcagctggaagagctggaggacgagctgcaagccacggaggacgccaaactgcggctggaagtcaacatgcaggcgctcaagggccagttcgaaagggatctccaagcccgggacgagcagaatgaggagaagaggaggcaactgcagagacagcttcacgagtatgagacggaactggaagacgagcgaaagcaacgtgccctggcagctgcagcaaagaagaagctggaaggggacctgaaagacctggagcttcaggccgactctgccatcaaggggagggaggaagccatcaagcagctacgcaaactgcaggctcagatgaaggactttcaaagagagctggaagatgcccgtgcctccagagatgagatctttgccacagccaaagagaatgagaagaaagccaagagcttggaagcagacctcatgcagctacaagaggacctcgccgccgctgagagggctcgcaaacaagcggacctcgagaaggaggaactggcagaggagctggccagtagcctgtcgggaaggaacgcactccaggacgagaagcgccgcctggaggcccggatcgcccagctggaggaggagctggaggaggagcagggcaacatggaggccatgagcgaccgggtccgcaaagccacacagcaggccgagcagctcagcaacgagctggccacagagcgcagcacggcccagaagaatgagagtgcccggcagcagctcgagcggcagaacaaggagctccggagcaagctccacgagatggagggggccgtcaagtccaagttcaagtccaccatcgcggcgctggaggccaagattgcacagctggaggagcaggtcgagcaggaggccagagagaaacaggcggccaccaagtcgctgaagcagaaagacaagaagctgaaggaaatcttgctgcaggtggaggacgagcgcaagatggccgagcagtacaaggagcaggcagagaaaggcaatgccagggtcaagcagctcaagaggcagctggaggaggcagaggaggagtcccagcgcatcaacgccaaccgcaggaagctgcagcgggagctggatgaggccacggagagcaacgaggccatgggccgcgaggtgaacgcactcaagagcaagctcaggcgaggaaacgagacctctttcgttccttctagaaggtctggaggacgtagagttattgaaaatgcagatggttctgaggaggaaacggacactcgagacgcagacttcaatggaaccaaggccagtgaataa

SEQ ID NO: 156953 - DNA, 6847 bp, Homo sapiens
  Payload ID: 10758
  Gene Symbol: MYH11
  Gene Name: myosin, heavy chain 11, smooth muscle
  Uniprot ID: P35749
  ENST ID: ENST00000396324
  CDS Start-End: 89-6028
gcctgggaggtgcgtcagatccgagctcgccatccagtttcctctccactagtccccccagttggagatctgggaccaacaaggcaccatggcgcagaagggccaactcagtgacgatgagaagttcctctttgtggacaaaaacttcatcaacagcccagtggcccaggctgactgggccgccaagagactcgtctgggtcccctcggagaagcagggcttcgaggcagccagcattaaggaggagaagggggatgaggtggttgtggagctggtggagaatggcaagaaggtcacggttgggaaagatgacatccagaagatgaacccacccaagttctccaaggtggaggacatggcggagctgacgtgcctcaacgaagcctccgtgctacacaacctgagggagcggtacttctcagggctaatatatacgtactctggcctcttctgcgtggtggtcaacccctataaacacctgcccatctactcggagaagatcgtcgacatgtacaagggcaagaagaggcacgagatgccgcctcacatctacgccatcgcagacacggcctaccggagcatgcttcaagatcgggaggaccagtccattctatgcacaggcgagtctggagccgggaaaaccgaaaacaccaagaaggtcattcagtacctggccgtggtggcctcctcccacaagggcaagaaagacacaagtatcacgcaaggcccatcttttgcctacggagagctggaaaagcagcttctacaagcaaacccgattctggaggctttcggcaacgccaaaacagtgaagaacgacaactcctcacgattcggcaaattcatccgcatcaacttcgacgtcacgggttacatcgtgggagccaacattgagacctatctgctagaaaaatcacgggcaattcgccaagccagagacgagaggacattccacatcttttactacatgattgctggagccaaggagaagatgagaagtgacttgcttttggagggcttcaacaactacaccttcctctccaatggctttgtgcccatcccagcagcccaggatgatgagatgttccaggaaaccgtggaggccatggcaatcatgggtttcagcgaggaggagcagctatccatattgaaggtggtatcatcggtcctgcagcttggaaatatcgtcttcaagaaggaaagaaacacagaccaggcgtccatgccagataacacagctgctcagaaagtttgccacctcatgggaattaatgtgacagatttcaccagatccatcctcactcctcgtatcaaggttgggcgagatgtggtacagaaagctcagacaaaagaacaggctgactttgctgtagaggctttggccaaggcaacatatgagcgccttttccgctggatactcacccgcgtgaacaaagccctggacaagacccatcggcaaggggcttccttcctggggatcctggatatagctggatttgagatctttgaggtgaactccttcgagcagctgtgcatcaactacaccaacgagaagctgcagcagctcttcaaccacaccatgttcatcctggagcaggaggagtaccagcgcgagggcatcgagtggaacttcatcgactttgggctggacctacagccctgcatcgagctcatcgagcgaccgaacaaccctccaggtgtgctggccctgctggacgaggaatgctggttccccaaagccacggacaagtctttcgtggagaagctgtgcacggagcagggcagccaccccaagttccagaagcccaagcagctcaaggacaagactgagttctccatcatccattatgctgggaaggtggactataatgcgagtgcctggctgaccaagaatatggacccgctgaatgacaacgtgacttccctgctcaatgcctcctccgacaagtttgtggccgacctgtggaaggacgtggaccgcatcgtgggcctggaccagatggccaagatgacggagagctcgctgcccagcgcctccaagaccaagaagggcatgttccgcacagtggggcagctgtacaaggagcagctgggcaagctgatgaccacgctacgcaacaccacgcccaacttcgtgcgctgcatcatccccaaccacgagaagaggtccggcaagctggatgcgttcctggtgctggagcagctgcggtgcaatggggtgctggaaggcattcgcatctgccggcagggcttccccaaccggatcgtcttccaggagttccgccaacgctacgagatcctggcggcgaatgccatccccaaaggcttcatggacgggaagcaggcctgcattctcatgatcaaagccctggaacttgaccccaacttatacaggatagggcagagcaaaatcttcttccgaactggcgtcctggcccacctagaggaggagcgagatttgaagatcaccgatgtcatcatggccttccaggcgatgtgtcgtggctacttggccagaaaggcttttgccaagaggcagcagcagctgaccgccatgaaggtgattcagaggaactgcgccgcctacctcaagctgcggaactggcagtggtggaggcttttcaccaaagtgaagccactgctgcaggtgacacggcaggaggaggagatgcaggccaaggaggatgaactgcagaagaccaaggagcggcagcagaaggcagagaatgagcttaaggagctggaacagaagcactcgcagctgaccgaggagaagaacctgctacaggaacagctgcaggcagagacagagctgtatgcagaggctgaggagatgcgggtgcggctggcggccaagaagcaggagctggaggagatactgcatgagatggaggcccgcctggaggaggaggaagacaggggccagcagctacaggctgaaaggaagaagatggcccagcagatgctggaccttgaagaacagctggaggaggaggaagctgccaggcagaagctgcaacttgagaaggtcacggctgaggccaagatcaagaaactggaggatgagatcctggtcatggatgatcagaacaataaactatcaaaagaacgaaaactccttgaggagaggattagtgacttaacgacaaatcttgcagaagaggaagaaaaggccaagaatcttaccaagctgaaaaacaagcatgaatctatgatttcagaactggaagtgcggctaaagaaggaagagaagagccgacaggagctggagaagctgaaacggaagctggagggtgatgccagcgacttccacgagcagatcgctgacctccaggcgcagatcgcagagctcaagatgcagctggccaagaaggaggaggagctgcaggcggccctggccaggcttgacgatgaaatcgctcagaagaacaatgccctgaagaagatccgggagctggagggccacatctcagacctccaggaggacctggactcagagcgggccgccaggaacaaggctgaaaagcagaagcgagacctcggcgaggagctggaggccctaaagacagagctggaagacacactggacagcacagccactcagcaggagctcagggccaagagggagcaggaggtgacggtgctgaagaaggccctggatgaagagacgcggtcccatgaggctcaggtccaggagatgaggcagaaacacgcacaggcggtggaggagctcacagagcagcttgagcagttcaagagggccaaggcgaacctagacaagaataagcagacgctggagaaagagaacgcagacctggccggggagctgcgggtcctgggccaggccaagcaggaggtggaacataagaagaagaagctggaggcgcaggtgcaggagctgcagtccaagtgcagcgatggggagcgggcccgggcggagctcaatgacaaagtccacaagctgcagaatgaagttgagagcgtcacagggatgcttaacgaggccgaggggaaggccattaagctggccaaggacgtggcgtccctcagttcccagctccaggacacccaggagctgcttcaagaagaaacccggcagaagctcaacgtgtctacgaagctgcgccagctggaggaggagcggaacagcctgcaagaccagctggacgaggagatggaggccaagcagaacctggagcgccacatctccactctcaacatccagctctccgactcgaagaagaagctgcaggactttgccagcaccgtggaagctctggaagaggggaagaagaggttccagaaggagatcgagaacctcacccagcagtacgaggagaaggcggccgcttatgataaactggaaaagaccaagaacaggcttcagcaggagctggacgacctggttgttgatttggacaaccagcggcaactcgtgtccaacctggaaaagaagcagaggaaatttgatcagttgttagccgaggagaaaaacatctcttccaaatacgcggatgagagggacagagctgaggcagaagccagggagaaggaaaccaaggccctgtccctggctcgggcccttgaagaggccttggaagccaaagaggaactcgagcggaccaacaaaatgctcaaagccgaaatggaagacctggtcagctccaaggatgacgtgggcaagaacgtccatgagctggagaagtccaagcgggccctggagacccagatggaggagatgaagacgcagctggaagagctggaggacgagctgcaagccacggaggacgccaaactgcggctggaagtcaacatgcaggcgctcaagggccagttcgaaagggatctccaagcccgggacgagcagaatgaggagaagaggaggcaactgcagagacagcttcacgagtatgagacggaactggaagacgagcgaaagcaacgtgccctggcagctgcagcaaagaagaagctggaaggggacctgaaagacctggagcttcaggccgactctgccatcaaggggagggaggaagccatcaagcagctacgcaaactgcaggctcagatgaaggactttcaaagagagctggaagatgcccgtgcctccagagatgagatctttgccacagccaaagagaatgagaagaaagccaagagcttggaagcagacctcatgcagctacaagaggacctcgccgccgctgagagggctcgcaaacaagcggacctcgagaaggaggaactggcagaggagctggccagtagcctgtcgggaaggaacgcactccaggacgagaagcgccgcctggaggcccggatcgcccagctggaggaggagctggaggaggagcagggcaacatggaggccatgagcgaccgggtccgcaaagccacacagcaggccgagcagctcagcaacgagctggccacagagcgcagcacggcccagaagaatgagagtgcccggcagcagctcgagcggcagaacaaggagctccggagcaagctccacgagatggagggggccgtcaagtccaagttcaagtccaccatcgcggcgctggaggccaagattgcacagctggaggagcaggtcgagcaggaggccagagagaaacaggcggccaccaagtcgctgaagcagaaagacaagaagctgaaggaaatcttgctgcaggtggaggacgagcgcaagatggccgagcagtacaaggagcaggcagagaaaggcaatgccagggtcaagcagctcaagaggcagctggaggaggcagaggaggagtcccagcgcatcaacgccaaccgcaggaagctgcagcgggagctggatgaggccacggagagcaacgaggccatgggccgcgaggtgaacgcactcaagagcaagctcaggcgaggaaacgagacctctttcgttccttctagaaggtctggaggacgtagagttattgaaaatgcagatggttctgaggaggaaacggacactcgagacgcagacttcaatggaaccaaggccagtgaataagcaactttctacagttttgcaccacggcaagaaaaccaaaaaccaaaacaaacaaacaaaaaaaacccaacaacaacccagaacaaagcaaaacccagcagactgtacttagcattgtctaaatccattctcaaattccaaatatcacagacacccctcacacaaggaatataaaaaccaccaccctccagcctgggcaacgtagtaaaacctcatctatacaagaatttaaaaataagctgggcgtggtggtacacacctgtggtcccagctactagggaggctgagccaggaagaacgctccagcccaggacttcgaggctgcaatgagctataattgcatcattgcactccagcctgggcaacagagaccctgtctcaaccaccaccaccaccaccacccctactacccctgtattcaaggtaaaaattgaagtttgtatgatgtaagagatgagaaaaacccaacaggaaacacagacacatcctccagttctatcaatggattgtgcagacactgagtttttagaaaaacatatccacggtaaccggtccctggcaattctgtttacatgaaatggggagaaagtcaccgaaatgggtgccgccggcccccactcccaattcattccctaacctgcaaacctttccaacttctcacgtcaggcctttgagaattctttccccctctcctggtttccacacctcagacacgcacagttcaccaagtgccttctgtagtcacatgaattgaaaaggagacgctgctcccacggaggggagcaggaatgctgcactgtttacaccctgactgtgctt

SEQ ID NO: 156954 - DNA, 6886 bp, Homo sapiens
  Payload ID: 10758
  Gene Symbol: MYH11
  Gene Name: myosin, heavy chain 11, smooth muscle
  Uniprot ID: P35749
  ENST ID: ENST00000452625
  CDS Start-End: 89-5926
gcctgggaggtgcgtcagatccgagctcgccatccagtttcctctccactagtccccccagttggagatctgggaccaacaaggcaccatggcgcagaagggccaactcagtgacgatgagaagttcctctttgtggacaaaaacttcatcaacagcccagtggcccaggctgactgggccgccaagagactcgtctgggtcccctcggagaagcagggcttcgaggcagccagcattaaggaggagaagggggatgaggtggttgtggagctggtggagaatggcaagaaggtcacggttgggaaagatgacatccagaagatgaacccacccaagttctccaaggtggaggacatggcggagctgacgtgcctcaacgaagcctccgtgctacacaacctgagggagcggtacttctcagggctaatatatacgtactctggcctcttctgcgtggtggtcaacccctataaacacctgcccatctactcggagaagatcgtcgacatgtacaagggcaagaagaggcacgagatgccgcctcacatctacgccatcgcagacacggcctaccggagcatgcttcaagatcgggaggaccagtccattctatgcacaggcgagtctggagccgggaaaaccgaaaacaccaagaaggtcattcagtacctggccgtggtggcctcctcccacaagggcaagaaagacacaagtatcacgcaaggcccatcttttgcctacggagagctggaaaagcagcttctacaagcaaacccgattctggaggctttcggcaacgccaaaacagtgaagaacgacaactcctcacgattcggcaaattcatccgcatcaacttcgacgtcacgggttacatcgtgggagccaacattgagacctatctgctagaaaaatcacgggcaattcgccaagccagagacgagaggacattccacatcttttactacatgattgctggagccaaggagaagatgagaagtgacttgcttttggagggcttcaacaactacaccttcctctccaatggctttgtgcccatcccagcagcccaggatgatgagatgttccaggaaaccgtggaggccatggcaatcatgggtttcagcgaggaggagcagctatccatattgaaggtggtatcatcggtcctgcagcttggaaatatcgtcttcaagaaggaaagaaacacagaccaggcgtccatgccagataacacagctgctcagaaagtttgccacctcatgggaattaatgtgacagatttcaccagatccatcctcactcctcgtatcaaggttgggcgagatgtggtacagaaagctcagacaaaagaacaggctgactttgctgtagaggctttggccaaggcaacatatgagcgccttttccgctggatactcacccgcgtgaacaaagccctggacaagacccatcggcaaggggcttccttcctggggatcctggatatagctggatttgagatctttgaggtgaactccttcgagcagctgtgcatcaactacaccaacgagaagctgcagcagctcttcaaccacaccatgttcatcctggagcaggaggagtaccagcgcgagggcatcgagtggaacttcatcgactttgggctggacctacagccctgcatcgagctcatcgagcgaccgaacaaccctccaggtgtgctggccctgctggacgaggaatgctggttccccaaagccacggacaagtctttcgtggagaagctgtgcacggagcagggcagccaccccaagttccagaagcccaagcagctcaaggacaagactgagttctccatcatccattatgctgggaaggtggactataatgcgagtgcctggctgaccaagaatatggacccgctgaatgacaacgtgacttccctgctcaatgcctcctccgacaagtttgtggccgacctgtggaaggacgtggaccgcatcgtgggcctggaccagatggccaagatgacggagagctcgctgcccagcgcctccaagaccaagaagggcatgttccgcacagtggggcagctgtacaaggagcagctgggcaagctgatgaccacgctacgcaacaccacgcccaacttcgtgcgctgcatcatccccaaccacgagaagaggtccggcaagctggatgcgttcctggtgctggagcagctgcggtgcaatggggtgctggaaggcattcgcatctgccggcagggcttccccaaccggatcgtcttccaggagttccgccaacgctacgagatcctggcggcgaatgccatccccaaaggcttcatggacgggaagcaggcctgcattctcatgatcaaagccctggaacttgaccccaacttatacaggatagggcagagcaaaatcttcttccgaactggcgtcctggcccacctagaggaggagcgagatttgaagatcaccgatgtcatcatggccttccaggcgatgtgtcgtggctacttggccagaaaggcttttgccaagaggcagcagcagctgaccgccatgaaggtgattcagaggaactgcgccgcctacctcaagctgcggaactggcagtggtggaggcttttcaccaaagtgaagccactgctgcaggtgacacggcaggaggaggagatgcaggccaaggaggatgaactgcagaagaccaaggagcggcagcagaaggcagagaatgagcttaaggagctggaacagaagcactcgcagctgaccgaggagaagaacctgctacaggaacagctgcaggcagagacagagctgtatgcagaggctgaggagatgcgggtgcggctggcggccaagaagcaggagctggaggagatactgcatgagatggaggcccgcctggaggaggaggaagacaggggccagcagctacaggctgaaaggaagaagatggcccagcagatgctggaccttgaagaacagctggaggaggaggaagctgccaggcagaagctgcaacttgagaaggtcacggctgaggccaagatcaagaaactggaggatgagatcctggtcatggatgatcagaacaataaactatcaaaagaacgaaaactccttgaggagaggattagtgacttaacgacaaatcttgcagaagaggaagaaaaggccaagaatcttaccaagctgaaaaacaagcatgaatctatgatttcagaactggaagtgcggctaaagaaggaagagaagagccgacaggagctggagaagctgaaacggaagctggagggtgatgccagcgacttccacgagcagatcgctgacctccaggcgcagatcgcagagctcaagatgcagctggccaagaaggaggaggagctgcaggcggccctggccaggcttgacgatgaaatcgctcagaagaacaatgccctgaagaagatccgggagctggagggccacatctcagacctccaggaggacctggactcagagcgggccgccaggaacaaggctgaaaagcagaagcgagacctcggcgaggagctggaggccctaaagacagagctggaagacacactggacagcacagccactcagcaggagctcagggccaagagggagcaggaggtgacggtgctgaagaaggccctggatgaagagacgcggtcccatgaggctcaggtccaggagatgaggcagaaacacgcacaggcggtggaggagctcacagagcagcttgagcagttcaagagggccaaggcgaacctagacaagaataagcagacgctggagaaagagaacgcagacctggccggggagctgcgggtcctgggccaggccaagcaggaggtggaacataagaagaagaagctggaggcgcaggtgcaggagctgcagtccaagtgcagcgatggggagcgggcccgggcggagctcaatgacaaagtccacaagctgcagaatgaagttgagagcgtcacagggatgcttaacgaggccgaggggaaggccattaagctggccaaggacgtggcgtccctcagttcccagctccaggacacccaggagctgcttcaagaagaaacccggcagaagctcaacgtgtctacgaagctgcgccagctggaggaggagcggaacagcctgcaagaccagctggacgaggagatggaggccaagcagaacctggagcgccacatctccactctcaacatccagctctccgactcgaagaagaagctgcaggactttgccagcaccgtggaagctctggaagaggggaagaagaggttccagaaggagatcgagaacctcacccagcagtacgaggagaaggcggccgcttatgataaactggaaaagaccaagaacaggcttcagcaggagctggacgacctggttgttgatttggacaaccagcggcaactcgtgtccaacctggaaaagaagcagaggaaatttgatcagttgttagccgaggagaaaaacatctcttccaaatacgcggatgagagggacagagctgaggcagaagccagggagaaggaaaccaaggccctgtccctggctcgggcccttgaagaggccttggaagccaaagaggaactcgagcggaccaacaaaatgctcaaagccgaaatggaagacctggtcagctccaaggatgacgtgggcaagaacgtccatgagctggagaagtccaagcgggccctggagacccagatggaggagatgaagacgcagctggaagagctggaggacgagctgcaagccacggaggacgccaaactgcggctggaagtcaacatgcaggcgctcaagggccagttcgaaagggatctccaagcccgggacgagcagaatgaggagaagaggaggcaactgcagagacagcttcacgagtatgagacggaactggaagacgagcgaaagcaacgtgccctggcagctgcagcaaagaagaagctggaaggggacctgaaagacctggagcttcaggccgactctgccatcaaggggagggaggaagccatcaagcagctacgcaaactgcaggctcagatgaaggactttcaaagagagctggaagatgcccgtgcctccagagatgagatctttgccacagccaaagagaatgagaagaaagccaagagcttggaagcagacctcatgcagctacaagaggacctcgccgccgctgagagggctcgcaaacaagcggacctcgagaaggaggaactggcagaggagctggccagtagcctgtcgggaaggaacgcactccaggacgagaagcgccgcctggaggcccggatcgcccagctggaggaggagctggaggaggagcagggcaacatggaggccatgagcgaccgggtccgcaaagccacacagcaggccgagcagctcagcaacgagctggccacagagcgcagcacggcccagaagaatgagagtgcccggcagcagctcgagcggcagaacaaggagctccggagcaagctccacgagatggagggggccgtcaagtccaagttcaagtccaccatcgcggcgctggaggccaagattgcacagctggaggagcaggtcgagcaggaggccagagagaaacaggcggccaccaagtcgctgaagcagaaagacaagaagctgaaggaaatcttgctgcaggtggaggacgagcgcaagatggccgagcagtacaaggagcaggcagagaaaggcaatgccagggtcaagcagctcaagaggcagctggaggaggcagaggaggagtcccagcgcatcaacgccaaccgcaggaagctgcagcgggagctggatgaggccacggagagcaacgaggccatgggccgcgaggtgaacgcactcaagagcaagctcagagggccccccccacaggaaacttcgcagtgatgcaccaggcgaggaaacgagacctctttcgttccttctagaaggtctggaggacgtagagttattgaaaatgcagatggttctgaggaggaaacggacactcgagacgcagacttcaatggaaccaaggccagtgaataagcaactttctacagttttgcaccacggcaagaaaaccaaaaaccaaaacaaacaaacaaaaaaaacccaacaacaacccagaacaaagcaaaacccagcagactgtacttagcattgtctaaatccattctcaaattccaaatatcacagacacccctcacacaaggaatataaaaaccaccaccctccagcctgggcaacgtagtaaaacctcatctatacaagaatttaaaaataagctgggcgtggtggtacacacctgtggtcccagctactagggaggctgagccaggaagaacgctccagcccaggacttcgaggctgcaatgagctataattgcatcattgcactccagcctgggcaacagagaccctgtctcaaccaccaccaccaccaccacccctactacccctgtattcaaggtaaaaattgaagtttgtatgatgtaagagatgagaaaaacccaacaggaaacacagacacatcctccagttctatcaatggattgtgcagacactgagtttttagaaaaacatatccacggtaaccggtccctggcaattctgtttacatgaaatggggagaaagtcaccgaaatgggtgccgccggcccccactcccaattcattccctaacctgcaaacctttccaacttctcacgtcaggcctttgagaattctttccccctctcctggtttccacacctcagacacgcacagttcaccaagtgccttctgtagtcacatgaattgaaaaggagacgctgctcccacggaggggagcaggaatgctgcactgtttacaccctgactgtgctt

SEQ ID NO: 156955 - DNA, 6272 bp, Homo sapiens
  Payload ID: 10758
  Gene Symbol: MYH11
  Gene Name: myosin, heavy chain 11, smooth muscle
  Uniprot ID: P35749
  ENST ID: ENST00000576790
  CDS Start-End: 111-5927
gcagggagatttggacgctccggcctgggaggtgcgtcagatccgagctcgccatccagtttcctctccactagtccccccagttggagatctgggaccaacaaggcaccatggcgcagaagggccaactcagtgacgatgagaagttcctctttgtggacaaaaacttcatcaacagcccagtggcccaggctgactgggccgccaagagactcgtctgggtcccctcggagaagcagggcttcgaggcagccagcattaaggaggagaagggggatgaggtggttgtggagctggtggagaatggcaagaaggtcacggttgggaaagatgacatccagaagatgaacccacccaagttctccaaggtggaggacatggcggagctgacgtgcctcaacgaagcctccgtgctacacaacctgagggagcggtacttctcagggctaatatatacgtactctggcctcttctgcgtggtggtcaacccctataaacacctgcccatctactcggagaagatcgtcgacatgtacaagggcaagaagaggcacgagatgccgcctcacatctacgccatcgcagacacggcctaccggagcatgcttcaagatcgggaggaccagtccattctatgcacaggcgagtctggagccgggaaaaccgaaaacaccaagaaggtcattcagtacctggccgtggtggcctcctcccacaagggcaagaaagacacaagtatcacgggagagctggaaaagcagcttctacaagcaaacccgattctggaggctttcggcaacgccaaaacagtgaagaacgacaactcctcacgattcggcaaattcatccgcatcaacttcgacgtcacgggttacatcgtgggagccaacattgagacctatctgctagaaaaatcacgggcaattcgccaagccagagacgagaggacattccacatcttttactacatgattgctggagccaaggagaagatgagaagtgacttgcttttggagggcttcaacaactacaccttcctctccaatggctttgtgcccatcccagcagcccaggatgatgagatgttccaggaaaccgtggaggccatggcaatcatgggtttcagcgaggaggagcagctatccatattgaaggtggtatcatcggtcctgcagcttggaaatatcgtcttcaagaaggaaagaaacacagaccaggcgtccatgccagataacacagctgctcagaaagtttgccacctcatgggaattaatgtgacagatttcaccagatccatcctcactcctcgtatcaaggttgggcgagatgtggtacagaaagctcagacaaaagaacaggctgactttgctgtagaggctttggccaaggcaacatatgagcgccttttccgctggatactcacccgcgtgaacaaagccctggacaagacccatcggcaaggggcttccttcctggggatcctggatatagctggatttgagatctttgaggtgaactccttcgagcagctgtgcatcaactacaccaacgagaagctgcagcagctcttcaaccacaccatgttcatcctggagcaggaggagtaccagcgcgagggcatcgagtggaacttcatcgactttgggctggacctacagccctgcatcgagctcatcgagcgaccgaacaaccctccaggtgtgctggccctgctggacgaggaatgctggttccccaaagccacggacaagtctttcgtggagaagctgtgcacggagcagggcagccaccccaagttccagaagcccaagcagctcaaggacaagactgagttctccatcatccattatgctgggaaggtggactataatgcgagtgcctggctgaccaagaatatggacccgctgaatgacaacgtgacttccctgctcaatgcctcctccgacaagtttgtggccgacctgtggaaggacgtggaccgcatcgtgggcctggaccagatggccaagatgacggagagctcgctgcccagcgcctccaagaccaagaagggcatgttccgcacagtggggcagctgtacaaggagcagctgggcaagctgatgaccacgctacgcaacaccacgcccaacttcgtgcgctgcatcatccccaaccacgagaagaggtccggcaagctggatgcgttcctggtgctggagcagctgcggtgcaatggggtgctggaaggcattcgcatctgccggcagggcttccccaaccggatcgtcttccaggagttccgccaacgctacgagatcctggcggcgaatgccatccccaaaggcttcatggacgggaagcaggcctgcattctcatgatcaaagccctggaacttgaccccaacttatacaggatagggcagagcaaaatcttcttccgaactggcgtcctggcccacctagaggaggagcgagatttgaagatcaccgatgtcatcatggccttccaggcgatgtgtcgtggctacttggccagaaaggcttttgccaagaggcagcagcagctgaccgccatgaaggtgattcagaggaactgcgccgcctacctcaagctgcggaactggcagtggtggaggcttttcaccaaagtgaagccactgctgcaggtgacacggcaggaggaggagatgcaggccaaggaggatgaactgcagaagaccaaggagcggcagcagaaggcagagaatgagcttaaggagctggaacagaagcactcgcagctgaccgaggagaagaacctgctacaggaacagctgcaggcagagacagagctgtatgcagaggctgaggagatgcgggtgcggctggcggccaagaagcaggagctggaggagatactgcatgagatggaggcccgcctggaggaggaggaagacaggggccagcagctacaggctgaaaggaagaagatggcccagcagatgctggaccttgaagaacagctggaggaggaggaagctgccaggcagaagctgcaacttgagaaggtcacggctgaggccaagatcaagaaactggaggatgagatcctggtcatggatgatcagaacaataaactatcaaaagaacgaaaactccttgaggagaggattagtgacttaacgacaaatcttgcagaagaggaagaaaaggccaagaatcttaccaagctgaaaaacaagcatgaatctatgatttcagaactggaagtgcggctaaagaaggaagagaagagccgacaggagctggagaagctgaaacggaagctggagggtgatgccagcgacttccacgagcagatcgctgacctccaggcgcagatcgcagagctcaagatgcagctggccaagaaggaggaggagctgcaggcggccctggccaggcttgacgatgaaatcgctcagaagaacaatgccctgaagaagatccgggagctggagggccacatctcagacctccaggaggacctggactcagagcgggccgccaggaacaaggctgaaaagcagaagcgagacctcggcgaggagctggaggccctaaagacagagctggaagacacactggacagcacagccactcagcaggagctcagggccaagagggagcaggaggtgacggtgctgaagaaggccctggatgaagagacgcggtcccatgaggctcaggtccaggagatgaggcagaaacacgcacaggcggtggaggagctcacagagcagcttgagcagttcaagagggccaaggcgaacctagacaagaataagcagacgctggagaaagagaacgcagacctggccggggagctgcgggtcctgggccaggccaagcaggaggtggaacataagaagaagaagctggaggcgcaggtgcaggagctgcagtccaagtgcagcgatggggagcgggcccgggcggagctcaatgacaaagtccacaagctgcagaatgaagttgagagcgtcacagggatgcttaacgaggccgaggggaaggccattaagctggccaaggacgtggcgtccctcagttcccagctccaggacacccaggagctgcttcaagaagaaacccggcagaagctcaacgtgtctacgaagctgcgccagctggaggaggagcggaacagcctgcaagaccagctggacgaggagatggaggccaagcagaacctggagcgccacatctccactctcaacatccagctctccgactcgaagaagaagctgcaggactttgccagcaccgtggaagctctggaagaggggaagaagaggttccagaaggagatcgagaacctcacccagcagtacgaggagaaggcggccgcttatgataaactggaaaagaccaagaacaggcttcagcaggagctggacgacctggttgttgatttggacaaccagcggcaactcgtgtccaacctggaaaagaagcagaggaaatttgatcagttgttagccgaggagaaaaacatctcttccaaatacgcggatgagagggacagagctgaggcagaagccagggagaaggaaaccaaggccctgtccctggctcgggcccttgaagaggccttggaagccaaagaggaactcgagcggaccaacaaaatgctcaaagccgaaatggaagacctggtcagctccaaggatgacgtgggcaagaacgtccatgagctggagaagtccaagcgggccctggagacccagatggaggagatgaagacgcagctggaagagctggaggacgagctgcaagccacggaggacgccaaactgcggctggaagtcaacatgcaggcgctcaagggccagttcgaaagggatctccaagcccgggacgagcagaatgaggagaagaggaggcaactgcagagacagcttcacgagtatgagacggaactggaagacgagcgaaagcaacgtgccctggcagctgcagcaaagaagaagctggaaggggacctgaaagacctggagcttcaggccgactctgccatcaaggggagggaggaagccatcaagcagctacgcaaactgcaggctcagatgaaggactttcaaagagagctggaagatgcccgtgcctccagagatgagatctttgccacagccaaagagaatgagaagaaagccaagagcttggaagcagacctcatgcagctacaagaggacctcgccgccgctgagagggctcgcaaacaagcggacctcgagaaggaggaactggcagaggagctggccagtagcctgtcgggaaggaacgcactccaggacgagaagcgccgcctggaggcccggatcgcccagctggaggaggagctggaggaggagcagggcaacatggaggccatgagcgaccgggtccgcaaagccacacagcaggccgagcagctcagcaacgagctggccacagagcgcagcacggcccagaagaatgagagtgcccggcagcagctcgagcggcagaacaaggagctccggagcaagctccacgagatggagggggccgtcaagtccaagttcaagtccaccatcgcggcgctggaggccaagattgcacagctggaggagcaggtcgagcaggaggccagagagaaacaggcggccaccaagtcgctgaagcagaaagacaagaagctgaaggaaatcttgctgcaggtggaggacgagcgcaagatggccgagcagtacaaggagcaggcagagaaaggcaatgccagggtcaagcagctcaagaggcagctggaggaggcagaggaggagtcccagcgcatcaacgccaaccgcaggaagctgcagcgggagctggatgaggccacggagagcaacgaggccatgggccgcgaggtgaacgcactcaagagcaagctcagagggccccccccacaggaaacttcgcagtgatgcaccaggcgaggaaacgagacctctttcgttccttctagaaggtctggaggacgtagagttattgaaaatgcagatggttctgaggaggaaacggacactcgagacgcagacttcaatggaaccaaggccagtgaataagcaactttctacagttttgcaccacggcaagaaaaccaaaaaccaaaacaaacaaacaaaaaaaacccaacaacaacccagaacaaagcaaaacccagcagactgtacttagcattgtctaaatccattctcaaattccaaatatcacagacacccctcacacaaggaatataaaaaccaccaccctccagcctgggcaacgta

SEQ ID NO: 156956 - DNA, 6886 bp, Homo sapiens; identical to SEQ ID NO: 156954
  Payload ID: 10758
  Gene Symbol: MYH11
  Gene Name: myosin, heavy chain 11, smooth muscle
  Uniprot ID: P35749
  ENST ID: ENST00000612165
  CDS Start-End: 89-5926

SEQ ID NO: 156957 - DNA, 6847 bp, Homo sapiens; identical to SEQ ID NO: 156953
  Payload ID: 10758
  Gene Symbol: MYH11
  Gene Name: myosin, heavy chain 11, smooth muscle
  Uniprot ID: P35749
  ENST ID: ENST00000621545
  CDS Start-End: 89-6028

SEQ ID NO: 156958 - DNA, 6272 bp, Homo sapiens; identical to SEQ ID NO: 156955
  Payload ID: 10758
  Gene Symbol: MYH11
  Gene Name: myosin, heavy chain 11, smooth muscle
  Uniprot ID: P35749
  ENST ID: ENST00000616422
  CDS Start-End: 111-5927

SEQ ID NO: 156959 - DNA, 6941 bp, Homo sapiens
  Payload ID: 10758
  Gene Symbol: MYH11
  Gene Name: myosin, heavy chain 11, smooth muscle
  ENST ID: ENST00000618564
  CDS Start-End: 108-6197
gggagatttggacgctccggcctgggaggtgcgtcagatccgagctcgccatccagtttcctctccactagtccccccagttggagatctgggaccaacaaggcaccatggcgcagaagggccaactcagtgacgatgagaagttcctctttgtggacaaaaacttcatcaacagcccagtggcccaggctgactgggccgccaagagactcgtctgggtcccctcggagaagcagggcttcgaggcagccagcattaaggaggagaagggggatgaggtggttgtggagctggtggagaatggcaagaaggtcacggttgggaaagatgacatccagaagatgaacccacccaagttctccaaggtggaggacatggcggagctgacgtgcctcaacgaagcctccgtgctacacaacctgagggagcggtacttctcagggctaatatatacgtactctggcctcttctgcgtggtggtcaacccctataaacacctgcccatctactcggagaagatcgtcgacatgtacaagggcaagaagaggcacgagatgccgcctcacatctacgccatcgcagacacggcctaccggagcatgcttcaagatcgggaggaccagtccattctatgcacaggcgagtctggagccgggaaaaccgaaaacaccaagaaggtcattcagtacctggccgtggtggcctcctcccacaagggcaagaaagacacaagtatcacggagggaccgtctttttggcgaggagagctggaaaagcagcttctacaagcaaacccgattctggaggctttcggcaacgccaaaacagtgaagaacgacaactcctcacgattcggcaaattcatccgcatcaacttcgacgtcacgggttacatcgtgggagccaacattgagacctatctgctagaaaaatcacgggcaattcgccaagccagagacgagaggacattccacatcttttactacatgattgctggagccaaggagaagatgagaagtgacttgcttttggagggcttcaacaactacaccttcctctccaatggctttgtgcccatcccagcagcccaggatgatgagatgttccaggaaaccgtggaggccatggcaatcatgggtttcagcgaggaggagcagctatccatattgaaggtggtatcatcggtcctgcagcttggaaatatcgtcttcaagaaggaaagaaacacagaccaggcgtccatgccagataacacagctgctcagaaagtttgccacctcatgggaattaatgtgacagatttcaccagatccatcctcactcctcgtatcaaggttgggcgagatgtggtacagaaagctcagacaaaagaacaggctgactttgctgtagaggctttggccaaggcaacatatgagcgccttttccgctggatactcacccgcgtgaacaaagccctggacaagacccatcggcaaggggcttccttcctggggatcctggatatagctggatttgagatctttgaggtgaactccttcgagcagctgtgcatcaactacaccaacgagaagctgcagcagctcttcaaccacaccatgttcatcctggagcaggaggagtaccagcgcgagggcatcgagtggaacttcatcgactttgggctggacctacagccctgcatcgagctcatcgagcgaccgaacaaccctccaggtgtgctggccctgctggacgaggaatgctggttccccaaagccacggacaagtctttcgtggagaagctgtgcacggagcagggcagccaccccaagttccagaagcccaagcagctcaaggacaagactgagttctccatcatccattatgctgggaaggtggactataatgcgagtgcctggctgaccaagaatatggacccgctgaatgacaacgtgacttccctgctcaatgcctcctccgacaagtttgtggccgacctgtggaaggacgtggaccgcatcgtgggcctggaccagatggccaagatgacggagagctcgctgcccagcgcctccaagaccaagaagggcatgttccgcacagtggggcagctgtacaaggagcagctgggcaagctgatgaccacgctacgcaacaccacgcccaacttcgtgcgctgcatcatccccaaccacgagaagaggtccggcaagctggatgcgttcctggtgctggagcagctgcggtgcaatggggtgctggaaggcattcgcatctgccggcagggcttccccaaccggatcgtcttccaggagttccgccaacgctacgagatcctggcggcgaatgccatccccaaaggcttcatggacgggaagcaggcctgcattctcatgatcaaagccctggaacttgaccccaacttatacaggatagggcagagcaaaatcttcttccgaactggcgtcctggcccacctagaggaggagcgagatttgaagatcaccgatgtcatcatggccttccaggcgatgtgtcgtggctacttggccagaaaggcttttgccaagaggcagcagcagctgaccgccatgaaggtgattcagaggaactgcgccgcctacctcaagctgcggaactggcagtggtggaggcttttcaccaaagtgaagccactgctgcaggtgacacggcaggaggaggagatgcaggccaaggaggatgaactgcagaagaccaaggagcggcagcagaaggcagagaatgagcttaaggagctggaacagaagcactcgcagctgaccgaggagaagaacctgctacaggaacagctgcaggcagagacagagctgtatgcagaggctgaggagatgcgggtgcggctggcggccaagaagcaggagctggaggagatactgcatgagatggaggcccgcctggaggaggaggaagacaggggccagcagctacaggctgaaaggaagaagatggcccagcagatgctggaccttgaagaacagctggaggaggaggaagctgccaggcagaagctgcaacttgagaaggtcacggctgaggccaagatcaagaaactggaggatgagatcctggtcatggatgatcagaacaataaactatcaaaagaacgaaaactccttgaggagaggattagtgacttaacgacaaatcttgcagaagaggaagaaaaggccaagaatcttaccaagctgaaaaacaagcatgaatctatgatttcagaactggaagtgcggctaaagaaggaagagaagagccgacaggagctggagaagctgaaacggaagctggagggtgatgccagcgacttccacgagcagatcgctgacctccaggcgcagatcgcagagctcaagatgcagctggccaagaaggaggaggagctgcaggcggccctggccaggcttgacgatgaaatcgctcagaagaacaatgccctgaagaagatccgggagctggagggccacatctcagacctccaggaggacctggactcagagcgggccgccaggaacaaggctgaaaagcagaagcgagacctcggcgaggagctggaggccctaaagacagagctggaagacacactggacagcacagccactcagcaggagctcagggccaagagggagcaggaggtgacggtgctgaagaaggccctggatgaagagacgcggtcccatgaggctcaggtccaggagatgaggcagaaacacgcacaggcggtggaggagctcacagagcagcttgagcagttcaagagggccaaggcgaacctagacaagaataagcagacgctggagaaagagaacgcagacctggccggggagctgcgggtcctgggccaggccaagcaggaggtggaacataagaagaagaagctggaggcgcaggtgcaggagctgcagtccaagtgcagcgatggggagcgggcccgggcggagctcaatgacaaagtccacaagctgcagaatgaagttgagagcgtcacagggatgcttaacgaggccgaggggaaggccattaagctggccaaggacgtggcgtccctcagttcccagctccaggacacccaggagctgcttcaagaagaaacccggcagaagctcaacgtgtctacgaagctgcgccagctggaggaggagcggaacagcctgcaagaccagctggacgaggagatggaggccaagcagaacctggagcgccacatctccactctcaacatccagctctccgactcgaagaagaagctgcaggactttgccagcaccgtggaagctctggaagaggggaagaagaggttccagaaggagatcgagaacctcacccagcagtacgaggagaaggcggccgcttatgataaactggaaaagaccaagaacaggcttcagcaggagctggacgacctggttgttgatttggacaaccagcggcaactcgtgtccaacctggaaaagaagcagaggaaatttgatcagttgttagccgaggagaaaaacatctcttccaaatacgcggatgagagggacagagctgaggcagaagccagggagaaggaaaccaaggccctgtccctggctcgggcccttgaagaggccttggaagccaaagaggaactcgagcggaccaacaaaatgctcaaagccgaaatggaagacctggtcagctccaaggatgacgtgggcaagaacgtccatgagctggagaagtccaagcgggccctggagacccagatggaggagatgaagacgcagctggaagagctggaggacgagctgcaagccacggaggacgccaaactgcggctggaagtcaacatgcaggcgctcaagggccagttcgaaagggatctccaagcccgggacgagcagaatgaggagaagaggaggcaactgcagagacagcttcacgagtatgagacggaactggaagacgagcgaaagcaacgtgccctggcagctgcagcaaagaagaagctggaaggggacctgaaagacctggagcttcaggccgactctgccatcaaggggagggaggaagccatcaagcagctacgcaaactgcaggctcagatgaaggactttcaaagagagctggaagatgcccgtgcctccagagatgagatctttgccacagccaaagagaatgagaagaaagccaagagcttggaagcagacctcatgcagctacaagaggacctcgccgccgctgagagggctcgcaaacaagcggacctcgagaaggaggaactggcagaggagctggccagtagcctgtcgggaaggaacgcactccaggacgagaagcgccgcctggaggcccggatcgcccagctggaggaggagctggaggaggagcagggcaacatggaggccatgagcgaccgggtccgcaaagccacacagcaggccgagcagctcagcaacgagctggccacagagcgcagcacggcccagaagaatgagagtgcccggcagcagctcgagcggcagaacaaggagctccggagcaagctccacgagatggagggggccgtcaagtccaagttcaagtccaccatcgcggcgctggaggccaagattgcacagctggaggagcaggtcgagcaggaggccagagagaaacaggcggccaccaagtcgctgaagcagaaagacaagaagctgaaggaaatcttgctgcaggtggaggacgagcgcaagatggccgagcagtacaaggagcaggcagagaaaggcaatgccagggtcaagcagctcaagaggcagctggaggaggcagaggaggagtcccagcgcatcaacgccaaccgcaggaagctgcagcgggagctggatgaggccacggagagcaacgaggccatgggccgcgaggtgaacgcactcaagagcaagctcagagggcccccccacaggaaacttcgcagtgatgcaccaggcgaggaaacgagacctctttcgttccttctagaaggtctggaggacgtagagttattgaaaatgcagatggttctgaggaggaaacggacactcgagacgcagacttcaatggaaccaaggccagtgaataagcaactttctacagttttgcaccacggcaagaaaaccaaaaaccaaaacaaacaaacaaaaaaaacccaacaacaacccagaacaaagcaaaacccagcagactgtacttagcattgtctaaatccattctcaaattccaaatatcacagacacccctcacacaaggaatataaaaaccaccaccctccagcctgggcaacgtagtaaaacctcatctatacaagaatttaaaaataagctgggcgtggtggtacacacctgtggtcccagctactagggaggctgagccaggaagaacgctccagcccaggacttcgaggctgcaatgagctataattgcatcattgcactccagcctgggcaacagagaccctgtctcaaccaccaccaccaccaccacccctactacccctgtattcaaggtaaaaattgaagtttgtatgatgtaagagatgagaaaaacccaacaggaaacacagacacatcctccagttctatcaatggattgtgcagacactgagtttttagaaaaacatatccacggtaaccggtccctggcaattctgtttacatgaaatggggagaaagtcaccgaaatgggtgccgccggcccccactcccaattcattccctaacctgcaaacctttccaacttctcacgtcaggcctttgagaattctttccccctctcctggtttccacacctcagacacgcacagttcaccaagtgccttctgtagtcacatgaattgaaaaggagacgctgctcccacggaggggagcaggaatgctgcactgtttacaccctgactgtgcttaaaaacactttcactaataaatggttataaatcacaa

SEQ ID NO: 156960 - DNA, 6941 bp, Homo sapiens; identical to SEQ ID NO: 156959
  Payload ID: 10758
  Gene Symbol: MYH11
  Gene Name: myosin, heavy chain 11, smooth muscle
  ENST ID: ENST00000616439
  CDS Start-End: 108-6197

SEQ ID NO: 156961 - DNA, 6029 bp, Homo sapiens; identical to SEQ ID NO: 156952
  Payload ID: 10758
  Gene Symbol: MYH11
  Gene Name: myosin, heavy chain 11, smooth muscle
  Uniprot ID: P35749
  ENST ID: ENST00000634050
  CDS Start-End: 111-6029

SEQ ID NO: 156962 - DNA, 5992 bp, Homo sapiens
  Payload ID: 10759
  Gene Symbol: MYH13
  Gene Name: myosin, heavy chain 13, skeletal muscle
  Uniprot ID: Q9UKX3
  ENST ID: ENST00000252172
  CDS Start-End: 91-5907
aaattgctgtgaccgcagcatctctaggaagacgctttattcctgaaggacactgactgtcacttgggaaccaagaagccctctgcagtcatgagctctgacgcagaaatggccatttttggagaagcagctccctacctccggaaaccagagaaggagagaatcgaggctcaaaatcgtccattcgattccaagaaagcctgctttgtagcggataataaggaaatgtatgtgaaaggcatgatccagactagggaaaatgacaaagtcatagtcaagaccctcgatgaccggatgctcactctgaacaatgaccaggtcttccccatgaaccctcccaaatttgacaagatcgaggacatggccatgatgactcacctgcatgaacctgctgttctgtacaacctcaaagagcgctatgcagcctggatgatctacacctactcaggcctcttctgtgtcaccgtcaacccctacaagtggctgccggtgtacaagcccgaggtggtggctgcctacagaggcaaaaagcgccaggaggccccgccccacatcttctccatctctgacaatgcctatcagttcatgctgactgatcgagacaaccagtctatcctcatcaccggagaatccggggctgggaagactgtgaacaccaagcgtgtcatccagtattttgcaacaattgcagttaccggggacaagaagaaggagacacagccaggcaaaatgcagggaaccctagaggatcagatcatccaggccaacccactgctggaggcctttggaaatgccaagactgtgaggaatgacaactcctcaagatttgggaagttcattcggattcattttggagccacaggaaagctggcatcggcagacatcgaaacttatctgttagaaaaatccagagtgacgtttcaattatccagtgagagaagctatcatattttctaccaaattatgtcaaacaagaagccagaactaattgacctgcttctgatctccaccaaccccttcgacttccccttcgtgagccaaggagaggtcacggtagccagtatcgatgacagtgaagaactgctggcgacagataatgccattgacatcctgggcttcagctcagaggagaaagtcgggatctacaaactgacgggagccgtgatgcattatgggaacatgaagttcaagcagaagcagcgtgaggagcaggcggagccagacggcaccgaagtggctgacaaagccggatacctgatgggactgaattctgcagaaatgctgaagggcctgtgctgtccaagggtgaaggttggcaatgaatatgtcactaaagggcaaaatgtccagcaggtgaccaattcggtgggtgctctggccaaagccgtctacgagaagatgttcctgtggatggtcacccgcatcaaccagcagctggacaccaagcagcccaggcagtacttcatcggggtcttggacattgctggctttgagatctttgatttcaacagcctggagcagctgtgcatcaacttcaccaatgagaaactgcaacagtttttcaaccaccacatgttcgtgctggagcaggaagagtacaagaaggaaggcatcgagtgggagttcattgacttcggaatggacctggctgcctgcatcgagctcatcgagaagcctatgggcatcttctccatcctggaagaggagtgcatgttccccaaggcaacagacacctccttcaagaacaagctgtatgaccagcatcttggaaaatccaacaacttccagaagcccaagcctgccaaaggcaaggctgaggctcacttctcgctggtgcactatgccggcaccgtggactacaacatcgccggctggctggacaaaaacaaggaccccctgaacgagactgtggtggggctgtaccagaagtcttcgctgaagcttctctccttccttttttccaactatgctggtgcagagacaggcgactccggaggaagcaagaagggcgggaagaagaagggctcctctttccagaccgtgtcggccgtgttcagggaaaatttaaacaaattgatgactaacttaaggagcacccaccctcactttgtacgatgtctgattcccaatgagaccaagactcctggtgtgatggaccactacttggtcatgcaccagctgcgctgtaacggggtcctcgagggcatccggatttgcaggaagggattccccagccggatcctctatgctgacttcaagcagcggtaccggatcctcaatgccagtgctatccctgaagggcagttcattgacagcaaaaatgcctcagagaagctcctcaactccatcgatgtggaccgggagcagttcaggttcggcaacaccaaggtgtttttcaaagctgggctcctgggacttttggaggagatgagagatgagaagctggtgacgctgatgacaagcacgcaggcggtgtgcagggggtacctgatgcgggtggagttcaagaagatgatggagaggagggactccatcttctgcatccagtacaacatccgctcttttatgaacgtcaagcactggccctggatgaacctgttcttcaaaatcaagcccctgctgaagagtgcagaggccgagaaggagatggccaccatgaaggaagactttgagaggaccaaggaagaactggcccgatctgaggctcgccggaaggagctggaggagaaaatggtctccctcctgcaggagaagaatgacctccaattgcaggtccagtctgaaacagaaaatctgatggacgctgaggaacggtgtgaaggactcatcaaaagcaagatcctactggaagcaaaagtcaaggagctgacggagagattggaagaggaagaggagatgaattctgaattggttgccaagaagaggaatctggaagataaatgctcctctctcaagagagacattgatgacctggagctgaccttgacgaaagttgaaaaggagaagcatgccacagagaacaaggtaaagaatctttccgaagaaatgacagcacttgaagaaaacatttccaaattgaccaaagaaaagaaatctctacaggaggcccatcagcaaacactggatgatcttcaggtggaagaagataaagtcaatggtctaatcaaaataaatgccaagcttgaacagcaaacagatgatcttgagggttccttagagcaggagaagaaactgcgggcggacttggaaagggcgaagaggaagctggaaggagatctgaaaatgtcccaggaatccattatggatctagaaaatgacaagcagcaaatagaagagaaattgaaaaagaaggagtttgaactcagtcagttacaagccaaaatagatgacgaacaagtccacagtttgcagtttcaaaagaagattaaagaactgcaagcccgcatagaagagctggaggaggaaattgaagcggaacacacgctcagagccaagattgagaagcagcgctcagatctggccagggaactggaggagatcagcgagaggctggaagaagccagtggggccacttcagcccagattgagatgaacaagaagagggaggctgagttccagaaaatgcgcagggacctggaggaggccaccctgcagcacgaagccacagcagccaccctgaggaagaagcaagcagatagtgtggccgagcttggggagcagattgacaacctgcagcgggtgaagcagaagctggagaaggagaagagcgagctgaagatggagattgacgacatggccagcaacatcgaggctctctccaagtcaaagagtaacatagaaagaacgtgccggacggtagaagatcaatttagtgaaatcaaagccaaggacgagcaacagacacagttgatccatgatctgaacatgcagaaagcaagactgcagacccaaaatggggagctgagccaccgagtggaagagaaggagtctctgatttcacagctgaccaaaagcaagcaggccctcacccagcagctggaggagcttaagaggcaaatggaagaagaaaccaaggccaagaacgccatggcgcacgccctgcagtcctcccgccacgactgtgacctgctgcgggaacagtatgaggaggagcaggaagccaaggccgagctgcagagggcgctgtccaaggccaacagtgaggttgcccagtggaggaccaaatacgagacggacgccattcagcgcacagaggagctggaggaggccaagaaaaaactggcccagaggctccaggaagcagaggagaacacggagacggcgaactccaagtgcgcatcgttggagaaaaccaagcagaggctgcagggagaggtggaggatctgatgcgggatctggagcgctcccacaccgcctgtgccacactggacaagaagcagaggaacttcgacaaggtccttgcagagtggaagcaaaagctggacgaaagccaggctgagttggaagctgctcagaaggagtccaggtcactcagcactgaactcttcaagatgaggaatgcctatgaggaggtggtggaccagttagagacactgaggcgagagaacaaaaatctgcaagaagagatttccgacttaactgagcagattgcagaaactggcaagaatcttcaggaagcggaaaagaccaagaagctagtggagcaggaaaagtcagatctgcaggtcgccttagaagaagtggagggttccttggaacacgaggagagcaagatcttgcgcgtgcagctagagctgagccaggtgaaatccgagctagaccgcaaggtcattgagaaggatgaagaaatcgagcagctaaaaagaaacagccagcgggcagcagaggccctgcagagcgtgctggatgctgaaatccgcagccggaacgacgccctgaggctaaagaagaagatggagggagaccttaatgagatggagattcagctgggccactccaaccgccagatggcagagacccagaagcatctgcgcacggtccagggccagctcaaggactcccagctgcatctcgatgacgccctgaggagcaatgaggacctcaaggagcagctggccatcgtggagcgcaggaatggcctcctgctggaggagctggaggaaatgaaggtggccctggaacagacggagcggacccgcaggctgtcagagcaggagctgctggacgccagcgaccgcgtgcagctcctgcactcccagaacacaagcctgataaataccaagaaaaaactggaggctgacatagctcagtgccaggcagaggtggagaactcgatccaggagtccaggaacgcagaggagaaggccaagaaggccatcacggatgctgccatgatggctgaggagctaaagaaggaacaggacaccagcgcccacctggagcggatgaagaagaacctggagcagacggtgaaggacctgcagcaccgtctagatgaggctgaacaactggcgctgaagggcgggaagaagcagatccagaaactggagaaccgggtgcgggagctggaaaatgagcttgatgtggaacagaagaggggagctgaagccctgaagggagcccacaagtacgaacgcaaagtcaaggagatgacttaccaggctgaggaggaccacaagaatatccttaggctccaggacctggtggacaagctgcaggccaaagtgaagtcttacaagaggcaggctgaggaggcggaggagcaggccaacacgcagctgtccagatgccggagagtccagcatgagctagaggaggccgcggagagggcggacatcgctgagtcccaggtcaacaagctgagggccaagagccgagacgtgggcagccagaagatggaagaatgaggctcacctgatgctcgttgccatgggacacctccgagagagtggagggaaaatgtgtgagaaataaattctcctaaatactcgg

SEQ ID NO: 156963 - DNA, 6296 bp, Homo sapiens
  Payload ID: 10759
  Gene Symbol: MYH13
  Gene Name: myosin, heavy chain 13, skeletal muscle
  Uniprot ID: Q9UKX3
  ENST ID: ENST00000418404
  CDS Start-End: 165-5981
gagagatcagggctacgacgcatttacatctaacaagtaaatggtgctcccccaaatatagccaagttagagtgctgggctggcagatttgggagtataaagagagctggggggtcacactcctgaaattgctgtgaccgcagcatctctagccctctgcagtcatgagctctgacgcagaaatggccatttttggagaagcagctccctacctccggaaaccagagaaggagagaatcgaggctcaaaatcgtccattcgattccaagaaagcctgctttgtagcggataataaggaaatgtatgtgaaaggcatgatccagactagggaaaatgacaaagtcatagtcaagaccctcgatgaccggatgctcactctgaacaatgaccaggtcttccccatgaaccctcccaaatttgacaagatcgaggacatggccatgatgactcacctgcatgaacctgctgttctgtacaacctcaaagagcgctatgcagcctggatgatctacacctactcaggcctcttctgtgtcaccgtcaacccctacaagtggctgccggtgtacaagcccgaggtggtggctgcctacagaggcaaaaagcgccaggaggccccgccccacatcttctccatctctgacaatgcctatcagttcatgctgactgatcgagacaaccagtctatcctcatcaccggagaatccggggctgggaagactgtgaacaccaagcgtgtcatccagtattttgcaacaattgcagttaccggggacaagaagaaggagacacagccaggcaaaatgcagggaaccctagaggatcagatcatccaggccaacccactgctggaggcctttggaaatgccaagactgtgaggaatgacaactcctcaagatttgggaagttcattcggattcattttggagccacaggaaagctggcatcggcagacatcgaaacttatctgttagaaaaatccagagtgacgtttcaattatccagtgagagaagctatcatattttctaccaaattatgtcaaacaagaagccagaactaattgacctgcttctgatctccaccaaccccttcgacttccccttcgtgagccaaggagaggtcacggtagccagtatcgatgacagtgaagaactgctggcgacagataatgccattgacatcctgggcttcagctcagaggagaaagtcgggatctacaaactgacgggagccgtgatgcattatgggaacatgaagttcaagcagaagcagcgtgaggagcaggcggagccagacggcaccgaagtggctgacaaagccggatacctgatgggactgaattctgcagaaatgctgaagggcctgtgctgtccaagggtgaaggttggcaatgaatatgtcactaaagggcaaaatgtccagcaggtgaccaattcggtgggtgctctggccaaagccgtctacgagaagatgttcctgtggatggtcacccgcatcaaccagcagctggacaccaagcagcccaggcagtacttcatcggggtcttggacattgctggctttgagatctttgatttcaacagcctggagcagctgtgcatcaacttcaccaatgagaaactgcaacagtttttcaaccaccacatgttcgtgctggagcaggaagagtacaagaaggaaggcatcgagtgggagttcattgacttcggaatggacctggctgcctgcatcgagctcatcgagaagcctatgggcatcttctccatcctggaagaggagtgcatgttccccaaggcaacagacacctccttcaagaacaagctgtatgaccagcatcttggaaaatccaacaacttccagaagcccaagcctgccaaaggcaaggctgaggctcacttctcgctggtgcactatgccggcaccgtggactacaacatcgccggctggctggacaaaaacaaggaccccctgaacgagactgtggtggggctgtaccagaagtcttcgctgaagcttctctccttccttttttccaactatgctggtgcagagacaggcgactccggaggaagcaagaagggcgggaagaagaagggctcctctttccagaccgtgtcggccgtgttcagggaaaatttaaacaaattgatgactaacttaaggagcacccaccctcactttgtacgatgtctgattcccaatgagaccaagactcctggtgtgatggaccactacttggtcatgcaccagctgcgctgtaacggggtcctcgagggcatccggatttgcaggaagggattccccagccggatcctctatgctgacttcaagcagcggtaccggatcctcaatgccagtgctatccctgaagggcagttcattgacagcaaaaatgcctcagagaagctcctcaactccatcgatgtggaccgggagcagttcaggttcggcaacaccaaggtgtttttcaaagctgggctcctgggacttttggaggagatgagagatgagaagctggtgacgctgatgacaagcacgcaggcggtgtgcagggggtacctgatgcgggtggagttcaagaagatgatggagaggagggactccatcttctgcatccagtacaacatccgctcttttatgaacgtcaagcactggccctggatgaacctgttcttcaaaatcaagcccctgctgaagagtgcagaggccgagaaggagatggccaccatgaaggaagactttgagaggaccaaggaagaactggcccgatctgaggctcgccggaaggagctggaggagaaaatggtctccctcctgcaggagaagaatgacctccaattgcaggtccagtctgaaacagaaaatctgatggacgctgaggaacggtgtgaaggactcatcaaaagcaagatcctactggaagcaaaagtcaaggagctgacggagagattggaagaggaagaggagatgaattctgaattggttgccaagaagaggaatctggaagataaatgctcctctctcaagagagacattgatgacctggagctgaccttgacgaaagttgaaaaggagaagcatgccacagagaacaaggtaaagaatctttccgaagaaatgacagcacttgaagaaaacatttccaaattgaccaaagaaaagaaatctctacaggaggcccatcagcaaacactggatgatcttcaggtggaagaagataaagtcaatggtctaatcaaaataaatgccaagcttgaacagcaaacagatgatcttgagggttccttagagcaggagaagaaactgcgggcggacttggaaagggcgaagaggaagctggaaggagatctgaaaatgtcccaggaatccattatggatctagaaaatgacaagcagcaaatagaagagaaattgaaaaagaaggagtttgaactcagtcagttacaagccaaaatagatgacgaacaagtccacagtttgcagtttcaaaagaagattaaagaactgcaagcccgcatagaagagctggaggaggaaattgaagcggaacacacgctcagagccaagattgagaagcagcgctcagatctggccagggaactggaggagatcagcgagaggctggaagaagccagtggggccacttcagcccagattgagatgaacaagaagagggaggctgagttccagaaaatgcgcagggacctggaggaggccaccctgcagcacgaagccacagcagccaccctgaggaagaagcaagcagatagtgtggccgagcttggggagcagattgacaacctgcagcgggtgaagcagaagctggagaaggagaagagcgagctgaagatggagattgacgacatggccagcaacatcgaggctctctccaagtcaaagagtaacatagaaagaacgtgccggacggtagaagatcaatttagtgaaatcaaagccaaggacgagcaacagacacagttgatccatgatctgaacatgcagaaagcaagactgcagacccaaaatggggagctgagccaccgagtggaagagaaggagtctctgatttcacagctgaccaaaagcaagcaggccctcacccagcagctggaggagcttaagaggcaaatggaagaagaaaccaaggccaagaacgccatggcgcacgccctgcagtcctcccgccacgactgtgacctgctgcgggaacagtatgaggaggagcaggaagccaaggccgagctgcagagggcgctgtccaaggccaacagtgaggttgcccagtggaggaccaaatacgagacggacgccattcagcgcacagaggagctggaggaggccaagaaaaaactggcccagaggctccaggaagcagaggagaacacggagacggcgaactccaagtgcgcatcgttggagaaaaccaagcagaggctgcagggagaggtggaggatctgatgcgggatctggagcgctcccacaccgcctgtgccacactggacaagaagcagaggaacttcgacaaggtccttgcagagtggaagcaaaagctggacgaaagccaggctgagttggaagctgctcagaaggagtccaggtcactcagcactgaactcttcaagatgaggaatgcctatgaggaggtggtggaccagttagagacactgaggcgagagaacaaaaatctgcaagaagagatttccgacttaactgagcagattgcagaaactggcaagaatcttcaggaagcggaaaagaccaagaagctagtggagcaggaaaagtcagatctgcaggtcgccttagaagaagtggagggttccttggaacacgaggagagcaagatcttgcgcgtgcagctagagctgagccaggtgaaatccgagctagaccgcaaggtcattgagaaggatgaagaaatcgagcagctaaaaagaaacagccagcgggcagcagaggccctgcagagcgtgctggatgctgaaatccgcagccggaacgacgccctgaggctaaagaagaagatggagggagaccttaatgagatggagattcagctgggccactccaaccgccagatggcagagacccagaagcatctgcgcacggtccagggccagctcaaggactcccagctgcatctcgatgacgccctgaggagcaatgaggacctcaaggagcagctggccatcgtggagcgcaggaatggcctcctgctggaggagctggaggaaatgaaggtggccctggaacagacggagcggacccgcaggctgtcagagcaggagctgctggacgccagcgaccgcgtgcagctcctgcactcccagaacacaagcctgataaataccaagaaaaaactggaggctgacatagctcagtgccaggcagaggtggagaactcgatccaggagtccaggaacgcagaggagaaggccaagaaggccatcacggatgctgccatgatggctgaggagctaaagaaggaacaggacaccagcgcccacctggagcggatgaagaagaacctggagcagacggtgaaggacctgcagcaccgtctagatgaggctgaacaactggcgctgaagggcgggaagaagcagatccagaaactggagaaccgggtgcgggagctggaaaatgagcttgatgtggaacagaagaggggagctgaagccctgaagggagcccacaagtacgaacgcaaagtcaaggagatgacttaccaggctgaggaggaccacaagaatatccttaggctccaggacctggtggacaagctgcaggccaaagtgaagtcttacaagaggcaggctgaggaggcggaggagcaggccaacacgcagctgtccagatgccggagagtccagcatgagctagaggaggccgcggagagggcggacatcgctgagtcccaggtcaacaagctgagggccaagagccgagacgtgggcagccagaagatggaagaatgaggctcacctgatgctcgttgccatgggacacctccgagagagtggagggaaaatgtgtgagaaataaattctcctaaatactcggattcccggctctgctgtgtttattatcatggtccattcctcttctatgaagctgatatttagattcttgctgctctatcgtaaatataaaataaggaatgtgaaagtggaggatctttgctccaagtagaaaacatggaaatccaacccatggccagattctccttttcatctcatcaccagcccaccccaaatgcctttgacacagtggggttggaaattgaggaggat

SEQ ID NO: 156964 - DNA, 5916 bp, Homo sapiens
  Payload ID: 10759
  Gene Symbol: MYH13
  Gene Name: myosin, heavy chain 13, skeletal muscle
  Uniprot ID: Q9UKX3
  ENST ID: ENST00000621918
  CDS Start-End: 15-5831
agccctctgcagtcatgagctctgacgcagaaatggccatttttggagaagcagctccctacctccggaaaccagagaaggagagaatcgaggctcaaaatcgtccattcgattccaagaaagcctgctttgtagcggataataaggaaatgtatgtgaaaggcatgatccagactagggaaaatgacaaagtcatagtcaagaccctcgatgaccggatgctcactctgaacaatgaccaggtcttccccatgaaccctcccaaatttgacaagatcgaggacatggccatgatgactcacctgcatgaacctgctgttctgtacaacctcaaagagcgctatgcagcctggatgatctacacctactcaggcctcttctgtgtcaccgtcaacccctacaagtggctgccggtgtacaagcccgaggtggtggctgcctacagaggcaaaaagcgccaggaggccccgccccacatcttctccatctctgacaatgcctatcagttcatgctgactgatcgagacaaccagtctatcctcatcaccggagaatccggggctgggaagactgtgaacaccaagcgtgtcatccagtattttgcaacaattgcagttaccggggacaagaagaaggagacacagccaggcaaaatgcagggaaccctagaggatcagatcatccaggccaacccactgctggaggcctttggaaatgccaagactgtgaggaatgacaactcctcaagatttgggaagttcattcggattcattttggagccacaggaaagctggcatcggcagacatcgaaacttatctgttagaaaaatccagagtgacgtttcaattatccagtgagagaagctatcatattttctaccaaattatgtcaaacaagaagccagaactaattgacctgcttctgatctccaccaaccccttcgacttccccttcgtgagccaaggagaggtcacggtagccagtatcgatgacagtgaagaactgctggcgacagataatgccattgacatcctgggcttcagctcagaggagaaagtcgggatctacaaactgacgggagccgtgatgcattatgggaacatgaagttcaagcagaagcagcgtgaggagcaggcggagccagacggcaccgaagtggctgacaaagccggatacctgatgggactgaattctgcagaaatgctgaagggcctgtgctgtccaagggtgaaggttggcaatgaatatgtcactaaagggcaaaatgtccagcaggtgaccaattcggtgggtgctctggccaaagccgtctacgagaagatgttcctgtggatggtcacccgcatcaaccagcagctggacaccaagcagcccaggcagtacttcatcggggtcttggacattgctggctttgagatctttgatttcaacagcctggagcagctgtgcatcaacttcaccaatgagaaactgcaacagtttttcaaccaccacatgttcgtgctggagcaggaagagtacaagaaggaaggcatcgagtgggagttcattgacttcggaatggacctggctgcctgcatcgagctcatcgagaagcctatgggcatcttctccatcctggaagaggagtgcatgttccccaaggcaacagacacctccttcaagaacaagctgtatgaccagcatcttggaaaatccaacaacttccagaagcccaagcctgccaaaggcaaggctgaggctcacttctcgctggtgcactatgccggcaccgtggactacaacatcgccggctggctggacaaaaacaaggaccccctgaacgagactgtggtggggctgtaccagaagtcttcgctgaagcttctctccttccttttttccaactatgctggtgcagagacaggcgactccggaggaagcaagaagggcgggaagaagaagggctcctctttccagaccgtgtcggccgtgttcagggaaaatttaaacaaattgatgactaacttaaggagcacccaccctcactttgtacgatgtctgattcccaatgagaccaagactcctggtgtgatggaccactacttggtcatgcaccagctgcgctgtaacggggtcctcgagggcatccggatttgcaggaagggattccccagccggatcctctatgctgacttcaagcagcggtaccggatcctcaatgccagtgctatccctgaagggcagttcattgacagcaaaaatgcctcagagaagctcctcaactccatcgatgtggaccgggagcagttcaggttcggcaacaccaaggtgtttttcaaagctgggctcctgggacttttggaggagatgagagatgagaagctggtgacgctgatgacaagcacgcaggcggtgtgcagggggtacctgatgcgggtggagttcaagaagatgatggagaggagggactccatcttctgcatccagtacaacatccgctcttttatgaacgtcaagcactggccctggatgaacctgttcttcaaaatcaagcccctgctgaagagtgcagaggccgagaaggagatggccaccatgaaggaagactttgagaggaccaaggaagaactggcccgatctgaggctcgccggaaggagctggaggagaaaatggtctccctcctgcaggagaagaatgacctccaattgcaggtccagtctgaaacagaaaatctgatggacgctgaggaacggtgtgaaggactcatcaaaagcaagatcctactggaagcaaaagtcaaggagctgacggagagattggaagaggaagaggagatgaattctgaattggttgccaagaagaggaatctggaagataaatgctcctctctcaagagagacattgatgacctggagctgaccttgacgaaagttgaaaaggagaagcatgccacagagaacaaggtaaagaatctttccgaagaaatgacagcacttgaagaaaacatttccaaattgaccaaagaaaagaaatctctacaggaggcccatcagcaaacactggatgatcttcaggtggaagaagataaagtcaatggtctaatcaaaataaatgccaagcttgaacagcaaacagatgatcttgagggttccttagagcaggagaagaaactgcgggcggacttggaaagggcgaagaggaagctggaaggagatctgaaaatgtcccaggaatccattatggatctagaaaatgacaagcagcaaatagaagagaaattgaaaaagaaggagtttgaactcagtcagttacaagccaaaatagatgacgaacaagtccacagtttgcagtttcaaaagaagattaaagaactgcaagcccgcatagaagagctggaggaggaaattgaagcggaacacacgctcagagccaagattgagaagcagcgctcagatctggccagggaactggaggagatcagcgagaggctggaagaagccagtggggccacttcagcccagattgagatgaacaagaagagggaggctgagttccagaaaatgcgcagggacctggaggaggccaccctgcagcacgaagccacagcagccaccctgaggaagaagcaagcagatagtgtggccgagcttggggagcagattgacaacctgcagcgggtgaagcagaagctggagaaggagaagagcgagctgaagatggagattgacgacatggccagcaacatcgaggctctctccaagtcaaagagtaacatagaaagaacgtgccggacggtagaagatcaatttagtgaaatcaaagccaaggacgagcaacagacacagttgatccatgatctgaacatgcagaaagcaagactgcagacccaaaatggggagctgagccaccgagtggaagagaaggagtctctgatttcacagctgaccaaaagcaagcaggccctcacccagcagctggaggagcttaagaggcaaatggaagaagaaaccaaggccaagaacgccatggcgcacgccctgcagtcctcccgccacgactgtgacctgctgcgggaacagtatgaggaggagcaggaagccaaggccgagctgcagagggcgctgtccaaggccaacagtgaggttgcccagtggaggaccaaatacgagacggacgccattcagcgcacagaggagctggaggaggccaagaaaaaactggcccagaggctccaggaagcagaggagaacacggagacggcgaactccaagtgcgcatcgttggagaaaaccaagcagaggctgcagggagaggtggaggatctgatgcgggatctggagcgctcccacaccgcctgtgccacactggacaagaagcagaggaacttcgacaaggtccttgcagagtggaagcaaaagctggacgaaagccaggctgagttggaagctgctcagaaggagtccaggtcactcagcactgaactcttcaagatgaggaatgcctatgaggaggtggtggaccagttagagacactgaggcgagagaacaaaaatctgcaagaagagatttccgacttaactgagcagattgcagaaactggcaagaatcttcaggaagcggaaaagaccaagaagctagtggagcaggaaaagtcagatctgcaggtcgccttagaagaagtggagggttccttggaacacgaggagagcaagatcttgcgcgtgcagctagagctgagccaggtgaaatccgagctagaccgcaaggtcattgagaaggatgaagaaatcgagcagctaaaaagaaacagccagcgggcagcagaggccctgcagagcgtgctggatgctgaaatccgcagccggaacgacgccctgaggctaaagaagaagatggagggagaccttaatgagatggagattcagctgggccactccaaccgccagatggcagagacccagaagcatctgcgcacggtccagggccagctcaaggactcccagctgcatctcgatgacgccctgaggagcaatgaggacctcaaggagcagctggccatcgtggagcgcaggaatggcctcctgctggaggagctggaggaaatgaaggtggccctggaacagacggagcggacccgcaggctgtcagagcaggagctgctggacgccagcgaccgcgtgcagctcctgcactcccagaacacaagcctgataaataccaagaaaaaactggaggctgacatagctcagtgccaggcagaggtggagaactcgatccaggagtccaggaacgcagaggagaaggccaagaaggccatcacggatgctgccatgatggctgaggagctaaagaaggaacaggacaccagcgcccacctggagcggatgaagaagaacctggagcagacggtgaaggacctgcagcaccgtctagatgaggctgaacaactggcgctgaagggcgggaagaagcagatccagaaactggagaaccgggtgcgggagctggaaaatgagcttgatgtggaacagaagaggggagctgaagccctgaagggagcccacaagtacgaacgcaaagtcaaggagatgacttaccaggctgaggaggaccacaagaatatccttaggctccaggacctggtggacaagctgcaggccaaagtgaagtcttacaagaggcaggctgaggaggcggaggagcaggccaacacgcagctgtccagatgccggagagtccagcatgagctagaggaggccgcggagagggcggacatcgctgagtcccaggtcaacaagctgagggccaagagccgagacgtgggcagccagaagatggaagaatgaggctcacctgatgctcgttgccatgggacacctccgagagagtggagggaaaatgtgtgagaaataaattctcctaaatactcgg

SEQ ID NO: 156965 - DNA, 3848 bp, Homo sapiens
  Payload ID: 10760
  Gene Symbol: MYH14
  Gene Name: myosin, heavy chain 14, non-muscle
  ENST ID: ENST00000262269
  CDS Start-End: 101-1627
gaggctgcagcagcacatacaggagctagaggcccaccttgaggctgaggagggtgcgcggcagaagctgcagctggagaaggtgacgacagaggcaaaaatgaagaaatttgaagaggacctgctgctcctggaagaccagaattccaagctgagcaaggagcggaagctgctggaagatcgtctggccgagttctcatcccaggcagctgaggaggaggagaaggtcaagagcctcaataagctacggctcaaatatgaggccacaatcgcagacatggaggaccgcctacggaaggaggagaagggtcgccaggagctggagaagctgaagcggaggctggatggggagagctcagagctgcaggagcagatggtggagcagcaacagcgggcagaggagctgcgggcccagctgggccggaaggaggaggagctgcaggctgccctggccagggcagaagacgagggtggggcccgggcccagctgctgaaatccctgcgggaggctcaagcagccctggccgaggcccaggaggacctggagtctgagcgtgtggccaggaccaaggcggagaagcagcgccgggacctgggcgaggagctggaggcgctgcggggcgagctggaggacacgctggactccaccaacgcacagcaggagctccggtccaagagggaacaggaggtgacggagctgaagaagactctggaggaggagactcgcatccacgaggcggcagtgcaggagctgaggcagcgccacggccaggccctgggggagctggcggagcagctggagcaggcccggaggggcaaaggtgcatgggagaagacccggctggccctggaggccgaggtgtccgagctgcgggcagaactgagcagcctgcagactgcacgtcaggagggtgagcagcggaggcgccgcctggagttacagctgcaggaggtgcagggccgggctggtgatggggagagggcacgagcggaggctgctgagaagctgcagcgagcccaggctgaactggagaatgtgtctggggcgctgaacgaggctgagtccaaaaccatccgtcttagcaaggagctgagcagcacagaagcccagctgcacgatgcccaggagctgctgcaggaggagaccagggcgaaattggccttggggtcccgggtgcgagccatggaggctgaggcagccgggctgcgtgagcagctggaggaggaggcagctgccagggaacgggcgggccgtgaactgcagactgcccaggcccagctttccgagtggcggcggcgccaggaggaggaggcaggggcactggaggcaggggaggaggcacggcgccgggcagcccgggaggccgaggccctgacccagcgcctggcagaaaagacagagaccgtggatcggctggagcggggccgccgccggctgcagcaggagctggacgacgccaccatggacctggagcagcagcggcagcttgtgagcaccctggagaagaagcagcgcaagtttgaccagcttctggcagaggagaaggcagctgtacttcgggcagtggaggaacgtgagcggccgaggcagagggccgggagcgtgaggctcgggccctgtcactgacacgggcactggaggaggagcaggaggcacgtgaggagctggagcggcagaaccgggccctgcgggctgagctggaggcactgctgagcagcaaggatgacgtcggcaagagcgtgcatgagctggaacgagcctgccgggtagcagaacaggcagccaatgatctgcgagcacaggtgacagaactggaggatgagctgacagcggccgaggatgccaagctgcgtctggaggtgactgtgcaggctctcaagactcagcatgagcgtgacctgcagggccgtgatgaggctggtgaagagaggcggaggcagctggccaagcagctgagagatgcagaggtggagcgggatgaggagcggaagcagcgcactctggccgtggctgcccgcaagaagctggagggagagctggaggagctgaaggctcagatggcctctgccggccagggcaaggaggaggcggtgaagcagcttcgcaagatgcaggcccagatgaaggagctatggcgggaggtggaggagacacgcacctcccgggaggagatcttctcccagaatcgggaaagtgaaaagcgcctcaagggcctggaggctgaggtgctgcggctgcaggaggaactggccgcctcggaccgtgctcggcggcaggcccagcaggaccgggatgagatggcagatgaggtggccaatggtaaccttagcaaggcagccattctggaggagaagcgtcagctggaggggcgcctggggcagttggaggaagagctggaggaggagcagagcaactcggagctgctcaatgaccgctaccgcaagctgctcctgcaggtagagtcactgaccacagagctgtcagctgagcgcagtttctcagccaaggcagagagcgggcggcagcagctggaacggcagatccaggagctacggggacgcctgggtgaggaggatgctggggcccgtgcccgccacaagatgaccattgctgcccttgagtctaagttggcccaggctgaggagcagctagagcaagagaccagagagcgcatcctctctggaaagctggtgcgcagagctgagaagcggcttaaagaggtggtgctccaggtggaggaggagcggagggtggctgaccagctccgggaccagctggagaagggaaaccttcgagtcaagcagctgaagcggcagctggaggaggccgaggaggaggcatcccgggctcaggccggccgccggaggctgcagcgtgagctggaagatgtcacagagtcggccgagtccatgaaccgtgaagtgaccacactgaggaaccggcttcgacgcggccccctcaccttcaccacccgcacggtgcgccaggtcttccgactagaggagggcgtggcatccgacgaggaggcagaggaagcacagcctgggtctgggccatccccggagcctgaggggtccccaccagcccacccccagtgaccctaccctgtccccagatgcactaacagatggggcccagcccccttcctccctggaccccacgggcccctgtcccaggaaccccgccctctgacttcttgccctttggaaatggtgcagcactctggcatttatcacccccacctgggtcccctgcaacctcccatcaaaggatgacccctaaacacagaggagcggggcaggcagggaggcaatgactggagctaccttgcttgttgggggactgggtacagttggcaagctgtgtttccatcagctccctgtcctcctttcttccctcgttattgatctatagacattaggaagggagtgagacggctcctccaccatcctcagccagtgcaacccattccctctgcttctctctctctctctctctctccctccctctccttccctaccctctcaccatctttcttggcctctctgagggtctctctgtgcatctttttaggaatctcgctctcactctctacgtagccactctccttcccccatttctgcgtccacccctgaactcctgagcgacagaagccccaggcctccaccagccttgaacccttgcaaaggggcaggacaaggggacccctctcactcctgctgctgcccatgctctgccctcccttctggttgctctgagggttcggagcttccctctgggactaaaggagtgtcctttaccctcccagcctccaggctctggcagaaataaactccaacccgactgg

SEQ ID NO: 156966 - DNA, 6787 bp, Homo sapiens
  Payload ID: 10760
  Gene Symbol: MYH14
  Gene Name: myosin, heavy chain 14, non-muscle
  Uniprot ID: Q7Z406
  ENST ID: ENST00000376970
  CDS Start-End: 48-6035
ctctttctccccaggccgaagcctcgggacggccctggaagccgaccatggcagccgtgaccatgtcggtgcccgggcggaaggcgccccccaggccgggcccagtgcccgaggcggcccagccgttcctgttcacgccccgcgggcccagcgcgggtggcgggcctggctcgggcacctccccgcaggtggagtggacggcccggcgtctcgtgtgggtgccttcggagcttcacgggttcgaggcggcggcgctgcgggacgaaggcgaggaggaggcggaggtggagctggcggagagcgggaggcggctgcgactgccgcgggaccagatccagcgcatgaacccgcccaagttcagcaaggccgaggacatggccgagctgacctgcctcaacgaggcctcggtcctgcacaacctccgggagcggtactactccggcctcatctacacgtactccggccttttctgtgtggtcatcaacccgtacaagcagcttcccatctacacagaagccattgtggagatgtaccggggcaagaagcgccacgaggtgccaccccacgtgtacgcagtgaccgagggggcctatcggagcatgctgcaggatcgtgaggaccagtccattctctgcactggagagtctggagctgggaagacggaaaacaccaagaaggtcatccagtacctcgcccacgtggcgtcgtctccaaagggcaggaaggagccgggtgtccccggtgagctggagcggcagctgcttcaggccaaccccatcctagaggcctttggcaatgccaagacagtgaagaatgacaactcctcccgattcggcaaattcatccgcatcaactttgatgttgccgggtacatcgtgggcgccaacattgagacctacctgctggagaagtcgcgggccatccgccaggccaaggacgagtgcagcttccacatcttctaccagctgctggggggcgctggagagcagctcaaagccgacctcctcctcgagccctgctcccactaccggttcctgaccaacgggccgtcatcctctcccggccaggagcgggaactcttccaggagacgctggagtcgctgcgggtcctgggattcagccacgaggaaatcatctccatgctgcggatggtctcagcagttctccagtttggcaacattgccttgaagagagaacggaacaccgatcaagccaccatgcctgacaacacagctgcacagaagctctgccgcctcttgggactgggggtgacggatttctcccgagccttgctcacccctcgcatcaaagttggccgagactatgtgcagaaagcccagactaaggaacaggctgacttcgcgctggaggccctggccaaggccacctacgagcgcctcttccgctggctggttctgcgcctcaaccgggccttggaccgcagcccccgccaaggcgcctccttcctgggcatcctggacatcgcgggctttgagatcttccagctgaactccttcgagcagctctgcatcaactacaccaacgagaagctgcagcagctcttcaaccacaccatgttcgtgctggagcaggaggagtaccagcgtgagggcatcccctggaccttcctcgactttggcctcgacctgcagccctgcatcgacctcatcgagcggccggccaacccccctggactcctggccctgctggatgaggagtgctggttcccgaaggccacagacaagtcgtttgtggagaaggtagcccaggagcagggcggccaccccaagttccagcggccgaggcacctgcgggatcaggccgacttcagtgttctccactacgcgggcaaggtcgactacaaggccaacgagtggctgatgaaaaacatggaccctctgaatgacaacgtcgcagccttgctccaccagagcacagaccggctgacggcagagatctggaaagacgtggagggcatcgtggggctggaacaggtgagcagcctgggcgacggcccaccaggtggccgcccccgtcggggtatgttccggacagtgggacagctctacaaggagtccctgagccgcctcatggccacactcagcaacaccaaccccagttttgtccgctgcattgtccccaaccacgagaagagggccgggaagctggagccacggctggtgctggaccagcttcgctgcaacggggtcctggagggcatccgcatctgtcgccagggcttccccaaccgcatcctcttccaggagttccggcagcgatacgagatcctgacacccaatgccatccccaagggcttcatggatgggaagcaggcctgtgaaaagatgatccaggcgctggaactggaccccaacctctaccgcgtgggacagagcaagatcttcttccgggctggggtcctggcccagctggaagaggagcgagacctgaaggtcaccgacatcatcgtctccttccaggcagctgcccggggatacctggctcgcagggccttccagaagcgccagcagcagcagagcgccctgagggtgatgcagcggaactgcgcggcctacctcaagctgagacactggcagtggtggcggctgtttaccaaggtgaagccactgctgcaggtgacgcggcaggatgaggtgctgcaggcacgggcccaggagctgcagaaagtgcaggagctacagcagcagagcgcccgcgaagttggggagctccagggccgagtggcacagctggaagaggagcgcgcccgcctggcagagcaattgcgagcagaggcagaactgtgtgcagaggccgaggagacgcgggggaggctggcagcccgcaagcaggagctggagctggtggtgtcagagctggaggctcgcgtgggcgaggaggaggagtgcagccgtcaaatgcaaaccgagaagaagaggctgcagcagcacatacaggagctagaggcccaccttgaggctgaggagggtgcgcggcagaagctgcagctggagaaggtgacgacagaggcaaaaatgaagaaatttgaagaggacctgctgctcctggaagaccagaattccaagctgagcaaggagcggaagctgctggaagatcgtctggccgagttctcatcccaggcagctgaggaggaggagaaggtcaagagcctcaataagctacggctcaaatatgaggccacaatcgcagacatggaggaccgcctacggaaggaggagaagggtcgccaggagctggagaagctgaagcggaggctggatggggagagctcagagctgcaggagcagatggtggagcagcaacagcgggcagaggagctgcgggcccagctgggccggaaggaggaggagctgcaggctgccctggccagggcagaagacgagggtggggcccgggcccagctgctgaaatccctgcgggaggctcaagcagccctggccgaggcccaggaggacctggagtctgagcgtgtggccaggaccaaggcggagaagcagcgccgggacctgggcgaggagctggaggcgctgcggggcgagctggaggacacgctggactccaccaacgcacagcaggagctccggtccaagagggaacaggaggtgacggagctgaagaagactctggaggaggagactcgcatccacgaggcggcagtgcaggagctgaggcagcgccacggccaggccctgggggagctggcggagcagctggagcaggcccggaggggcaaaggtgcatgggagaagacccggctggccctggaggccgaggtgtccgagctgcgggcagaactgagcagcctgcagactgcacgtcaggagggtgagcagcggaggcgccgcctggagttacagctgcaggaggtgcagggccgggctggtgatggggagagggcacgagcggaggctgctgagaagctgcagcgagcccaggctgaactggagaatgtgtctggggcgctgaacgaggctgagtccaaaaccatccgtcttagcaaggagctgagcagcacagaagcccagctgcacgatgcccaggagctgctgcaggaggagaccagggcgaaattggccttggggtcccgggtgcgagccatggaggctgaggcagccgggctgcgtgagcagctggaggaggaggcagctgccagggaacgggcgggccgtgaactgcagactgcccaggcccagctttccgagtggcggcggcgccaggaggaggaggcaggggcactggaggcaggggaggaggcacggcgccgggcagcccgggaggccgaggccctgacccagcgcctggcagaaaagacagagaccgtggatcggctggagcggggccgccgccggctgcagcaggagctggacgacgccaccatggacctggagcagcagcggcagcttgtgagcaccctggagaagaagcagcgcaagtttgaccagcttctggcagaggagaaggcagctgtacttcgggcagtggaggaacgtgagcgggccgaggcagagggccgggagcgtgaggctcgggccctgtcactgacacgggcactggaggaggagcaggaggcacgtgaggagctggagcggcagaaccgggccctgcgggctgagctggaggcactgctgagcagcaaggatgacgtcggcaagagcgtgcatgagctggaacgagcctgccgggtagcagaacaggcagccaatgatctgcgagcacaggtgacagaactggaggatgagctgacagcggccgaggatgccaagctgcgtctggaggtgactgtgcaggctctcaagactcagcatgagcgtgacctgcagggccgtgatgaggctggtgaagagaggcggaggcagctggccaagcagctgagagatgcagaggtggagcgggatgaggagcggaagcagcgcactctggccgtggctgcccgcaagaagctggagggagagctggaggagctgaaggctcagatggcctctgccggccagggcaaggaggaggcggtgaagcagcttcgcaagatgcaggcccagatgaaggagctatggcgggaggtggaggagacacgcacctcccgggaggagatcttctcccagaatcgggaaagtgaaaagcgcctcaagggcctggaggctgaggtgctgcggctgcaggaggaactggccgcctcggaccgtgctcggcggcaggcccagcaggaccgggatgagatggcagatgaggtggccaatggtaaccttagcaaggcagccattctggaggagaagcgtcagctggaggggcgcctggggcagttggaggaagagctggaggaggagcagagcaactcggagctgctcaatgaccgctaccgcaagctgctcctgcaggtagagtcactgaccacagagctgtcagctgagcgcagtttctcagccaaggcagagagcgggcggcagcagctggaacggcagatccaggagctacggggacgcctgggtgaggaggatgctggggcccgtgcccgccacaagatgaccattgctgcccttgagtctaagttggcccaggctgaggagcagctagagcaagagaccagagagcgcatcctctctggaaagctggtgcgcagagctgagaagcggcttaaagaggtggtgctccaggtggaggaggagcggagggtggctgaccagctccgggaccagctggagaagggaaaccttcgagtcaagcagctgaagcggcagctggaggaggccgaggaggaggcatcccgggctcaggccggccgccggaggctgcagcgtgagctggaagatgtcacagagtcggccgagtccatgaaccgtgaagtgaccacactgaggaaccggcttcgacgcggccccctcaccttcaccacccgcacggtgcgccaggtcttccgactagaggagggcgtggcatccgacgaggaggcagaggaagcacagcctgggtctgggccatccccggagcctgaggggtccccaccagcccacccccagtgaccctaccctgtccccagatgcactaacagatggggcccagcccccttcctccctggaccccacgggcccctgtcccaggaaccccgccctctgacttcttgccctttggaaatggtgcagcactctggcatttatcacccccacctgggtcccctgcaacctcccatcaaaggatgacccctaaacacagaggagcggggcaggcagggaggcaatgactggagctaccttgcttgttgggggactgggtacagttggcaagctgtgtttccatcagctccctgtcctcctttcttccctcgttattgatctatagacattaggaagggagtgagacggctcctccaccatcctcagccagtgcaacccattccctctgcttctctctctctctctctctctccctccctctccttccctaccctctcaccatctttcttggcctctctgagggtctctctgtgcatctttttaggaatctcgctctcactctctacgtagccactctccttcccccatttctgcgtccacccctgaactcctgagcgacagaagccccaggcctccaccagccttgaacccttgcaaaggggcaggacaaggggacccctctcactcctgctgctgcccatgctctgccctcccttctggttgctctgagggttcggagcttccctctgggactaaaggagtgtcctttaccctcccagcctccaggctctggcagaaataaactccaacccgactggacc

SEQ ID NO: 156967 - DNA, 4247 bp, Homo sapiens
  Payload ID: 10760
  Gene Symbol: MYH14
  Gene Name: myosin, heavy chain 14, non-muscle
  ENST ID: ENST00000440075
  CDS Start-End: 2216-4132
ctctttctccccaggccgaagcctcgggacggccctggaagccgaccatggcagccgtgaccatgtcggtgcccgggcggaaggcgtctcgtgtgggtgccttcggagcttcacgggttcgaggcggcggcgctgcgggacgaaggcgaggaggaggcggaggtggagctggcggagagcgggaggcggctgcgactgccgcgggaccagatccagcgcatgaacccgcccaagttcagcaaggccgaggacatggccgagctgacctgcctcaacgaggcctcggtcctgcacaacctccgggagcggtactactccggcctcatctacacgtactccggccttttctgtgtggtcatcaacccgtacaagcagcttcccatctacacagaagccattgtggagatgtaccggggcaagaagcgccacgaggtgccaccccacgtgtacgcagtgaccgagggggcctatcggagcatgctgcaggatcgtgaggaccagtccattctctgcactggagagtctggagctgggaagacggaaaacaccaagaaggtcatccagtacctcgcccacgtggcgtcgtctccaaagggcaggaaggagccgggtgtccccggtgagctggagcggcagctgcttcaggccaaccccatcctagaggcctttggcaatgccaagacagtgaagaatgacaactcctcccgattcggcaaattcatccgcatcaactttgatgttgccgggtacatcgtgggcgccaacattgagacctacctgctggagaagtcgcgggccatccgccaggccaaggacgagtgcagcttccacatcttctaccagctgctggggggcgctggagagcagctcaaagccgacctcctcctcgagccctgctcccactaccggttcctgaccaacgggccgtcatcctctcccggccaggagcgggaactcttccaggagacgctggagtcgctgcgggtcctgggattcagccacgaggaaatcatctccatgctgcggatggtctcagcagttctccagtttggcaacattgccttgaagagagaacggaacaccgatcaagccaccatgcctgacaacacagctgcacagaagctctgccgcctcttgggactgggggtgacggatttctcccgagccttgctcacccctcgcatcaaagttggccgagactatgtgcagaaagcccagactaaggaacaggctgacttcgcgctggaggccctggccaaggccacctacgagcgcctcttccgctggctggttctgcgcctcaaccgggccttggaccgcagcccccgccaaggcgcctccttcctgggcatcctggacatcgcgggctttgagatcttccagctgaactccttcgagcagctctgcatcaactacaccaacgagaagctgcagcagctcttcaaccacaccatgttcgtgctggagcaggaggagtaccagcgtgagggcagaagacgagggtggggcccgggcccagctgctgaaatccctgcgggaggctcaagcagccctggccgaggcccaggaggacctggagtctgagcgtgtggccaggaccaaggcggagaagcagcgccgggacctgggcgaggagctggaggcgctgcggggcgagctggaggacacgctggactccaccaacgcacagcaggagctccggtccaagagggaacaggaggtgacggagctgaagaagactctggaggaggagactcgcatccacgaggcggcagtgcaggagctgaggcagcgccacggccaggccctgggggagctggcggagcagctggagcaggcccggaggggcaaaggtgcatgggagaagacccggctggccctggaggccgaggtgtccgagctgcgggcagaactgagcagcctgcagactgcacgtcaggagggtgagcagcggaggcgccgcctggagttacagctgcaggaggtgcagggccgggctggtgatggggagagggcacgagcggaggctgctgagaagctgcagcgagcccaggctgaactggagaatgtgtctggggcgctgaacgaggctgagtccaaaaccatccgtcttagcaaggagctgagcagcacagaagcccagctgcacgatgcccaggagctgctgcaggaggagaccagggcgaaattggccttggggtcccgggtgcgagccatggaggctgaggcagccgggctgcgtgagcagctggaggaggaggcagctgccagggaacgggcgggccgtgaactgcagactgcccaggcccagctttccgagtggcggcggcgccaggaggaggaggcaggggcactggaggcaggggaggaggcacggcgccgggcagcccgggaggccgaggccctgacccagcgcctggcagaaaagacagagaccgtggatcggctggagcggggccgccgccggctgcagcaggagctggacgacgccaccatggacctggagcagcagcggcagcttgtgagcaccctggagaagaagcagcgcaagtttgaccagcttctggcagaggagaaggcagctgtacttcgggcagtggaggaacgtgagcgggccgaggcagagggccgggagcgtgaggctcgggccctgtcactgacacgggcactggaggaggagcaggaggcacgtgaggagctggagcggcagaaccgggccctgcgggctgagctggaggcactgctgagcagcaaggatgacgtcggcaagagcgtgcatgagctggaacgagcctgccgggtagcagaacaggcagccaatgatctgcgagcacaggtgacagaactggaggatgagctgacagcggccgaggatgccaagctgcgtctggaggtgactgtgcaggctctcaagactcagcatgagcgtgacctgcagggccgtgatgaggctggtgaagagaggcggaggcagctggccaagcagctgagagatgcagaggtggagcgggatgaggagcggaagcagcgcactctggccgtggctgcccgcaagaagctggagggagagctggaggagctgaaggctcagatggcctctgccggccagggcaaggaggaggcggtgaagcagcttcgcaagatgcaggcccagatgaaggagctatggcgggaggtggaggagacacgcacctcccgggaggagatcttctcccagaatcgggaaagtgaaaagcgcctcaagggcctggaggctgaggtgctgcggctgcaggaggaactggccgcctcggaccgtgctcggcggcaggcccagcaggaccgggatgagatggcagatgaggtggccaatggtaaccttagcaaggcagccattctggaggagaagcgtcagctggaggggcgcctggggcagttggaggaagagctggaggaggagcagagcaactcggagctgctcaatgaccgctaccgcaagctgctcctgcaggtagagtcactgaccacagagctgtcagctgagcgcagtttctcagccaaggcagagagcgggcggcagcagctggaacggcagatccaggagctacggggacgcctgggtgaggaggatgctggggcccgtgcccgccacaagatgaccattgctgcccttgagtctaagttggcccaggctgaggagcagctagagcaagagaccagagagcgcatcctctctggaaagctggtgcgcagagctgagaagcggcttaaagaggtggtgctccaggtggaggaggagcggagggtggctgaccagctccgggaccagctggagaagggaaaccttcgagtcaagcagctgaagcggcagctggaggaggccgaggaggaggcatcccgggctcaggccggccgccggaggctgcagcgtgagctggaagatgtcacagagtcggccgagtccatgaaccgtgaagtgaccacactgaggaaccggcttcgacgcggccccctcaccttcaccacccgcacggtgcgccaggtcttccgactagaggagggcgtggcatccgacgaggaggcagaggaagcacagcctgggtctgggccatccccggagcctgaggggtccccaccagcccacccccagtgaccctaccctgtccccagatgcactaacagatggggcccagcccccttcctccctggaccccacgggcccctgtcccaggaaccccgccctctgacttcttgccctttggaaatgg

SEQ ID NO: 156968 - DNA, 6811 bp, Homo sapiens
  Payload ID: 10760
  Gene Symbol: MYH14
  Gene Name: myosin, heavy chain 14, non-muscle
  Uniprot ID: Q7Z406
  ENST ID: ENST00000425460
  CDS Start-End: 48-6059
ctctttctccccaggccgaagcctcgggacggccctggaagccgaccatggcagccgtgaccatgtcggtgcccgggcggaaggcgccccccaggccgggcccagtgcccgaggcggcccagccgttcctgttcacgccccgcgggcccagcgcgggtggcgggcctggctcgggcacctccccgcaggtggagtggacggcccggcgtctcgtgtgggtgccttcggagcttcacgggttcgaggcggcggcgctgcgggacgaaggcgaggaggaggcggaggtggagctggcggagagcgggaggcggctgcgactgccgcgggaccagatccagcgcatgaacccgcccaagttcagcaaggccgaggacatggccgagctgacctgcctcaacgaggcctcggtcctgcacaacctccgggagcggtactactccggcctcatctacacgtactccggccttttctgtgtggtcatcaacccgtacaagcagcttcccatctacacagaagccattgtggagatgtaccggggcaagaagcgccacgaggtgccaccccacgtgtacgcagtgaccgagggggcctatcggagcatgctgcaggatcgtgaggaccagtccattctctgcactggagagtctggagctgggaagacggaaaacaccaagaaggtcatccagtacctcgcccacgtggcgtcgtctccaaagggcaggaaggagccgggtgtccccgcctccgtcagcaccgtgtcttatggtgagctggagcggcagctgcttcaggccaaccccatcctagaggcctttggcaatgccaagacagtgaagaatgacaactcctcccgattcggcaaattcatccgcatcaactttgatgttgccgggtacatcgtgggcgccaacattgagacctacctgctggagaagtcgcgggccatccgccaggccaaggacgagtgcagcttccacatcttctaccagctgctggggggcgctggagagcagctcaaagccgacctcctcctcgagccctgctcccactaccggttcctgaccaacgggccgtcatcctctcccggccaggagcgggaactcttccaggagacgctggagtcgctgcgggtcctgggattcagccacgaggaaatcatctccatgctgcggatggtctcagcagttctccagtttggcaacattgccttgaagagagaacggaacaccgatcaagccaccatgcctgacaacacagctgcacagaagctctgccgcctcttgggactgggggtgacggatttctcccgagccttgctcacccctcgcatcaaagttggccgagactatgtgcagaaagcccagactaaggaacaggctgacttcgcgctggaggccctggccaaggccacctacgagcgcctcttccgctggctggttctgcgcctcaaccgggccttggaccgcagcccccgccaaggcgcctccttcctgggcatcctggacatcgcgggctttgagatcttccagctgaactccttcgagcagctctgcatcaactacaccaacgagaagctgcagcagctcttcaaccacaccatgttcgtgctggagcaggaggagtaccagcgtgagggcatcccctggaccttcctcgactttggcctcgacctgcagccctgcatcgacctcatcgagcggccggccaacccccctggactcctggccctgctggatgaggagtgctggttcccgaaggccacagacaagtcgtttgtggagaaggtagcccaggagcagggcggccaccccaagttccagcggccgaggcacctgcgggatcaggccgacttcagtgttctccactacgcgggcaaggtcgactacaaggccaacgagtggctgatgaaaaacatggaccctctgaatgacaacgtcgcagccttgctccaccagagcacagaccggctgacggcagagatctggaaagacgtggagggcatcgtggggctggaacaggtgagcagcctgggcgacggcccaccaggtggccgcccccgtcggggtatgttccggacagtgggacagctctacaaggagtccctgagccgcctcatggccacactcagcaacaccaaccccagttttgtccgctgcattgtccccaaccacgagaagagggccgggaagctggagccacggctggtgctggaccagcttcgctgcaacggggtcctggagggcatccgcatctgtcgccagggcttccccaaccgcatcctcttccaggagttccggcagcgatacgagatcctgacacccaatgccatccccaagggcttcatggatgggaagcaggcctgtgaaaagatgatccaggcgctggaactggaccccaacctctaccgcgtgggacagagcaagatcttcttccgggctggggtcctggcccagctggaagaggagcgagacctgaaggtcaccgacatcatcgtctccttccaggcagctgcccggggatacctggctcgcagggccttccagaagcgccagcagcagcagagcgccctgagggtgatgcagcggaactgcgcggcctacctcaagctgagacactggcagtggtggcggctgtttaccaaggtgaagccactgctgcaggtgacgcggcaggatgaggtgctgcaggcacgggcccaggagctgcagaaagtgcaggagctacagcagcagagcgcccgcgaagttggggagctccagggccgagtggcacagctggaagaggagcgcgcccgcctggcagagcaattgcgagcagaggcagaactgtgtgcagaggccgaggagacgcgggggaggctggcagcccgcaagcaggagctggagctggtggtgtcagagctggaggctcgcgtgggcgaggaggaggagtgcagccgtcaaatgcaaaccgagaagaagaggctgcagcagcacatacaggagctagaggcccaccttgaggctgaggagggtgcgcggcagaagctgcagctggagaaggtgacgacagaggcaaaaatgaagaaatttgaagaggacctgctgctcctggaagaccagaattccaagctgagcaaggagcggaagctgctggaagatcgtctggccgagttctcatcccaggcagctgaggaggaggagaaggtcaagagcctcaataagctacggctcaaatatgaggccacaatcgcagacatggaggaccgcctacggaaggaggagaagggtcgccaggagctggagaagctgaagcggaggctggatggggagagctcagagctgcaggagcagatggtggagcagcaacagcgggcagaggagctgcgggcccagctgggccggaaggaggaggagctgcaggctgccctggccagggcagaagacgagggtggggcccgggcccagctgctgaaatccctgcgggaggctcaagcagccctggccgaggcccaggaggacctggagtctgagcgtgtggccaggaccaaggcggagaagcagcgccgggacctgggcgaggagctggaggcgctgcggggcgagctggaggacacgctggactccaccaacgcacagcaggagctccggtccaagagggaacaggaggtgacggagctgaagaagactctggaggaggagactcgcatccacgaggcggcagtgcaggagctgaggcagcgccacggccaggccctgggggagctggcggagcagctggagcaggcccggaggggcaaaggtgcatgggagaagacccggctggccctggaggccgaggtgtccgagctgcgggcagaactgagcagcctgcagactgcacgtcaggagggtgagcagcggaggcgccgcctggagttacagctgcaggaggtgcagggccgggctggtgatggggagagggcacgagcggaggctgctgagaagctgcagcgagcccaggctgaactggagaatgtgtctggggcgctgaacgaggctgagtccaaaaccatccgtcttagcaaggagctgagcagcacagaagcccagctgcacgatgcccaggagctgctgcaggaggagaccagggcgaaattggccttggggtcccgggtgcgagccatggaggctgaggcagccgggctgcgtgagcagctggaggaggaggcagctgccagggaacgggcgggccgtgaactgcagactgcccaggcccagctttccgagtggcggcggcgccaggaggaggaggcaggggcactggaggcaggggaggaggcacggcgccgggcagcccgggaggccgaggccctgacccagcgcctggcagaaaagacagagaccgtggatcggctggagcggggccgccgccggctgcagcaggagctggacgacgccaccatggacctggagcagcagcggcagcttgtgagcaccctggagaagaagcagcgcaagtttgaccagcttctggcagaggagaaggcagctgtacttcgggcagtggaggaacgtgagcgggccgaggcagagggccgggagcgtgaggctcgggccctgtcactgacacgggcactggaggaggagcaggaggcacgtgaggagctggagcggcagaaccgggccctgcgggctgagctggaggcactgctgagcagcaaggatgacgtcggcaagagcgtgcatgagctggaacgagcctgccgggtagcagaacaggcagccaatgatctgcgagcacaggtgacagaactggaggatgagctgacagcggccgaggatgccaagctgcgtctggaggtgactgtgcaggctctcaagactcagcatgagcgtgacctgcagggccgtgatgaggctggtgaagagaggcggaggcagctggccaagcagctgagagatgcagaggtggagcgggatgaggagcggaagcagcgcactctggccgtggctgcccgcaagaagctggagggagagctggaggagctgaaggctcagatggcctctgccggccagggcaaggaggaggcggtgaagcagcttcgcaagatgcaggcccagatgaaggagctatggcgggaggtggaggagacacgcacctcccgggaggagatcttctcccagaatcgggaaagtgaaaagcgcctcaagggcctggaggctgaggtgctgcggctgcaggaggaactggccgcctcggaccgtgctcggcggcaggcccagcaggaccgggatgagatggcagatgaggtggccaatggtaaccttagcaaggcagccattctggaggagaagcgtcagctggaggggcgcctggggcagttggaggaagagctggaggaggagcagagcaactcggagctgctcaatgaccgctaccgcaagctgctcctgcaggtagagtcactgaccacagagctgtcagctgagcgcagtttctcagccaaggcagagagcgggcggcagcagctggaacggcagatccaggagctacggggacgcctgggtgaggaggatgctggggcccgtgcccgccacaagatgaccattgctgcccttgagtctaagttggcccaggctgaggagcagctagagcaagagaccagagagcgcatcctctctggaaagctggtgcgcagagctgagaagcggcttaaagaggtggtgctccaggtggaggaggagcggagggtggctgaccagctccgggaccagctggagaagggaaaccttcgagtcaagcagctgaagcggcagctggaggaggccgaggaggaggcatcccgggctcaggccggccgccggaggctgcagcgtgagctggaagatgtcacagagtcggccgagtccatgaaccgtgaagtgaccacactgaggaaccggcttcgacgcggccccctcaccttcaccacccgcacggtgcgccaggtcttccgactagaggagggcgtggcatccgacgaggaggcagaggaagcacagcctgggtctgggccatccccggagcctgaggggtccccaccagcccacccccagtgaccctaccctgtccccagatgcactaacagatggggcccagcccccttcctccctggaccccacgggcccctgtcccaggaaccccgccctctgacttcttgccctttggaaatggtgcagcactctggcatttatcacccccacctgggtcccctgcaacctcccatcaaaggatgacccctaaacacagaggagcggggcaggcagggaggcaatgactggagctaccttgcttgttgggggactgggtacagttggcaagctgtgtttccatcagctccctgtcctcctttcttccctcgttattgatctatagacattaggaagggagtgagacggctcctccaccatcctcagccagtgcaacccattccctctgcttctctctctctctctctctctccctccctctccttccctaccctctcaccatctttcttggcctctctgagggtctctctgtgcatctttttaggaatctcgctctcactctctacgtagccactctccttcccccatttctgcgtccacccctgaactcctgagcgacagaagccccaggcctccaccagccttgaacccttgcaaaggggcaggacaaggggacccctctcactcctgctgctgcccatgctctgccctcccttctggttgctctgagggttcggagcttccctctgggactaaaggagtgtcctttaccctcccagcctccaggctctggcagaaataaactccaacccgactggacc

SEQ ID NO: 156969 - DNA, 3046 bp, Homo sapiens
  Payload ID: 10760
  Gene Symbol: MYH14
  Gene Name: myosin, heavy chain 14, non-muscle
  ENST ID: ENST00000599920
  CDS Start-End: 39-3046
cccaggccgaagcctcgggacggccctggaagccgaccatggcagccgtgaccatgtcggtgcccgggcggaaggcgccccccaggccgggcccagtgcccgaggcggcccagccgttcctgttcacgccccgcgggcccagcgcgggtggcgggcctggctcgggcacctccccgcaggtggagtggacggcccggcgtctcgtgtgggtgccttcggagcttcacgggttcgaggcggcggcgctgcgggacgaaggcgaggaggaggcggaggtggagctggcggagagcgggaggcggctgcgactgccgcgggaccagatccagcgcatgaacccgcccaagttcagcaaggccgaggacatggccgagctgacctgcctcaacgaggcctcggtcctgcacaacctccgggagcggtactactccggcctcatctacacgtactccggccttttctgtgtggtcatcaacccgtacaagcagcttcccatctacacagaagccattgtggagatgtaccggggcaagaagcgccacgaggtgccaccccacgtgtacgcagtgaccgagggggcctatcggagcatgctgcaggatcgtgaggaccagtccattctctgcactggagagtctggagctgggaagacggaaaacaccaagaaggtcatccagtacctcgcccacgtggcgtcgtctccaaagggcaggaaggagccgggtgtccccgcctccgtcagcaccgtgtcttatggtgagctggagcggcagctgcttcaggccaaccccatcctagaggcctttggcaatgccaagacagtgaagaatgacaactcctcccgattcggcaaattcatccgcatcaactttgatgttgccgggtacatcgtgggcgccaacattgagacctacctgctggagaagtcgcgggccatccgccaggccaaggacgagtgcagcttccacatcttctaccagctgctggggggcgctggagagcagctcaaagccgacctcctcctcgagccctgctcccactaccggttcctgaccaacgggccgtcatcctctcccggccaggagcgggaactcttccaggagacgctggagtcgctgcgggtcctgggattcagccacgaggaaatcatctccatgctgcggatggtctcagcagttctccagtttggcaacattgccttgaagagagaacggaacaccgatcaagccaccatgcctgacaacacagctgcacagaagctctgccgcctcttgggactgggggtgacggatttctcccgagccttgctcacccctcgcatcaaagttggccgagactatgtgcagaaagcccagactaaggaacaggctgacttcgcgctggaggccctggccaaggccacctacgagcgcctcttccgctggctggttctgcgcctcaaccgggccttggaccgcagcccccgccaaggcgcctccttcctgggcatcctggacatcgcgggctttgagatcttccagctgaactccttcgagcagctctgcatcaactacaccaacgagaagctgcagcagctcttcaaccacaccatgttcgtgctggagcaggaggagtaccagcgtgagggcatcccctggaccttcctcgactttggcctcgacctgcagccctgcatcgacctcatcgagcggccggccaacccccctggactcctggccctgctggatgaggagtgctggttcccgaaggccacagacaagtcgtttgtggagaaggtagcccaggagcagggcggccaccccaagttccagcggccgaggcacctgcgggatcaggccgacttcagtgttctccactacgcgggcaaggtcgactacaaggccaacgagtggctgatgaaaaacatggaccctctgaatgacaacgtcgcagccttgctccaccagagcacagaccggctgacggcagagatctggaaagacgtggagggcatcgtggggctggaacaggtgagcagcctgggcgacggcccaccaggtggccgcccccgtcggggtatgttccggacagtgggacagctctacaaggagtccctgagccgcctcatggccacactcagcaacaccaaccccagttttgtccgctgcattgtccccaaccacgagaagagggccgggaagctggagccacggctggtgctggaccagcttcgctgcaacggggtcctggagggcatccgcatctgtcgccagggcttccccaaccgcatcctcttccaggagttccggcagcgatacgagatcctgacacccaatgccatccccaagggcttcatggatgggaagcaggcctgtgaaaagatgatccaggcgctggaactggaccccaacctctaccgcgtgggacagagcaagatcttcttccgggctggggtcctggcccagctggaagaggagcgagacctgaaggtcaccgacatcatcgtctccttccaggcagctgcccggggatacctggctcgcagggccttccagaagcgccagcagcagcagagcgccctgagggtgatgcagcggaactgcgcggcctacctcaagctgagacactggcagtggtggcggctgtttaccaaggtgaagccactgctgcaggtgacgcggcaggatgaggtgctgcaggcacgggcccaggagctgcagaaagtgcaggagctacagcagcagagcgcccgcgaagttggggagctccagggccgagtggcacagctggaagaggagcgcgcccgcctggcagagcaattgcgagcagaggcagaactgtgtgcagaggccgaggagacgcgggggaggctggcagcccgcaagcaggagctggagctggtggtgtcagagctggaggctcgcgtgggcgaggaggaggagtgcagccgtcaaatgcaaaccgagaagaagaggctgcagcagcacatacaggagctagaggcccaccttgaggctgaggagggtgcgcggcagaagctgcagctggagaaggtgacgacagaggc

SEQ ID NO: 156970 - DNA, 6896 bp, Homo sapiens
  Payload ID: 10760
  Gene Symbol: MYH14
  Gene Name: myosin, heavy chain 14, non-muscle
  Uniprot ID: Q7Z406
  ENST ID: ENST00000601313
  CDS Start-End: 31-6141
gaagcctcgggacggccctggaagccgaccatggcagccgtgaccatgtcggtgcccgggcggaaggcgccccccaggccgggcccagtgcccgaggcggcccagccgttcctgttcacgccccgcgggcccagcgcgggtggcgggcctggctcgggcacctccccgcaggtggagtggacggcccggcgtctcgtgtgggtgccttcggagcttcacgggttcgaggcggcggcgctgcgggacgaaggcgaggaggaggcggaggtggagctggcggagagcgggaggcggctgcgactgccgcgggaccagatccagcgcatgaacccgcccaagttcagcaaggccgaggacatggccgagctgacctgcctcaacgaggcctcggtcctgcacaacctccgggagcggtactactccggcctcatctacacgtactccggccttttctgtgtggtcatcaacccgtacaagcagcttcccatctacacagaagccattgtggagatgtaccggggcaagaagcgccacgaggtgccaccccacgtgtacgcagtgaccgagggggcctatcggagcatgctgcaggatcgtgaggaccagtccattctctgcactggagagtctggagctgggaagacggaaaacaccaagaaggtcatccagtacctcgcccacgtggcgtcgtctccaaagggcaggaaggagccgggtgtccccgcctccgtcagcaccgtgtcttatggtgagctggagcggcagctgcttcaggccaaccccatcctagaggcctttggcaatgccaagacagtgaagaatgacaactcctcccgattcggcaaattcatccgcatcaactttgatgttgccgggtacatcgtgggcgccaacattgagacctacctgctggagaagtcgcgggccatccgccaggccaaggacgagtgcagcttccacatcttctaccagctgctggggggcgctggagagcagctcaaagccgacctcctcctcgagccctgctcccactaccggttcctgaccaacgggccgtcatcctctcccggccaggagcgggaactcttccaggagacgctggagtcgctgcgggtcctgggattcagccacgaggaaatcatctccatgctgcggatggtctcagcagttctccagtttggcaacattgccttgaagagagaacggaacaccgatcaagccaccatgcctgacaacacagctgcacagaagctctgccgcctcttgggactgggggtgacggatttctcccgagccttgctcacccctcgcatcaaagttggccgagactatgtgcagaaagcccagactaaggaacaggctgacttcgcgctggaggccctggccaaggccacctacgagcgcctcttccgctggctggttctgcgcctcaaccgggccttggaccgcagcccccgccaaggcgcctccttcctgggcatcctggacatcgcgggctttgagatcttccagctgaactccttcgagcagctctgcatcaactacaccaacgagaagctgcagcagctcttcaaccacaccatgttcgtgctggagcaggaggagtaccagcgtgagggcatcccctggaccttcctcgactttggcctcgacctgcagccctgcatcgacctcatcgagcggccggccaacccccctggactcctggccctgctggatgaggagtgctggttcccgaaggccacagacaagtcgtttgtggagaaggtagcccaggagcagggcggccaccccaagttccagcggccgaggcacctgcgggatcaggccgacttcagtgttctccactacgcgggcaaggtcgactacaaggccaacgagtggctgatgaaaaacatggaccctctgaatgacaacgtcgcagccttgctccaccagagcacagaccggctgacggcagagatctggaaagacgaacatgggggcttccagcagttctctttccttggctccttcccaccgtcgcccccaggatctgcagagaggtgcagctctgctatttctccgccaggggtggagggcatcgtggggctggaacaggtgagcagcctgggcgacggcccaccaggtggccgcccccgtcggggtatgttccggacagtgggacagctctacaaggagtccctgagccgcctcatggccacactcagcaacaccaaccccagttttgtccgctgcattgtccccaaccacgagaagagggccgggaagctggagccacggctggtgctggaccagcttcgctgcaacggggtcctggagggcatccgcatctgtcgccagggcttccccaaccgcatcctcttccaggagttccggcagcgatacgagatcctgacacccaatgccatccccaagggcttcatggatgggaagcaggcctgtgaaaagatgatccaggcgctggaactggaccccaacctctaccgcgtgggacagagcaagatcttcttccgggctggggtcctggcccagctggaagaggagcgagacctgaaggtcaccgacatcatcgtctccttccaggcagctgcccggggatacctggctcgcagggccttccagaagcgccagcagcagcagagcgccctgagggtgatgcagcggaactgcgcggcctacctcaagctgagacactggcagtggtggcggctgtttaccaaggtgaagccactgctgcaggtgacgcggcaggatgaggtgctgcaggcacgggcccaggagctgcagaaagtgcaggagctacagcagcagagcgcccgcgaagttggggagctccagggccgagtggcacagctggaagaggagcgcgcccgcctggcagagcaattgcgagcagaggcagaactgtgtgcagaggccgaggagacgcgggggaggctggcagcccgcaagcaggagctggagctggtggtgtcagagctggaggctcgcgtgggcgaggaggaggagtgcagccgtcaaatgcaaaccgagaagaagaggctgcagcagcacatacaggagctagaggcccaccttgaggctgaggagggtgcgcggcagaagctgcagctggagaaggtgacgacagaggcaaaaatgaagaaatttgaagaggacctgctgctcctggaagaccagaattccaagctgagcaaggagcggaagctgctggaagatcgtctggccgagttctcatcccaggcagctgaggaggaggagaaggtcaagagcctcaataagctacggctcaaatatgaggccacaatcgcagacatggaggaccgcctacggaaggaggagaagggtcgccaggagctggagaagctgaagcggaggctggatggggagagctcagagctgcaggagcagatggtggagcagcaacagcgggcagaggagctgcgggcccagctgggccggaaggaggaggagctgcaggctgccctggccagggcagaagacgagggtggggcccgggcccagctgctgaaatccctgcgggaggctcaagcagccctggccgaggcccaggaggacctggagtctgagcgtgtggccaggaccaaggcggagaagcagcgccgggacctgggcgaggagctggaggcgctgcggggcgagctggaggacacgctggactccaccaacgcacagcaggagctccggtccaagagggaacaggaggtgacggagctgaagaagactctggaggaggagactcgcatccacgaggcggcagtgcaggagctgaggcagcgccacggccaggccctgggggagctggcggagcagctggagcaggcccggaggggcaaaggtgcatgggagaagacccggctggccctggaggccgaggtgtccgagctgcgggcagaactgagcagcctgcagactgcacgtcaggagggtgagcagcggaggcgccgcctggagttacagctgcaggaggtgcagggccgggctggtgatggggagagggcacgagcggaggctgctgagaagctgcagcgagcccaggctgaactggagaatgtgtctggggcgctgaacgaggctgagtccaaaaccatccgtcttagcaaggagctgagcagcacagaagcccagctgcacgatgcccaggagctgctgcaggaggagaccagggcgaaattggccttggggtcccgggtgcgagccatggaggctgaggcagccgggctgcgtgagcagctggaggaggaggcagctgccagggaacgggcgggccgtgaactgcagactgcccaggcccagctttccgagtggcggcggcgccaggaggaggaggcaggggcactggaggcaggggaggaggcacggcgccgggcagcccgggaggccgaggccctgacccagcgcctggcagaaaagacagagaccgtggatcggctggagcggggccgccgccggctgcagcaggagctggacgacgccaccatggacctggagcagcagcggcagcttgtgagcaccctggagaagaagcagcgcaagtttgaccagcttctggcagaggagaaggcagctgtacttcgggcagtggaggaacgtgagcgggccgaggcagagggccgggagcgtgaggctcgggccctgtcactgacacgggcactggaggaggagcaggaggcacgtgaggagctggagcggcagaaccgggccctgcgggctgagctggaggcactgctgagcagcaaggatgacgtcggcaagagcgtgcatgagctggaacgagcctgccgggtagcagaacaggcagccaatgatctgcgagcacaggtgacagaactggaggatgagctgacagcggccgaggatgccaagctgcgtctggaggtgactgtgcaggctctcaagactcagcatgagcgtgacctgcagggccgtgatgaggctggtgaagagaggcggaggcagctggccaagcagctgagagatgcagaggtggagcgggatgaggagcggaagcagcgcactctggccgtggctgcccgcaagaagctggagggagagctggaggagctgaaggctcagatggcctctgccggccagggcaaggaggaggcggtgaagcagcttcgcaagatgcaggcccagatgaaggagctatggcgggaggtggaggagacacgcacctcccgggaggagatcttctcccagaatcgggaaagtgaaaagcgcctcaagggcctggaggctgaggtgctgcggctgcaggaggaactggccgcctcggaccgtgctcggcggcaggcccagcaggaccgggatgagatggcagatgaggtggccaatggtaaccttagcaaggcagccattctggaggagaagcgtcagctggaggggcgcctggggcagttggaggaagagctggaggaggagcagagcaactcggagctgctcaatgaccgctaccgcaagctgctcctgcaggtagagtcactgaccacagagctgtcagctgagcgcagtttctcagccaaggcagagagcgggcggcagcagctggaacggcagatccaggagctacggggacgcctgggtgaggaggatgctggggcccgtgcccgccacaagatgaccattgctgcccttgagtctaagttggcccaggctgaggagcagctagagcaagagaccagagagcgcatcctctctggaaagctggtgcgcagagctgagaagcggcttaaagaggtggtgctccaggtggaggaggagcggagggtggctgaccagctccgggaccagctggagaagggaaaccttcgagtcaagcagctgaagcggcagctggaggaggccgaggaggaggcatcccgggctcaggccggccgccggaggctgcagcgtgagctggaagatgtcacagagtcggccgagtccatgaaccgtgaagtgaccacactgaggaaccggcttcgacgcggccccctcaccttcaccacccgcacggtgcgccaggtcttccgactagaggagggcgtggcatccgacgaggaggcagaggaagcacagcctgggtctgggccatccccggagcctgaggggtccccaccagcccacccccagtgaccctaccctgtccccagatgcactaacagatggggcccagcccccttcctccctggaccccacgggcccctgtcccaggaaccccgccctctgacttcttgccctttggaaatggtgcagcactctggcatttatcacccccacctgggtcccctgcaacctcccatcaaaggatgacccctaaacacagaggagcggggcaggcagggaggcaatgactggagctaccttgcttgttgggggactgggtacagttggcaagctgtgtttccatcagctccctgtcctcctttcttccctcgttattgatctatagacattaggaagggagtgagacggctcctccaccatcctcagccagtgcaacccattccctctgcttctctctctctctctctctctccctccctctccttccctaccctctcaccatctttcttggcctctctgagggtctctctgtgcatctttttaggaatctcgctctcactctctacgtagccactctccttcccccatttctgcgtccacccctgaactcctgagcgacagaagccccaggcctccaccagccttgaacccttgcaaaggggcaggacaaggggacccctctcactcctgctgctgcccatgctctgccctcccttctggttgctctgagggttcggagcttccctctgggactaaaggagtgtcctttaccctcccagcctccaggctctggcagaaataaactccaacccgactggaccatc

SEQ ID NO: 156971 - DNA, 6137 bp, Homo sapiens
  Payload ID: 10760
  Gene Symbol: MYH14
  Gene Name: myosin, heavy chain 14, non-muscle
  Uniprot ID: Q7Z406
  ENST ID: ENST00000598205
  CDS Start-End: 126-6137
gacagatgtccctgaaggcccgagggacaccagccgctatgccaggctccaaagaacccgaggcaaaccaacgctggtcccggtctttgaggactccccggcccagtgagggagaccgacagaccatggcagccgtgaccatgtcggtgcccgggcggaaggcgccccccaggccgggcccagtgcccgaggcggcccagccgttcctgttcacgccccgcgggcccagcgcgggtggcgggcctggctcgggcacctccccgcaggtggagtggacggcccggcgtctcgtgtgggtgccttcggagcttcacgggttcgaggcggcggcgctgcgggacgaaggcgaggaggaggcggaggtggagctggcggagagcgggaggcggctgcgactgccgcgggaccagatccagcgcatgaacccgcccaagttcagcaaggccgaggacatggccgagctgacctgcctcaacgaggcctcggtcctgcacaacctccgggagcggtactactccggcctcatctacacgtactccggccttttctgtgtggtcatcaacccgtacaagcagcttcccatctacacagaagccattgtggagatgtaccggggcaagaagcgccacgaggtgccaccccacgtgtacgcagtgaccgagggggcctatcggagcatgctgcaggatcgtgaggaccagtccattctctgcactggagagtctggagctgggaagacggaaaacaccaagaaggtcatccagtacctcgcccacgtggcgtcgtctccaaagggcaggaaggagccgggtgtccccgcctccgtcagcaccgtgtcttatggtgagctggagcggcagctgcttcaggccaaccccatcctagaggcctttggcaatgccaagacagtgaagaatgacaactcctcccgattcggcaaattcatccgcatcaactttgatgttgccgggtacatcgtgggcgccaacattgagacctacctgctggagaagtcgcgggccatccgccaggccaaggacgagtgcagcttccacatcttctaccagctgctggggggcgctggagagcagctcaaagccgacctcctcctcgagccctgctcccactaccggttcctgaccaacgggccgtcatcctctcccggccaggagcgggaactcttccaggagacgctggagtcgctgcgggtcctgggattcagccacgaggaaatcatctccatgctgcggatggtctcagcagttctccagtttggcaacattgccttgaagagagaacggaacaccgatcaagccaccatgcctgacaacacagctgcacagaagctctgccgcctcttgggactgggggtgacggatttctcccgagccttgctcacccctcgcatcaaagttggccgagactatgtgcagaaagcccagactaaggaacaggctgacttcgcgctggaggccctggccaaggccacctacgagcgcctcttccgctggctggttctgcgcctcaaccgggccttggaccgcagcccccgccaaggcgcctccttcctgggcatcctggacatcgcgggctttgagatcttccagctgaactccttcgagcagctctgcatcaactacaccaacgagaagctgcagcagctcttcaaccacaccatgttcgtgctggagcaggaggagtaccagcgtgagggcatcccctggaccttcctcgactttggcctcgacctgcagccctgcatcgacctcatcgagcggccggccaacccccctggactcctggccctgctggatgaggagtgctggttcccgaaggccacagacaagtcgtttgtggagaaggtagcccaggagcagggcggccaccccaagttccagcggccgaggcacctgcgggatcaggccgacttcagtgttctccactacgcgggcaaggtcgactacaaggccaacgagtggctgatgaaaaacatggaccctctgaatgacaacgtcgcagccttgctccaccagagcacagaccggctgacggcagagatctggaaagacgtggagggcatcgtggggctggaacaggtgagcagcctgggcgacggcccaccaggtggccgcccccgtcggggtatgttccggacagtgggacagctctacaaggagtccctgagccgcctcatggccacactcagcaacaccaaccccagttttgtccgctgcattgtccccaaccacgagaagagggccgggaagctggagccacggctggtgctggaccagcttcgctgcaacggggtcctggagggcatccgcatctgtcgccagggcttccccaaccgcatcctcttccaggagttccggcagcgatacgagatcctgacacccaatgccatccccaagggcttcatggatgggaagcaggcctgtgaaaagatgatccaggcgctggaactggaccccaacctctaccgcgtgggacagagcaagatcttcttccgggctggggtcctggcccagctggaagaggagcgagacctgaaggtcaccgacatcatcgtctccttccaggcagctgcccggggatacctggctcgcagggccttccagaagcgccagcagcagcagagcgccctgagggtgatgcagcggaactgcgcggcctacctcaagctgagacactggcagtggtggcggctgtttaccaaggtgaagccactgctgcaggtgacgcggcaggatgaggtgctgcaggcacgggcccaggagctgcagaaagtgcaggagctacagcagcagagcgcccgcgaagttggggagctccagggccgagtggcacagctggaagaggagcgcgcccgcctggcagagcaattgcgagcagaggcagaactgtgtgcagaggccgaggagacgcgggggaggctggcagcccgcaagcaggagctggagctggtggtgtcagagctggaggctcgcgtgggcgaggaggaggagtgcagccgtcaaatgcaaaccgagaagaagaggctgcagcagcacatacaggagctagaggcccaccttgaggctgaggagggtgcgcggcagaagctgcagctggagaaggtgacgacagaggcaaaaatgaagaaatttgaagaggacctgctgctcctggaagaccagaattccaagctgagcaaggagcggaagctgctggaagatcgtctggccgagttctcatcccaggcagctgaggaggaggagaaggtcaagagcctcaataagctacggctcaaatatgaggccacaatcgcagacatggaggaccgcctacggaaggaggagaagggtcgccaggagctggagaagctgaagcggaggctggatggggagagctcagagctgcaggagcagatggtggagcagcaacagcgggcagaggagctgcgggcccagctgggccggaaggaggaggagctgcaggctgccctggccagggcagaagacgagggtggggcccgggcccagctgctgaaatccctgcgggaggctcaagcagccctggccgaggcccaggaggacctggagtctgagcgtgtggccaggaccaaggcggagaagcagcgccgggacctgggcgaggagctggaggcgctgcggggcgagctggaggacacgctggactccaccaacgcacagcaggagctccggtccaagagggaacaggaggtgacggagctgaagaagactctggaggaggagactcgcatccacgaggcggcagtgcaggagctgaggcagcgccacggccaggccctgggggagctggcggagcagctggagcaggcccggaggggcaaaggtgcatgggagaagacccggctggccctggaggccgaggtgtccgagctgcgggcagaactgagcagcctgcagactgcacgtcaggagggtgagcagcggaggcgccgcctggagttacagctgcaggaggtgcagggccgggctggtgatggggagagggcacgagcggaggctgctgagaagctgcagcgagcccaggctgaactggagaatgtgtctggggcgctgaacgaggctgagtccaaaaccatccgtcttagcaaggagctgagcagcacagaagcccagctgcacgatgcccaggagctgctgcaggaggagaccagggcgaaattggccttggggtcccgggtgcgagccatggaggctgaggcagccgggctgcgtgagcagctggaggaggaggcagctgccagggaacgggcgggccgtgaactgcagactgcccaggcccagctttccgagtggcggcggcgccaggaggaggaggcaggggcactggaggcaggggaggaggcacggcgccgggcagcccgggaggccgaggccctgacccagcgcctggcagaaaagacagagaccgtggatcggctggagcggggccgccgccggctgcagcaggagctggacgacgccaccatggacctggagcagcagcggcagcttgtgagcaccctggagaagaagcagcgcaagtttgaccagcttctggcagaggagaaggcagctgtacttcgggcagtggaggaacgtgagcgggccgaggcagagggccgggagcgtgaggctcgggccctgtcactgacacgggcactggaggaggagcaggaggcacgtgaggagctggagcggcagaaccgggccctgcgggctgagctggaggcactgctgagcagcaaggatgacgtcggcaagagcgtgcatgagctggaacgagcctgccgggtagcagaacaggcagccaatgatctgcgagcacaggtgacagaactggaggatgagctgacagcggccgaggatgccaagctgcgtctggaggtgactgtgcaggctctcaagactcagcatgagcgtgacctgcagggccgtgatgaggctggtgaagagaggcggaggcagctggccaagcagctgagagatgcagaggtggagcgggatgaggagcggaagcagcgcactctggccgtggctgcccgcaagaagctggagggagagctggaggagctgaaggctcagatggcctctgccggccagggcaaggaggaggcggtgaagcagcttcgcaagatgcaggcccagatgaaggagctatggcgggaggtggaggagacacgcacctcccgggaggagatcttctcccagaatcgggaaagtgaaaagcgcctcaagggcctggaggctgaggtgctgcggctgcaggaggaactggccgcctcggaccgtgctcggcggcaggcccagcaggaccgggatgagatggcagatgaggtggccaatggtaaccttagcaaggcagccattctggaggagaagcgtcagctggaggggcgcctggggcagttggaggaagagctggaggaggagcagagcaactcggagctgctcaatgaccgctaccgcaagctgctcctgcaggtagagtcactgaccacagagctgtcagctgagcgcagtttctcagccaaggcagagagcgggcggcagcagctggaacggcagatccaggagctacggggacgcctgggtgaggaggatgctggggcccgtgcccgccacaagatgaccattgctgcccttgagtctaagttggcccaggctgaggagcagctagagcaagagaccagagagcgcatcctctctggaaagctggtgcgcagagctgagaagcggcttaaagaggtggtgctccaggtggaggaggagcggagggtggctgaccagctccgggaccagctggagaagggaaaccttcgagtcaagcagctgaagcggcagctggaggaggccgaggaggaggcatcccgggctcaggccggccgccggaggctgcagcgtgagctggaagatgtcacagagtcggccgagtccatgaaccgtgaagtgaccacactgaggaaccggcttcgacgcggccccctcaccttcaccacccgcacggtgcgccaggtcttccgactagaggagggcgtggcatccgacgaggaggcagaggaagcacagcctgggtctgggccatccccggagcctgaggggtccccaccagcccacccccagtga

SEQ ID NO: 156972 - DNA, 5988 bp, Homo sapiens
  Payload ID: 10760
  Gene Symbol: MYH14
  Gene Name: myosin, heavy chain 14, non-muscle
  Uniprot ID: Q7Z406
  ENST ID: ENST00000596571
  CDS Start-End: 1-5988
atggcagccgtgaccatgtcggtgcccgggcggaaggcgccccccaggccgggcccagtgcccgaggcggcccagccgttcctgttcacgccccgcgggcccagcgcgggtggcgggcctggctcgggcacctccccgcaggtggagtggacggcccggcgtctcgtgtgggtgccttcggagcttcacgggttcgaggcggcggcgctgcgggacgaaggcgaggaggaggcggaggtggagctggcggagagcgggaggcggctgcgactgccgcgggaccagatccagcgcatgaacccgcccaagttcagcaaggccgaggacatggccgagctgacctgcctcaacgaggcctcggtcctgcacaacctccgggagcggtactactccggcctcatctacacgtactccggccttttctgtgtggtcatcaacccgtacaagcagcttcccatctacacagaagccattgtggagatgtaccggggcaagaagcgccacgaggtgccaccccacgtgtacgcagtgaccgagggggcctatcggagcatgctgcaggatcgtgaggaccagtccattctctgcactggagagtctggagctgggaagacggaaaacaccaagaaggtcatccagtacctcgcccacgtggcgtcgtctccaaagggcaggaaggagccgggtgtccccggtgagctggagcggcagctgcttcaggccaaccccatcctagaggcctttggcaatgccaagacagtgaagaatgacaactcctcccgattcggcaaattcatccgcatcaactttgatgttgccgggtacatcgtgggcgccaacattgagacctacctgctggagaagtcgcgggccatccgccaggccaaggacgagtgcagcttccacatcttctaccagctgctggggggcgctggagagcagctcaaagccgacctcctcctcgagccctgctcccactaccggttcctgaccaacgggccgtcatcctctcccggccaggagcgggaactcttccaggagacgctggagtcgctgcgggtcctgggattcagccacgaggaaatcatctccatgctgcggatggtctcagcagttctccagtttggcaacattgccttgaagagagaacggaacaccgatcaagccaccatgcctgacaacacagctgcacagaagctctgccgcctcttgggactgggggtgacggatttctcccgagccttgctcacccctcgcatcaaagttggccgagactatgtgcagaaagcccagactaaggaacaggctgacttcgcgctggaggccctggccaaggccacctacgagcgcctcttccgctggctggttctgcgcctcaaccgggccttggaccgcagcccccgccaaggcgcctccttcctgggcatcctggacatcgcgggctttgagatcttccagctgaactccttcgagcagctctgcatcaactacaccaacgagaagctgcagcagctcttcaaccacaccatgttcgtgctggagcaggaggagtaccagcgtgagggcatcccctggaccttcctcgactttggcctcgacctgcagccctgcatcgacctcatcgagcggccggccaacccccctggactcctggccctgctggatgaggagtgctggttcccgaaggccacagacaagtcgtttgtggagaaggtagcccaggagcagggcggccaccccaagttccagcggccgaggcacctgcgggatcaggccgacttcagtgttctccactacgcgggcaaggtcgactacaaggccaacgagtggctgatgaaaaacatggaccctctgaatgacaacgtcgcagccttgctccaccagagcacagaccggctgacggcagagatctggaaagacgtggagggcatcgtggggctggaacaggtgagcagcctgggcgacggcccaccaggtggccgcccccgtcggggtatgttccggacagtgggacagctctacaaggagtccctgagccgcctcatggccacactcagcaacaccaaccccagttttgtccgctgcattgtccccaaccacgagaagagggccgggaagctggagccacggctggtgctggaccagcttcgctgcaacggggtcctggagggcatccgcatctgtcgccagggcttccccaaccgcatcctcttccaggagttccggcagcgatacgagatcctgacacccaatgccatccccaagggcttcatggatgggaagcaggcctgtgaaaagatgatccaggcgctggaactggaccccaacctctaccgcgtgggacagagcaagatcttcttccgggctggggtcctggcccagctggaagaggagcgagacctgaaggtcaccgacatcatcgtctccttccaggcagctgcccggggatacctggctcgcagggccttccagaagcgccagcagcagcagagcgccctgagggtgatgcagcggaactgcgcggcctacctcaagctgagacactggcagtggtggcggctgtttaccaaggtgaagccactgctgcaggtgacgcggcaggatgaggtgctgcaggcacgggcccaggagctgcagaaagtgcaggagctacagcagcagagcgcccgcgaagttggggagctccagggccgagtggcacagctggaagaggagcgcgcccgcctggcagagcaattgcgagcagaggcagaactgtgtgcagaggccgaggagacgcgggggaggctggcagcccgcaagcaggagctggagctggtggtgtcagagctggaggctcgcgtgggcgaggaggaggagtgcagccgtcaaatgcaaaccgagaagaagaggctgcagcagcacatacaggagctagaggcccaccttgaggctgaggagggtgcgcggcagaagctgcagctggagaaggtgacgacagaggcaaaaatgaagaaatttgaagaggacctgctgctcctggaagaccagaattccaagctgagcaaggagcggaagctgctggaagatcgtctggccgagttctcatcccaggcagctgaggaggaggagaaggtcaagagcctcaataagctacggctcaaatatgaggccacaatcgcagacatggaggaccgcctacggaaggaggagaagggtcgccaggagctggagaagctgaagcggaggctggatggggagagctcagagctgcaggagcagatggtggagcagcaacagcgggcagaggagctgcgggcccagctgggccggaaggaggaggagctgcaggctgccctggccagggcagaagacgagggtggggcccgggcccagctgctgaaatccctgcgggaggctcaagcagccctggccgaggcccaggaggacctggagtctgagcgtgtggccaggaccaaggcggagaagcagcgccgggacctgggcgaggagctggaggcgctgcggggcgagctggaggacacgctggactccaccaacgcacagcaggagctccggtccaagagggaacaggaggtgacggagctgaagaagactctggaggaggagactcgcatccacgaggcggcagtgcaggagctgaggcagcgccacggccaggccctgggggagctggcggagcagctggagcaggcccggaggggcaaaggtgcatgggagaagacccggctggccctggaggccgaggtgtccgagctgcgggcagaactgagcagcctgcagactgcacgtcaggagggtgagcagcggaggcgccgcctggagttacagctgcaggaggtgcagggccgggctggtgatggggagagggcacgagcggaggctgctgagaagctgcagcgagcccaggctgaactggagaatgtgtctggggcgctgaacgaggctgagtccaaaaccatccgtcttagcaaggagctgagcagcacagaagcccagctgcacgatgcccaggagctgctgcaggaggagaccagggcgaaattggccttggggtcccgggtgcgagccatggaggctgaggcagccgggctgcgtgagcagctggaggaggaggcagctgccagggaacgggcgggccgtgaactgcagactgcccaggcccagctttccgagtggcggcggcgccaggaggaggaggcaggggcactggaggcaggggaggaggcacggcgccgggcagcccgggaggccgaggccctgacccagcgcctggcagaaaagacagagaccgtggatcggctggagcggggccgccgccggctgcagcaggagctggacgacgccaccatggacctggagcagcagcggcagcttgtgagcaccctggagaagaagcagcgcaagtttgaccagcttctggcagaggagaaggcagctgtacttcgggcagtggaggaacgtgagcgggccgaggcagagggccgggagcgtgaggctcgggccctgtcactgacacgggcactggaggaggagcaggaggcacgtgaggagctggagcggcagaaccgggccctgcgggctgagctggaggcactgctgagcagcaaggatgacgtcggcaagagcgtgcatgagctggaacgagcctgccgggtagcagaacaggcagccaatgatctgcgagcacaggtgacagaactggaggatgagctgacagcggccgaggatgccaagctgcgtctggaggtgactgtgcaggctctcaagactcagcatgagcgtgacctgcagggccgtgatgaggctggtgaagagaggcggaggcagctggccaagcagctgagagatgcagaggtggagcgggatgaggagcggaagcagcgcactctggccgtggctgcccgcaagaagctggagggagagctggaggagctgaaggctcagatggcctctgccggccagggcaaggaggaggcggtgaagcagcttcgcaagatgcaggcccagatgaaggagctatggcgggaggtggaggagacacgcacctcccgggaggagatcttctcccagaatcgggaaagtgaaaagcgcctcaagggcctggaggctgaggtgctgcggctgcaggaggaactggccgcctcggaccgtgctcggcggcaggcccagcaggaccgggatgagatggcagatgaggtggccaatggtaaccttagcaaggcagccattctggaggagaagcgtcagctggaggggcgcctggggcagttggaggaagagctggaggaggagcagagcaactcggagctgctcaatgaccgctaccgcaagctgctcctgcaggtagagtcactgaccacagagctgtcagctgagcgcagtttctcagccaaggcagagagcgggcggcagcagctggaacggcagatccaggagctacggggacgcctgggtgaggaggatgctggggcccgtgcccgccacaagatgaccattgctgcccttgagtctaagttggcccaggctgaggagcagctagagcaagagaccagagagcgcatcctctctggaaagctggtgcgcagagctgagaagcggcttaaagaggtggtgctccaggtggaggaggagcggagggtggctgaccagctccgggaccagctggagaagggaaaccttcgagtcaagcagctgaagcggcagctggaggaggccgaggaggaggcatcccgggctcaggccggccgccggaggctgcagcgtgagctggaagatgtcacagagtcggccgagtccatgaaccgtgaagtgaccacactgaggaaccggcttcgacgcggccccctcaccttcaccacccgcacggtgcgccaggtcttccgactagaggagggcgtggcatccgacgaggaggcagaggaagcacagcctgggtctgggccatccccggagcctgaggggtccccaccagcccacccccagtga

SEQ ID NO: 156973 - DNA, 7074 bp, Homo sapiens
  Payload ID: 10761
  Gene Symbol: MYH15
  Gene Name: myosin, heavy chain 15
  Uniprot ID: Q9Y2K3
  ENST ID: ENST00000273353
  CDS Start-End: 58-5898
catttctacttcatatgatcattttaattgtatttacctcatcttaccaaaaagatcatggttgaatcttgcctactcacgtttagggcctttttttggtggattgctttaataaagatggatctgtcagaccttggagaagccgcagccttcctcagaagaagtgaagctgagctgcttctactacaggccacagccttggatgggaagaagaaatgctggattcctgatggtgagaatgcttatatcgaggctgaggtaaaagggagtgaagatgatggaacagtaattgttgagacagcagatggagagagtctgagcataaaggaggacaaaatccagcagatgaatcctccagagtttgaaatgattgaagacatggcaatgctgactcacctcaatgaggcatccgtgctgcataccctgaagcggcgctatggccagtggatgatctatacatattcaggtctcttctgtgtgaccataaacccttacaaatggcttcccgtgtatcagaaagaagtcatggccgcctacaaagggaagaggcgatcagaggctccccctcacatctttgctgttgccaataacgcctttcaggacatgcttcacaatcgagaaaatcagtctatactcttcacaggagaatctggtgctggaaagactgtgaacagcaaacatattatccagtattttgccaccatagcagccatgattgaatccaggaaaaagcagggggcgttagaagatcaaatcatgcaagcgaatactatcttggaagcatttggaaatgctaaaaccctgagaaatgacaactcctctcgttttggcaaattcatcaggatgcactttggtgccagaggcatgctgtcatctgtggacattgatatctatttgcttgaaaagtccagggtgattttccagcaggctggagagaggaactaccacatattctatcaaattctatctggacaaaaagagcttcatgacctgctcctggtatctgcaaatccctcagacttccacttttgctcctgtggagcagttactgtggagagcttggatgatgctgaagaattgctggccacagaacaagccatggacatcttgggctttcttcctgatgagaagtatggatgctataaactcactggagccatcatgcactttggaaatatgaaatttaaacagaaacctagagaagagcaactggaagcagatggcacagaaaatgctgacaaagctgctttcctcatgggcattaactcctctgagttggtaaagtgcttgatccatcctagaatcaaagttggtaacgaatatgttaccagaggtcaaactatagaacaggtaacctgtgctgtcggtgccctgtccaagtcaatgtatgaaaggatgtttaagtggctagtggcacggatcaacagggccctggatgccaagctgtcaaggcagttcttcattggcattcttgacatcactggttttgaaatccttgagtataatagccttgagcaactttgcattaattttaccaatgaaaaattacaacaattcttcaattggcacatgtttgttctggagcaagaggaatataagaaagaaagcattgaatgggtgtctattggctttggtctggatttgcaagcttgcatagatctcattgagaagccaatgggcatcctttccatccttgaagaagagtgtatgtttcctaaggctacagacctgactttcaagaccaaactctttgacaaccattttggaaagtcggttcatctccagaagcccaagcctgataagaagaaatttgaagctcattttgaacttgtccattatgcaggagtggtaccttataatatcagtggttggctggaaaagaacaaagacctccttaatgaaacagtggtagctgtatttcagaagtcttccaacagactcctggcgagcctttttgaaaattacatgagtactgacagtgctataccatttggggagaagaaacgaaagaaaggagcttcattccaaacggttgcatctctgcataaagaaaacctgaataaattgatgactaatctgaaatcaacagcacctcattttgtgagatgcataaatcccaatgtgaacaaaataccaggtatactggacccttacttggttctacagcagttgcgctgtaatggtgtcttggaagggactaggatatgccgtgaaggttttccaaaccgactgcagtatgctgattttaaacaaaggtactgcattctgaatccaaggacctttccaaagagcaagtttgtgagcagcagaaaagcagctgaagaattacttggctccttggagatagaccatacccagtaccgatttggaatcactaaggtgttttttaaagctgggtttctgggccaactggaagcaataagagatgagagactatctaaagtcttcacattgttccaagccagagcacagggcaaactgatgcgaatcaaattccagaagattctggaagaaagggatgcacttattttgatccaatggaacataagagctttcatggctgtgaagaactggccctggatgaggctcttcttcaagatcaagcctcttgttaaatcttcagaagtaggagaagaagtagctggactgaaggaagagtgtgcacaattacagaaagccttggagaaatcagagtttcagagggaggaactgaaagcaaagcaagtatccctcactcaggaaaaaaatgacctgattcttcagcttcaggctgagcaagagacactggcaaatgttgaagagcagtgcgagtggctgattaaatccaagatccagctggaggccagagtaaaggagctgtcggagagggtggaggaagaagaggagataaattctgagctgactgccagggggcggaaactcgaagatgaatgttttgagttgaagaaagaaatcgatgacctggaaacaatgttggtgaagtcagagaaggagaagcgtactacagagcacaaggtcaagaacttgactgaggaagtagagtttctaaatgaggatatcagcaaacttaacagagcagccaaggttgtgcaggaggcccatcagcagaccctggatgacctgcacatggaggaggagaagctcagcagcctgagcaaagcaaatctgaagctggaacagcaagttgatgagcttgagggtgcccttgagcaggagagaaaagcgagaatgaactgtgaaagggaactgcacaaactggagggcaatttaaagctgaatcgggaaagtatggagaacctggaaagcagccagcgacacctggcagaagagctgaggaaaaaagaattagaattgagtcagatgaattcaaaagtggagaatgagaaaggcctggtagctcagcttcagaagacggttaaagagcttcagactcaaataaaggatttgaaagagaaactagaagctgaaaggaccactcgagccaagatggaaagggagagagctgacctcacccaagacctggctgacttgaatgagaggctggaggaggtaggaggatccagtttggctcagctggaaataactaagaaacaggaaaccaaattccagaagctgcaccgagacatggaagaggccactctgcactttgagacaacttctgcatctttgaagaagagacatgcagacagcctggctgagctcgagggccaggtagaaaatctacagcaggtcaagcagaaactggaaaaagacaagagtgacttgcagctagaagtagatgacctcctgacccgtgttgagcagatgacaagagctaaggcaaatgctgagaaactctgtactctatatgaagagcgcttgcatgaagcaactgcaaagctagataaggtgactcagttggcaaatgacctggcagcacaaaagacaaagctgtggagtgagagtggcgagttcctacggaggcttgaagagaaggaggctctgataaaccaactttccagggaaaagagcaacttcactcggcagattgaagacctgagagggcagctggaaaaggagaccaaatcccagagtgccctggcccatgccctgcagaaggctcagcgtgactgtgaccttctacgagagcagtatgaggaagaacaagaggtcaaggctgagctgcaccggaccttatccaaagtcaatgctgaaatggtgcaatggagaatgaagtatgaaaacaatgtcatccagagaacagaagacttggaggatgccaagaaggaactggcaattagattgcaggaggcagccgaagccatgggggtggccaatgccagaaatgcctccttggagagagccaggcaccagctgcagctggagctcggggacgccctgtctgacctcgggaaggtccgctctgcagcagccaggctggaccagaagcagctgcagtctggcaaggcccttgccgactggaagcagaagcacgaggagtcccaggcgttgctggatgcctctcagaaggaagttcaggctctcagtacagagctcctcaagctcaagaacacctatgaggagagcatcgtgggccaggagacactcaggagggagaacaagaacctccaagaagagatttctaatctgacaaaccaggttagagaagggaccaagaacttaactgaaatggaaaaggtcaagaaactaattgaagaagagaagacagaagtccaggtgacactggaagaaacagagggagccctggaacgtaatgaaagcaagattcttcatttccagcttgaactcttggaagctaaagcagaacttgaaagaaagctttcagagaaagatgaagaaatagaaaattttaggaggaagcagcagtgtaccattgactccctgcagtctagtctggattctgaagctaagagcagaattgaggttacccggctgaagaagaagatggaagaggacctcaatgagatggaactccagcttagctgtgccaaccggcaggtgtcagaagcaaccaaatccctgggccagcttcagattcaaatcaaggaccttcaaatgcagctggatgacagcacacaactgaacagtgatctgaaggagcaggtggctgtggctgagcggcgcaactctcttcttcagtctgaactagaggatctaaggtccctgcaagagcagacagagcgtggccgcaggctgtcagaagaagagctcctggaagcaacagaaagaatcaatcttttctatacccagaacacaagcctcctcagccagaagaagaaactggaggctgatgttgcccggatgcagaaagaagctgaagaggtggtgcaggagtgtcaaaatgcagaagagaaggccaagaaggcagccattgaggcagcaaacttgtcagaagaactgaagaagaagcaagacaccattgcccacttggaaaggacaagagaaaatatggagcagacaattacagacttacagaaaaggctggctgaagctgaacagatggccctgatggggagtagaaagcaaatccagaaactagaatccagggttcgtgaactggaaggtgaactggagggtgaaatccgtcgcagtgcagaggcccagaggggagcccgcagacttgagcgatgcatcaaagagctgacctatcaggcagaggaagacaagaagaatctgagcaggatgcaaactcagatggataaacttcagctaaaagtgcaaaattacaagcagcaagtcgaggtggcggaaacacaagccaatcaatacctttccaagtataagaaacagcaacatgagttgaatgaagtgaaggaaagggcagaggtggcagaatctcaagtcaataaactcaaaattaaagcaagagagtttgggaaaaaggttcaagaagaatagcatcccctgctttgaaaggacaacagctggagaagtacaaggaaggtgctgtttcatggccaaaaacttaggttgcatggaaacatttttaaaaacatgtttaaattgcttttcacaccatataaacaaggcaattagaaaaataattaaagggaatatcattgcttccacagttaatggggattttttgatcctcaaatgcaagtaaactaccttctaatgcttcacatgacagattaaataaatggaagaaccttttcaattctgatgtttaaaaaatgaataaatacttgatcctttgtccatatttcctcttaatgggtaggactcatagaagatgtccttagaccagtcacgcttcatggggactagggcatgttggtgaatggtttttactaaagttaggcaactttggcttgattcacccctaaatctatgaatgtatattgtgagccagcagtggtagaatggaagtcataagatctcctcagcattgtgatataaatatagctatagttaggcaatttgaacatgtaggcaaaactctcctaatcaacacacatgtaggctatatgctggtacatgctttaaacatggaggtaaccccacacgagacattcagtgacaggtaatatgctggatttgtgcagtaccgatttggctcagctggaggaacatgtcccggaattcctctctctcatggttctggattggagtaggtcataaagaaatttgcattaatttgatcagcagctattttatactcataaggtcagtgtacagacccaagcatggtgacagcttgaaaatatgactccaggccaaaaaggggagctagaagagaccagagacagctccctggacccagagctcttccagctcctgccagcctcctccttcagctttgcaaagtactggccaggtgtgtgtgcagctccatggcaaccagcatcagcttttcctgagatcacacacagcattgcagtggaggccgtgagacagacatgggttctgtttgttcttatggacttcccttcatccttgctgcattcacagtcgacctacagtgacttcaggcccagaaccagatgcagagggaacagcctggcctagacttctccaccagcacccacaattgtgtaaggctgaagctctataataaatctttattctgtc

SEQ ID NO: 156974 - DNA, 6339 bp, Homo sapiens
  Payload ID: 10762
  Gene Symbol: MYH2
  Gene Name: myosin, heavy chain 2, skeletal muscle, adult
  Uniprot ID: Q9UKX2
  ENST ID: ENST00000245503
  CDS Start-End: 386-6211
aaaaagaagttccgagggaagccaggtatcctggctgcccagccactgcctttatccaccagcttgactctttcagatcatcttctcaaattatccataggagatttatccacatactcaataagaaaaatatttctaattatatccaaccattcttaatatgaatgagaattatgcggggacgctagattgccaagaggtattttgccaaacaattccttttgacttaagaaagaagaggcagctgcattgtttccatagctatccatataaaagagcccttggaatgaggctgactcgtcctgctttaaaaagctccaagaactgtctcactcccaggctacatcttctcacttgctaacaaggacctctgagttcagcagccatgagttcagactcagaattggctgtttttggggaggctgctcctttcctccgaaagtctgaaagggagcgcattgaggcccagaataggccctttgatgccaaaacatctgtctttgtggcggagcccaaagaatcctttgtcaaagggaccatccagagcagagaaggaggaaaagtgacggtgaagactgagggaggagcgactctgacagtgaaggatgatcaggtcttccccatgaaccctcccaaatatgacaagatcgaggatatggccatgatgactcatctgcatgagcctgctgtgctgtacaacctcaaagaacgttatgcagcctggatgatctacacctattcaggtctcttctgtgtcactgtcaacccctacaagtggctgcctgtgtataagcccgaggtggtgacagcctaccgaggcaaaaagcgccaggaggccccgccccacatcttctccatctctgacaacgcctatcagttcatgctgactgaccgagagaatcagtcaatcctgatcactggagaatctggtgcagggaagactgtgaacaccaagcgtgtcatccagtactttgcaacaattgcagttactggtgagaagaagaaggaagaaattacttctggcaaaatacaggggactctggaagatcaaatcatcagtgccaaccccctactggaggcctttggcaacgccaagaccgtgaggaatgacaactcctctcgctttggtaaattcatcagaatccactttggcactactggaaaactggcatctgctgatattgaaacatatctgctagagaagtctagagttgttttccagcttaaggctgagagaagttatcatattttttaccagattacatcgaataagaaaccagaacttattgaaatgcttctgattaccacgaacccatatgattacccatttgtcagtcaaggggagatcagtgtggccagcatcgatgatcaggaagaactgatggccacagatagtgctattgatattttgggctttactaatgaagaaaaggtctccatttacaagctcacgggggctgtgatgcattatgggaacctaaaatttaagcaaaagcagcgtgaggagcaagcagagccagatggcacagaagttgctgacaaggcggcctacctccagagtctgaactctgcagatctgctcaaagctctctgctaccccagggtcaaggtcggcaatgagtatgtcaccaaaggccagactgtagaacaggtgtccaacgcagtaggtgctctggccaaagccgtctacgagaagatgttcctgtggatggttgcccgcatcaaccagcagctggacaccaagcagcccaggcagtacttcatcggggtcttggacattgctggttttgagatttttgatttcaacagcctggagcagctgtgcatcaacttcaccaatgagaaactgcaacagtttttcaaccaccacatgttcgtgctggagcaggaggagtacaagaaggaaggcatcgagtggacgttcatcgacttcgggatggacctggctgcctgcatcgagctcatcgagaagcctatgggcatcttctccatcctggaagaggagtgcatgttccctaaggcaacagacacctccttcaagaacaagctgtatgaccagcacctgggcaagtctgccaacttccagaagcccaaggtggtcaaaggcaaggccgaggcccacttcgctctgattcactatgctggtgttgtggactacaacattactggctggctggagaagaacaaggaccccctgaatgagaccgtggttggactgtaccagaagtctgcaatgaaaactctagctcagctcttctctggggctcaaactgctgaaggagagggagctggtggaggggccaagaaaggtggtaagaagaagggctcttctttccagacagtgtctgcccttttcagagagaatttgaacaagctgatgaccaacctcaggagtacccatcctcactttgtgaggtgtatcatccccaatgagacaaaaactcctggtgccatggagcatgagcttgtcctccaccagctgaggtgtaacggtgtgctggaaggcatccgcatctgtaggaaaggatttccaagcagaatcctttatgcagacttcaaacagagatacaaggtattaaatgcaagtgcaatccctgaagggcaattcattgatagcaagaaggcctctgagaagctccttgcatccatcgacattgaccacacccagtataaatttgggcacaccaaggtctttttcaaagctggtcttctggggctcctagaggagatgcgagatgacaagctggcccagctgattacccgaacccaggccaggtgcagagggttcttggcaagagtggagtaccagaggatggtggagagaagggaggccatcttctgtatccagtacaatatcagatccttcatgaatgtcaagcactggccctggatgaaactcttcttcaagatcaagcctctgttgaagagtgcagaaactgagaaggagatggccaccatgaaggaagaatttcagaaaattaaagacgaacttgccaagtcagaggcaaaaaggaaggaactggaagaaaagatggtgacgctgttgaaagaaaaaaatgacttgcagctccaagttcaggctgaagccgaaggcttggctgatgcagaggaaaggtgtgaccagctaatcaaaaccaaaatccagctagaagccaaaatcaaagaggtgactgagagagctgaggatgaggaagagatcaatgctgagctgacagccaagaagaggaaactggaggatgaatgttcagaactcaagaaagacattgatgaccttgagctgacactggccaaggttgagaaggagaaacatgccacagaaaacaaggtgaaaaacctcacagaagagatggcaggtctggatgaaaccattgctaagctgaccaaggagaagaaggctctccaggaggcccaccagcagaccctggatgacctgcaggcagaggaggacaaagtcaacaccctgaccaaagctaaaatcaaacttgaacaacaagtggatgatcttgaagggtccttggagcaagaaaagaaacttcgcatggacctagaaagggctaagaggaaacttgagggtgacttgaagttggcccaagaatccataatggacattgaaaatgagaaacagcaacttgatgaaaagctcaaaaagaaagagtttgaaatcagcaatctgcaaagcaagattgaagatgaacaggcacttggcattcaattgcagaagaaaattaaagaattgcaagcccgcattgaggagctggaggaggaaatcgaggcagagcgggcctcccgggccaaagcagagaagcagcgctctgacctctcccgggagctggaggagatcagcgagaggctggaagaagccggtggggccacttcagcccagattgagatgaacaagaagcgggaggctgagttccagaaaatgcgcagggacctggaggaggccaccctacagcatgaagccacagcggccaccctgaggaagaagcatgcagatagtgtggccgagcttggggagcagattgacaacctgcagcgagtgaagcagaagctggagaaggagaagagtgagatgaagatggagattgatgaccttgctagtaatgtagaaacggtctccaaagccaagggaaacctagagaaaatgtgccggactctagaggaccaactgagtgaactgaaatcaaaggaagaggagcagcagcggctgatcaatgacctgactgcgcagagggggcgcctgcagactgaatctggtgagttttcacgccagcttgatgaaaaggaagctctggtgtctcagttatcaagaggcaaacaagcctttactcaacagattgaagaattaaagaggcaacttgaagaggagataaaagccaagaacgccctggcgcatgccctgcagtcttcccgccacgactgtgacctgctgcgggaacagtatgaggaggagcaggaatccaaggccgagctgcagagagcactgtccaaggccaacaccgaggttgcccaatggaggaccaaatacgagacggacgccatccagcgcacagaggagctggaggaggccaagaagaagctggcccagcggctgcaggcagctgaggaacatgtagaagctgtgaacgccaaatgtgcttccctcgaaaagacgaagcagcggctgcagaatgaggtcgaggacctcatgcttgatgtggagaggacaaatgccgcctgtgccgcccttgacaaaaagcaaaggaacttcgataagatcctggcagaatggaaacagaaatgtgaggaaacgcatgctgagcttgaggcctcccagaaggaggcccgttcccttggcactgagctgttcaagataaagaatgcctatgaggaatctttggatcagctagaaaccctgaagcgagagaacaaaaacttacagcaggagatttctgacctcacggaacagattgcagaaggagggaaacgtatccatgaactggagaaaataaagaaacaagtggaacaagaaaagtgtgaacttcaggctgctttagaagaagcagaggcatctcttgaacatgaagagggaaagatcctgcgcatccagcttgagttgaaccaagtcaagtctgaggttgataggaaaattgctgaaaaagatgaggaaattgaccagctgaagagaaaccacattagaatcgtggagtccatgcagagcacgctggatgctgagatcaggagtaggaatgatgccattaggctcaagaagaagatggagggagacctcaatgaaatggaaatccagctgaaccatgccaaccgcatggctgctgaggccctgaggaactacaggaacacccaaggcatcctcaaggatacccagatccacctggatgatgctctccggagccaggaggacctgaaggaacagctggccatggtggagcgcagagccaacctgctgcaggctgagatcgaggagctgcgggccactctggaacagacagagaggagcagaaaaatcgcagaacaggagctcctggatgccagtgagcgtgttcagctactgcacacccagaacaccagcctgatcaacaccaagaagaagctggagacagatatttcccaaatgcaaggagagatggaggacattctccaggaagcccgcaatgcagaagaaaaggccaagaaggccatcactgatgccgccatgatggctgaggagctgaagaaggagcaggacaccagcgcccacctggagcggatgaagaagaacatggagcagaccgtgaaggatctgcagctccgtctggatgaggctgagcagctggccctgaagggtgggaagaagcagatccagaaactggaggccagggtacgggagctggaaggagaggttgagagtgagcaaaagcgtaatgctgaggctgtcaaaggtctgcgcaaacatgagaggcgagtgaaggaactcacttaccagacggaagaagatagaaagaatattctcaggcttcaagatttggtagataaacttcaggcaaaagtgaaatcttataagagacaagctgaggaggctgaggaacaatccaacaccaatctagctaaattccgcaagctccagcatgagctggaggaggccgaggaacgggctgacattgctgagtcccaggtgaacaaactgcgggtgaagagccgggaggttcacacaaaagtcataagtgaagagtgatcatgtcctgatgccatggaatgactgaagacaggcacaaaatgtgacatctttggtcatttccctctgtaattattgtgtattctaccctgttgcaaaggaaataaagcatagggtagtttgcaaac

SEQ ID NO: 156975 - DNA, 6078 bp, Homo sapiens
  Payload ID: 10762
  Gene Symbol: MYH2
  Gene Name: myosin, heavy chain 2, skeletal muscle, adult
  Uniprot ID: Q9UKX2
  ENST ID: ENST00000397183
  CDS Start-End: 129-5954
aggacgggcctttcaagagggacactggtcacaccgcccagtgtcagcagcagctgctagttctgaactgtctcactcccaggctacatcttctcacttgctaacaaggacctctgagttcagcagccatgagttcagactcagaattggctgtttttggggaggctgctcctttcctccgaaagtctgaaagggagcgcattgaggcccagaataggccctttgatgccaaaacatctgtctttgtggcggagcccaaagaatcctttgtcaaagggaccatccagagcagagaaggaggaaaagtgacggtgaagactgagggaggagcgactctgacagtgaaggatgatcaggtcttccccatgaaccctcccaaatatgacaagatcgaggatatggccatgatgactcatctgcatgagcctgctgtgctgtacaacctcaaagaacgttatgcagcctggatgatctacacctattcaggtctcttctgtgtcactgtcaacccctacaagtggctgcctgtgtataagcccgaggtggtgacagcctaccgaggcaaaaagcgccaggaggccccgccccacatcttctccatctctgacaacgcctatcagttcatgctgactgaccgagagaatcagtcaatcctgatcactggagaatctggtgcagggaagactgtgaacaccaagcgtgtcatccagtactttgcaacaattgcagttactggtgagaagaagaaggaagaaattacttctggcaaaatacaggggactctggaagatcaaatcatcagtgccaaccccctactggaggcctttggcaacgccaagaccgtgaggaatgacaactcctctcgctttggtaaattcatcagaatccactttggcactactggaaaactggcatctgctgatattgaaacatatctgctagagaagtctagagttgttttccagcttaaggctgagagaagttatcatattttttaccagattacatcgaataagaaaccagaacttattgaaatgcttctgattaccacgaacccatatgattacccatttgtcagtcaaggggagatcagtgtggccagcatcgatgatcaggaagaactgatggccacagatagtgctattgatattttgggctttactaatgaagaaaaggtctccatttacaagctcacgggggctgtgatgcattatgggaacctaaaatttaagcaaaagcagcgtgaggagcaagcagagccagatggcacagaagttgctgacaaggcggcctacctccagagtctgaactctgcagatctgctcaaagctctctgctaccccagggtcaaggtcggcaatgagtatgtcaccaaaggccagactgtagaacaggtgtccaacgcagtaggtgctctggccaaagccgtctacgagaagatgttcctgtggatggttgcccgcatcaaccagcagctggacaccaagcagcccaggcagtacttcatcggggtcttggacattgctggttttgagatttttgatttcaacagcctggagcagctgtgcatcaacttcaccaatgagaaactgcaacagtttttcaaccaccacatgttcgtgctggagcaggaggagtacaagaaggaaggcatcgagtggacgttcatcgacttcgggatggacctggctgcctgcatcgagctcatcgagaagcctatgggcatcttctccatcctggaagaggagtgcatgttccctaaggcaacagacacctccttcaagaacaagctgtatgaccagcacctgggcaagtctgccaacttccagaagcccaaggtggtcaaaggcaaggccgaggcccacttcgctctgattcactatgctggtgttgtggactacaacattactggctggctggagaagaacaaggaccccctgaatgagaccgtggttggactgtaccagaagtctgcaatgaaaactctagctcagctcttctctggggctcaaactgctgaaggagagggagctggtggaggggccaagaaaggtggtaagaagaagggctcttctttccagacagtgtctgcccttttcagagagaatttgaacaagctgatgaccaacctcaggagtacccatcctcactttgtgaggtgtatcatccccaatgagacaaaaactcctggtgccatggagcatgagcttgtcctccaccagctgaggtgtaacggtgtgctggaaggcatccgcatctgtaggaaaggatttccaagcagaatcctttatgcagacttcaaacagagatacaaggtattaaatgcaagtgcaatccctgaagggcaattcattgatagcaagaaggcctctgagaagctccttgcatccatcgacattgaccacacccagtataaatttgggcacaccaaggtctttttcaaagctggtcttctggggctcctagaggagatgcgagatgacaagctggcccagctgattacccgaacccaggccaggtgcagagggttcttggcaagagtggagtaccagaggatggtggagagaagggaggccatcttctgtatccagtacaatatcagatccttcatgaatgtcaagcactggccctggatgaaactcttcttcaagatcaagcctctgttgaagagtgcagaaactgagaaggagatggccaccatgaaggaagaatttcagaaaattaaagacgaacttgccaagtcagaggcaaaaaggaaggaactggaagaaaagatggtgacgctgttgaaagaaaaaaatgacttgcagctccaagttcaggctgaagccgaaggcttggctgatgcagaggaaaggtgtgaccagctaatcaaaaccaaaatccagctagaagccaaaatcaaagaggtgactgagagagctgaggatgaggaagagatcaatgctgagctgacagccaagaagaggaaactggaggatgaatgttcagaactcaagaaagacattgatgaccttgagctgacactggccaaggttgagaaggagaaacatgccacagaaaacaaggtgaaaaacctcacagaagagatggcaggtctggatgaaaccattgctaagctgaccaaggagaagaaggctctccaggaggcccaccagcagaccctggatgacctgcaggcagaggaggacaaagtcaacaccctgaccaaagctaaaatcaaacttgaacaacaagtggatgatcttgaagggtccttggagcaagaaaagaaacttcgcatggacctagaaagggctaagaggaaacttgagggtgacttgaagttggcccaagaatccataatggacattgaaaatgagaaacagcaacttgatgaaaagctcaaaaagaaagagtttgaaatcagcaatctgcaaagcaagattgaagatgaacaggcacttggcattcaattgcagaagaaaattaaagaattgcaagcccgcattgaggagctggaggaggaaatcgaggcagagcgggcctcccgggccaaagcagagaagcagcgctctgacctctcccgggagctggaggagatcagcgagaggctggaagaagccggtggggccacttcagcccagattgagatgaacaagaagcgggaggctgagttccagaaaatgcgcagggacctggaggaggccaccctacagcatgaagccacagcggccaccctgaggaagaagcatgcagatagtgtggccgagcttggggagcagattgacaacctgcagcgagtgaagcagaagctggagaaggagaagagtgagatgaagatggagattgatgaccttgctagtaatgtagaaacggtctccaaagccaagggaaacctagagaaaatgtgccggactctagaggaccaactgagtgaactgaaatcaaaggaagaggagcagcagcggctgatcaatgacctgactgcgcagagggggcgcctgcagactgaatctggtgagttttcacgccagcttgatgaaaaggaagctctggtgtctcagttatcaagaggcaaacaagcctttactcaacagattgaagaattaaagaggcaacttgaagaggagataaaagccaagaacgccctggcgcatgccctgcagtcttcccgccacgactgtgacctgctgcgggaacagtatgaggaggagcaggaatccaaggccgagctgcagagagcactgtccaaggccaacaccgaggttgcccaatggaggaccaaatacgagacggacgccatccagcgcacagaggagctggaggaggccaagaagaagctggcccagcggctgcaggcagctgaggaacatgtagaagctgtgaacgccaaatgtgcttccctcgaaaagacgaagcagcggctgcagaatgaggtcgaggacctcatgcttgatgtggagaggacaaatgccgcctgtgccgcccttgacaaaaagcaaaggaacttcgataagatcctggcagaatggaaacagaaatgtgaggaaacgcatgctgagcttgaggcctcccagaaggaggcccgttcccttggcactgagctgttcaagataaagaatgcctatgaggaatctttggatcagctagaaaccctgaagcgagagaacaaaaacttacagcaggagatttctgacctcacggaacagattgcagaaggagggaaacgtatccatgaactggagaaaataaagaaacaagtggaacaagaaaagtgtgaacttcaggctgctttagaagaagcagaggcatctcttgaacatgaagagggaaagatcctgcgcatccagcttgagttgaaccaagtcaagtctgaggttgataggaaaattgctgaaaaagatgaggaaattgaccagctgaagagaaaccacattagaatcgtggagtccatgcagagcacgctggatgctgagatcaggagtaggaatgatgccattaggctcaagaagaagatggagggagacctcaatgaaatggaaatccagctgaaccatgccaaccgcatggctgctgaggccctgaggaactacaggaacacccaaggcatcctcaaggatacccagatccacctggatgatgctctccggagccaggaggacctgaaggaacagctggccatggtggagcgcagagccaacctgctgcaggctgagatcgaggagctgcgggccactctggaacagacagagaggagcagaaaaatcgcagaacaggagctcctggatgccagtgagcgtgttcagctactgcacacccagaacaccagcctgatcaacaccaagaagaagctggagacagatatttcccaaatgcaaggagagatggaggacattctccaggaagcccgcaatgcagaagaaaaggccaagaaggccatcactgatgccgccatgatggctgaggagctgaagaaggagcaggacaccagcgcccacctggagcggatgaagaagaacatggagcagaccgtgaaggatctgcagctccgtctggatgaggctgagcagctggccctgaagggtgggaagaagcagatccagaaactggaggccagggtacgggagctggaaggagaggttgagagtgagcaaaagcgtaatgctgaggctgtcaaaggtctgcgcaaacatgagaggcgagtgaaggaactcacttaccagacggaagaagatagaaagaatattctcaggcttcaagatttggtagataaacttcaggcaaaagtgaaatcttataagagacaagctgaggaggctgaggaacaatccaacaccaatctagctaaattccgcaagctccagcatgagctggaggaggccgaggaacgggctgacattgctgagtcccaggtgaacaaactgcgggtgaagagccgggaggttcacacaaaagtcataagtgaagagtgatcatgtcctgatgccatggaatgactgaagacaggcacaaaatgtgacatctttggtcatttccctctgtaattattgtgtattctaccctgttgcaaaggaaataaagcatagggtagtttgc

SEQ ID NO: 156976 - DNA, 675 bp, Homo sapiens
  Payload ID: 10762
  Gene Symbol: MYH2
  Gene Name: myosin, heavy chain 2, skeletal muscle, adult
  ENST ID: ENST00000420805
  CDS Start-End: 129-675
aggacgggcctttcaagagggacactggtcacaccgcccagtgtcagcagcagctgctagttctgaactgtctcactcccaggctacatcttctcacttgctaacaaggacctctgagttcagcagccatgagttcagactcagaattggctgtttttggggaggctgctcctttcctccgaaagtctgaaagggagcgcattgaggcccagaataggccctttgatgccaaaacatctgtctttgtggcggagcccaaagaatcctttgtcaaagggaccatccagagcagagaaggaggaaaagtgacggtgaagactgagggaggagcgactctgacagtgaaggatgatcaggtcttccccatgaaccctcccaaatatgacaagatcgaggatatggccatgatgactcatctgcatgagcctgctgtgctgtacaacctcaaagaacgttatgcagcctggatgatctacacctattcaggtctcttctgtgtcactgtcaacccctacaagtggctgcctgtgtataagcccgaggtggtgacagcctaccgaggcaaaaagcgccaggaggccccgccccacatcttctccatctctgacaacgcctatcagttcatgctgactgaccgagagaatcagtcaatcctgatcactggagaatctggtg

SEQ ID NO: 156977 - DNA, 2528 bp, Homo sapiens
  Payload ID: 10762
  Gene Symbol: MYH2
  Gene Name: myosin, heavy chain 2, skeletal muscle, adult
  Uniprot ID: Q9UKX2
  ENST ID: ENST00000532183
  CDS Start-End: 270-2396
aggacgggcctttcaagagggacactggtcacaccgcccagtgtcagcagcagctgctagttctggtactgctccttctggaactgcacgttttacctctatgaattttgttacttctgtttacaatagcaagccatgccataaatgggattttttccccctctttttggtcaactaatcaagtgcttttcccttttcttttatagaactgtctcactcccaggctacatcttctcacttgctaacaaggacctctgagttcagcagccatgagttcagactcagaattggctgtttttggggaggctgctcctttcctccgaaagtctgaaagggagcgcattgaggcccagaataggccctttgatgccaaaacatctgtctttgtggcggagcccaaagaatcctttgtcaaagggaccatccagagcagagaaggaggaaaagtgacggtgaagactgagggaggagcgactctgacagtgaaggatgatcaggtcttccccatgaaccctcccaaatatgacaagatcgaggatatggccatgatgactcatctgcatgagcctgctgtgctgtacaacctcaaagaacgttatgcagcctggatgatctacacctattcaggtctcttctgtgtcactgtcaacccctacaagtggctgcctgtgtataagcccgaggtggtgacagcctaccgaggcaaaaagcgccaggaggccccgccccacatcttctccatctctgacaacgcctatcagttcatgctgactgaccgagagaatcagtcaatcctgatcactggagaatctggtgcagggaagactgtgaacaccaagcgtgtcatccagtactttgcaacaattgcagttactggtgagaagaagaaggaagaaattacttctggcaaaatacaggggactctggaagatcaaatcatcagtgccaaccccctactggaggcctttggcaacgccaagaccgtgaggaatgacaactcctctcgctttggtaaattcatcagaatccactttggcactactggaaaactggcatctgctgatattgaaacatatctgctagagaagtctagagttgttttccagcttaaggctgagagaagttatcatattttttaccagattacatcgaataagaaaccagaacttattgaaatgcttctgattaccacgaacccatatgattacccatttgtcagtcaaggggagatcagtgtggccagcatcgatgatcaggaagaactgatggccacagatagtgctattgatattttgggctttactaatgaagaaaaggtctccatttacaagctcacgggggctgtgatgcattatgggaacctaaaatttaagcaaaagcagcgtgaggagcaagcagagccagatggcacagaagttgctgacaaggcggcctacctccagagtctgaactctgcagatctgctcaaagctctctgctaccccagggtcaaggtcggcaatgagtatgtcaccaaaggccagactgtagaacaggtgtccaacgcagtaggtgctctggccaaagccgtctacgagaagatgttcctgtggatggttgcccgcatcaaccagcagctggacaccaagcagcccaggcagtacttcatcggggtcttggacattgctggttttgagatttttgatttcaacagcctggagcagctgtgcatcaacttcaccaatgagaaactgcaacagtttttcaaccaccacatgttcgtgctggagcaggaggagtacaagaaggaaggcatcgagtggacgttcatcgacttcgggatggacctggctgcctgcatcgagctcatcgagaagcctatgggcatcttctccatcctggaagaggagtgcatgttccctaaggcaacagacacctccttcaagaacaagctgtatgaccagcacctgggcaagtctgccaacttccagaagcccaaggtggtcaaaggcaaggccgaggcccacttcgctctgattcactatgctggtgttgtggactacaacattactggctggctggagaagaacaaggaccccctgaatgagaccgtggttggactgtaccagaagtctgcaatgaaaactctagctcagctcttctctggggctcaaactgctgaaggagagggagctggtggaggggccaagaaaggtggtaagaagaagggctcttctttccagacagtgtctgcccttttcagagaggaacaatccaacaccaatctagctaaattccgcaagctccagcatgagctggaggaggccgaggaacgggctgacattgctgagtcccaggtgaacaaactgcgggtgaagagccgggaggttcacacaaaagtcataagtgaagagtgatcatgtcctgatgccatggaatgactgaagacaggcacaaaatgtgacatctttggtcatttccctctgtaattattgtgtattctaccctgttgcaaaggaaataaagcatagggtagtttgcaaacaata

SEQ ID NO: 156978 - DNA, 572 bp, Homo sapiens
  Payload ID: 10762
  Gene Symbol: MYH2
  Gene Name: myosin, heavy chain 2, skeletal muscle, adult
  ENST ID: ENST00000578017
  CDS Start-End: 108-572
cacattttattgatttttgttgttgttgtttggtcactcaattaatgtaaacggttatctttcctgtttaccagactctgacagtgaaggatgatcaggtcttccccatgaaccctcccaaatatgacaagatcgaggatatggccatgatgactcatctgcatgagcctgctgtgctgtacaacctcaaagaacgttatgcagcctggatgatctacacctattcaggtctcttctgtgtcactgtcaacccctacaagtggctgcctgtgtataagcccgaggtggtgacagcctaccgaggcaaaaagcgccaggaggccccgccccacatcttctccatctctgacaacgcctatcagttcatgctgactgaccgagagaatcagtcaatcctgatcactggagaatctggtgcagggaagactgtgaacaccaagcgtgtcatccagtactttgcaacaattgcagttactggtgagaagaagaaggaagaaattacttctggcaaaatacaggggactctggaagatcaaatcatcagtgccaaccccctactggaggcctttggc

SEQ ID NO: 156979 - DNA, 2379 bp, Homo sapiens
  Payload ID: 10762
  Gene Symbol: MYH2
  Gene Name: myosin, heavy chain 2, skeletal muscle, adult
  Uniprot ID: Q9UKX2
  ENST ID: ENST00000622564
  CDS Start-End: 129-2255
atagctatccatataaaagagcccttggaatgaggctgactcgtcctgctttaaaaagctccaagaactgtctcactcccaggctacatcttctcacttgctaacaaggacctctgagttcagcagccatgagttcagactcagaattggctgtttttggggaggctgctcctttcctccgaaagtctgaaagggagcgcattgaggcccagaataggccctttgatgccaaaacatctgtctttgtggcggagcccaaagaatcctttgtcaaagggaccatccagagcagagaaggaggaaaagtgacggtgaagactgagggaggagcgactctgacagtgaaggatgatcaggtcttccccatgaaccctcccaaatatgacaagatcgaggatatggccatgatgactcatctgcatgagcctgctgtgctgtacaacctcaaagaacgttatgcagcctggatgatctacacctattcaggtctcttctgtgtcactgtcaacccctacaagtggctgcctgtgtataagcccgaggtggtgacagcctaccgaggcaaaaagcgccaggaggccccgccccacatcttctccatctctgacaacgcctatcagttcatgctgactgaccgagagaatcagtcaatcctgatcactggagaatctggtgcagggaagactgtgaacaccaagcgtgtcatccagtactttgcaacaattgcagttactggtgagaagaagaaggaagaaattacttctggcaaaatacaggggactctggaagatcaaatcatcagtgccaaccccctactggaggcctttggcaacgccaagaccgtgaggaatgacaactcctctcgctttggtaaattcatcagaatccactttggcactactggaaaactggcatctgctgatattgaaacatatctgctagagaagtctagagttgttttccagcttaaggctgagagaagttatcatattttttaccagattacatcgaataagaaaccagaacttattgaaatgcttctgattaccacgaacccatatgattacccatttgtcagtcaaggggagatcagtgtggccagcatcgatgatcaggaagaactgatggccacagatagtgctattgatattttgggctttactaatgaagaaaaggtctccatttacaagctcacgggggctgtgatgcattatgggaacctaaaatttaagcaaaagcagcgtgaggagcaagcagagccagatggcacagaagttgctgacaaggcggcctacctccagagtctgaactctgcagatctgctcaaagctctctgctaccccagggtcaaggtcggcaatgagtatgtcaccaaaggccagactgtagaacaggtgtccaacgcagtaggtgctctggccaaagccgtctacgagaagatgttcctgtggatggttgcccgcatcaaccagcagctggacaccaagcagcccaggcagtacttcatcggggtcttggacattgctggttttgagatttttgatttcaacagcctggagcagctgtgcatcaacttcaccaatgagaaactgcaacagtttttcaaccaccacatgttcgtgctggagcaggaggagtacaagaaggaaggcatcgagtggacgttcatcgacttcgggatggacctggctgcctgcatcgagctcatcgagaagcctatgggcatcttctccatcctggaagaggagtgcatgttccctaaggcaacagacacctccttcaagaacaagctgtatgaccagcacctgggcaagtctgccaacttccagaagcccaaggtggtcaaaggcaaggccgaggcccacttcgctctgattcactatgctggtgttgtggactacaacattactggctggctggagaagaacaaggaccccctgaatgagaccgtggttggactgtaccagaagtctgcaatgaaaactctagctcagctcttctctggggctcaaactgctgaaggagagggagctggtggaggggccaagaaaggtggtaagaagaagggctcttctttccagacagtgtctgcccttttcagagaggaacaatccaacaccaatctagctaaattccgcaagctccagcatgagctggaggaggccgaggaacgggctgacattgctgagtcccaggtgaacaaactgcgggtgaagagccgggaggttcacacaaaagtcataagtgaagagtgatcatgtcctgatgccatggaatgactgaagacaggcacaaaatgtgacatctttggtcatttccctctgtaattattgtgtattctaccctgttgcaaaggaaataaagcatagggtagtttgc

SEQ ID NO: 156980 - DNA, 6037 bp, Homo sapiens
  Payload ID: 10763
  Gene Symbol: MYH3
  Gene Name: myosin, heavy chain 3, skeletal muscle, embryonic
  Uniprot ID: P11055
  ENST ID: ENST00000583535
  CDS Start-End: 89-5911
gtggctcgcttgtgggcggaggtctgggatctcctggctgttgctgtcttctgctctcatcctgcaggtgggactctcagctgacaccatgagtagtgacactgaaatggaagtgttcggcatagctgctcctttcctccggaagtcagaaaaggagaggatcgaggctcagaaccagccctttgatgccaagacgtattgcttcgtggtggactcaaaggaagaatatgccaaggggaaaatcaagagttctcaggatgggaaggtcactgtggaaactgaggacaacaggaccctggtggtcaaaccagaggatgtgtacgccatgaacccccccaagttcgacaggatcgaagacatggccatgctgacgcacctgaatgagccagccgtgctgtacaacctgaaggaccgttacacatcttggatgatctatacctactcaggcctcttctgtgtcactgtcaacccctacaagtggctgccggtgtacaaccccgaggtggtggaaggctaccgaggcaaaaagcgccaggaggccccaccccacatcttctccatctctgacaacgcctatcagttcatgctgactgatcgtgaaaaccagtccattctgatcaccggagaatccggggcaggaaagactgtgaacaccaaacgggtcatccagtactttgcaacaattgcagctactggggacctggccaagaagaaggactccaaaatgaaggggactctggaagatcaaatcatcagtgccaatcccctgctggaggcctttgggaacgccaagactgtgaggaatgacaactcctcccgttttggcaagttcatccgaatccattttggaaccactgggaagctggcctctgcagatattgaaacttatcttctggaaaaatcaagagtcactttccagctgaaggctgaaagaagctaccacatcttctaccagattctttctaacaagaagcctgagctcatagagctgctgcttattacgaccaacccttacgactacccgttcattagccagggggagatcctggtggccagcatagatgatgcagaggagctgctggctacagacagcgccattgacatcctgggcttcaccccagaagagaaatctgggctctacaagctgacgggagccgtgatgcactacgggaacatgaagttcaagcagaagcagcgagaggagcaggccgagccggatggcacagaagtggctgacaaaacagcctatctgatgggcctgaactcttcggacctcctaaaagctttgtgctttcctagagtgaaagttgggaatgagtacgttaccaaaggtcaaactgtggatcaggttcaccatgctgtgaatgctctttcaaaatcagtttatgaaaagttgttcttgtggatggtcactcgcattaaccagcaactggatacgaagcttccaagacaacacttcattggtgttttggacattgcaggctttgaaatctttgagtataacagcctggagcagctgtgcatcaacttcaccaatgagaaactgcaacagtttttcaaccaccacatgttcgtgctggagcaggaggagtacaagaaggaaggcatcgagtggacgttcattgacttcgggatggacctggctgcctgcatcgagctcatcgagaagcctatgggcatcttctccatcctggaagaggagtgcatgttccccaaggcaacagacacctccttcaagaacaagctgtatgaccagcatcttggaaagtccaacaacttccagaagcccaaggtggtcaaaggcagggccgaggctcacttctcactgatccactatgcgggcaccgtggactacagtgtctcaggttggctggagaagaacaaggaccctctgaacgagactgtggttgggctgtaccagaagtcttccaacaggctcctggcacacctctatgccacgtttgccacggcggatgctgacagtggaaagaagaaagttgccaagaagaagggttcttccttccaaactgtctctgcccttttcagggaaaacctgaacaagctgatgtcaaatttaagaactactcaccctcattttgtgcgttgtataattcccaatgaaaccaaaactccaggggctatggaacacagccttgttctgcaccagctgcggtgtaacggtgtcctggagggcatccgcatctgcaggaaagggttcccaaacaggattctctatggcgattttaaacaaagataccgagtgctgaatgccagtgcaatccctgagggacaattcattgacagcaagaaagcctgtgaaaagcttctggcatccattgatattgaccacactcagtacaaatttggacataccaaggtgttcttcaaggctggcttgctgggaaccctggaagagatgcgggatgaccgcctggccaaactaatcacccggacacaagctgtgtgcagagggttcctcatgcgtgtggaattccagaagatggtgcagaggagggagtccatcttctgcatccagtacaacattcgctcattcatgaacgtcaagcactggccctggatgaaactcttcttcaagatcaagcccctcctcaagagtgcagagactgagaaagagatggccaccatgaaggaagaattccagaaaaccaaagatgaactcgccaagtcggaggcaaaaaggaaggagctagaggaaaaactggtgactctggtccaagagaagaatgacctgcagctccaagtacaagctgaaagcgaaaatttgttggatgctgaggaaagatgcgatcagctgatcaaagccaaattccagctcgaggccaagatcaaggaggtgacagagagagctgaagatgaggaggagatcaatgctgagctgacggccaagaagaggaaactggaggatgaatgctcagagctcaagaaagacattgatgaccttgagttgaccctggccaaggttgagaaggagaagcatgccacagagaacaaggttaaaaaccttactgaggaactctctgggttagatgaaacaattgcaaagttaaccagagagaagaaggccctccaagaggcgcaccagcaggccttggatgacctccaagctgaagaagacaaagtcaattctttgaacaaaaccaagagcaaactggaacagcaagtggaagacctggaaagctccctagaacaagaaaagaagctccgagtagacctggaaaggaacaaaaggaaattggaaggagacttgaagcttgctcaagagtccatattagatctggagaatgacaagcaacagctggacgaaaggctcaagaagaaagattttgaatattgtcaacttcaaagcaaagtggaagatgagcagacactgggcctccagtttcagaagaaaatcaaagagttgcaggctcgaattgaggagctggaagaggagatagaggcggagagggccacccgcgcgaagacagagaaacagcgcagcgactatgcccgggagctggaggagctgagcgagcggctggaggaggcgggaggcgtcacctccacgcagatagagctcaacaagaagcgggaggcggagttcctgaagctgcgcagggacctggaggaggccacactgcagcacgaagccatggtggccgcgctgaggaagaagcatgcggatagtgtggccgagcttggggagcagattgacaacctgcagcgggtcaagcagaagctggagaaggagaagagcgagttcaagctggagatcgatgacctctccagcagcatggagagtgtgtcgaaatctaaggcaaatctggaaaaaatctgccgaaccctggaggatcagttaagtgaggccaggggcaagaatgaggaaattcagaggagcctgagcgagctgaccacacagaagtctcgtttgcagaccgaggctggtgagctgagtcgtcagctggaagaaaaagaaagcatagtatcccaactttccaggagcaagcaagcctttacccagcaaacagaagagctcaagaggcagctggaggaagagaacaaggccaagaacgccctggcgcacgccctgcagtcctcccgccacgactgtgacctgctgcgggaacagtatgaggaggagcaggaaggcaaagctgagctgcagagggcgctgtccaaggccaatagtgaggttgcccagtggagaaccaaatacgagacggacgccatccagcgcacagaagagctggaggaggccaagaaaaaacttgctcagcgccttcaagattccgaggaacaggttgaggcagtgaatgctaaatgtgcttcactggagaagaccaagcagaggctgcaaggagaggtggaggatctgatggttgatgttgaaagagccaattccttggccgccgctctggacaagaagcagaggaactttgacaaggtgttggcagagtggaagacaaagtgtgaggagagccaagcagagctggaggcatccctgaaggagtcccgctccttgagcactgagctcttcaaactgaaaaatgcctacgaggaagccttagatcaacttgaaactgtgaaacgggaaaataagaacttagagcaggagatagcagatctcacagaacaaattgctgaaaatggcaaaaccatccatgaactggagaaatcaagaaagcagattgagctggaaaaggctgatatccagctggctctcgaggaagcagaggctgctcttgagcatgaagaagccaagatcctccgaatccagcttgaattgacacaagtgaaatcagaaattgatagaaagatcgccgagaaggatgaagagatcgagcagctgaagaggaactaccagagaacagtggaaaccatgcagagcgccctggacgccgaggtgcggagcaggaatgaagccatccggctcaagaagaagatggagggggacctgaatgaaatcgagatccagctgagccacgccaaccgccaggcggcggagaccctcaaacacctcaggagtgtccagggacagctgaaggatacgcagctccacctggatgatgccctccggggccaggaggacctgaaggagcagctggcgattgtggagcgcagagccaacctgctgcaggccgaggtggaggagctgcgggctactctggagcagacggagagggcccggaaactggcggaacaggagctcctggactccaacgagagggtgcagctgctgcatacccagaacaccagcctcatccacaccaagaagaagctggagacagacctcatgcagctccagagtgaggtagaagatgccagcagggatgcaaggaacgctgaggagaaggccaagaaggccatcacggacgctgccatgatggcggaggagctgaagaaggagcaggacaccagcgcccaccttgagcggatgaagaagaacctggaacagacggtgaaggacctgcagcatcgtctagatgaggccgagcagctggcgctgaagggcgggaagaagcagatccagaaactggagaccaggatccgagagctggagtttgaacttgagggagagcagaagaagaacacagagtctgttaagggcctgaggaagtatgagcggagggtcaaggagctgacgtaccagagtgaagaggacaggaagaatgtgctgagattgcaggatctggtggataaactgcaagtgaaagtcaagtcctacaagaggcaggcggaggaggctgatgaacaagccaatgctcatctcaccaaattccgaaaggctcagcatgagctggaggaggccgaggaacgtgcggatatcgcagaatctcaagtcaacaagctccgcgctaagactcgagacttcacctccagcaggatggtggtccacgagagtgaagagtgagccagcccttctggagcaggacagaagatatgcaaaatgtatattttcttgattcctgaccattgatacttaatgtccatgtgactctttttcacatgcaataaactttgctttgtttcaatctgg

SEQ ID NO: 156981 - DNA, 6016 bp, Homo sapiens
  Payload ID: 10764
  Gene Symbol: MYH4
  Gene Name: myosin, heavy chain 4, skeletal muscle
  Uniprot ID: Q9Y623
  ENST ID: ENST00000255381
  CDS Start-End: 112-5931
atccttcctcaaaattcttgaagtagttgtctgctttgagcctgccaccttcttcatctgataatacaagaggtatacctagtccagtactgccatcaataacctgcagccatgagttctgactctgagatggccatttttggggaggctgctcctttcctccgaaagtctgaaaaggagcgaattgaagctcagaacaagccttttgatgccaagacatcagtctttgtggtggaccctaaggagtcctacgtgaaagcaatagtgcagagcagggaaggggggaaggtgacagccaagaccgaagctggagctactgtaactgtgaaagaagaccaagtcttctccatgaaccctcccaaatatgacaagatcgaggacatggccatgatgactcacctgcatgagcctgctgtgctgtataacctcaaagagcgttacgcagcctggatgatctacacctactcgggcctcttctgtgtcaccgtcaacccctacaagtggctgccggtgtacaaccctgaggtggtgacagcctaccgaggcaaaaagcgccaggaggccccaccccatatcttctccatctctgacaatgcctatcagttcatgctaactgatcgtgaaaaccagtcaatcttgattactggagaatctggtgcagggaagactgtgaacacgaagcgtgtcatccagtactttgcaacaattgcagttactggagagaagaaaaaagaggaacctgcctctggcaaaatgcaggggacccttgaagatcaaatcatcagtgctaaccccctactggaagccttcggcaatgccaagaccgtgaggaatgacaactcctctcgctttggtaaattcatcaggatccattttggtgccacaggcaaactggcttctgcagatattgaaacatatctgctagagaagtcccgagttacttttcagctaaaggctgaaagaagctaccacatattttatcaaatcctgtccaataagaaaccagagctcattgaaatgcttctgatcaccaccaacccatatgacttcgcatttgtcagccaaggggaaattactgtgcccagcattgatgaccaggaagagctgatggccacagatagtgctgtggacatcctgggtttcactgctgatgaaaaggtggccatttacaagctcactggagccgtgatgcattatgggaacatgaaattcaagcaaaagcaaagggaagagcaggcagagccagatggcacggaagttgctgacaaagctgcttatctgacaagtctgaactctgctgacctgctcaaatctctctgctatcccagagtcaaggtcggcaatgagttcgtaaccaaaggccagactgtgcagcaggtgtacaatgcagtgggtgctctggccaaagccatctacgagaagatgttcctgtggatggtcacccgcatcaaccagcagctggacaccaagcagcccaggcagtacttcatcggggtcttggacattgctggctttgagatctttgatttcaacagcctggagcagctgtgcatcaacttcaccaacgagaaactgcaacagtttttcaaccaccacatgttcgtgctggagcaggaagagtacaagaaggaaggcatcgagtgggagttcattgacttcgggatggacctggctgcctgcatcgagctcatcgagaagcctatgggcatcttctccatcctagaagaggagtgcatgttccccaaggcaacagacacctccttcaagaacaagctgtatgaacaacatcttggaaaatccaacaacttccagaagcccaagcctgccaaaggcaagcctgaggctcacttctcactggtgcactatgccggcaccgtggactacaacatcgccggctggctggacaaaaacaaggaccccctgaatgagactgtggtggggctgtaccagaagtctgcaatgaagactctggctttcctcttctctggggcacaaactgctgaagcagagggtggtggtggaaagaaaggtggcaaaaagaagggttcttctttccagacagtgtcagctcttttcagggagaatttgaataagctgatgaccaacttgaggagcactcacccccactttgtgcggtgcatcatccccaatgaaactaaaactcctggtgccatggagcatgagcttgtcctgcatcagctgaggtgtaacggtgtgctggaaggcatccgcatctgcaggaaaggcttcccaagcagaatcctttatgcagacttcaaacagagatacaaggttctaaatgcgagtgctatcccagagggtcagttcattgacagcaagaaggcttctgagaaacttctagggtctattgaaattgaccacacccagtacaaattcggtcataccaaggttttcttcaaagctggcctgctgggaactctagaggaaatgcgagatgaaaagctagctcaactcatcacgcgcactcaagccatatgcagagggttcctgatgagagtggagttcagaaagatgatggagaggagagagtccatcttctgcattcagtacaacatccgtgctttcatgaatgtgaagcactggccctggatgaagctgtatttcaagatcaagcccctcctcaagagtgcagagacagagaaggagatggccaacatgaaggaagaatttgagaaaaccaaagaagagctggctaagacagaggcaaaaaggaaagaactagaagaaaagatggtgacgctaatgcaagagaaaaatgacttacaactccaagttcaagctgaagcagatgccttggctgatgcagaggaaagatgtgatcagttgattaaaaccaaaatccaacttgaggccaaaatcaaagaggtaactgaaagagctgaggatgaggaagagatcaatgctgagctgacagccaagaagaggaaactggaggatgaatgttcagagctcaagaaagacattgatgaccttgagctgacactggccaaggttgagaaggagaaacatgccacagagaacaaggtgaaaaacctcacagaagagatggcaggtctggatgaaaccattgctaagctgaccaaggagaagaaggctctccaggaggcccaccagcagaccctggatgacctgcagatggaggaggacaaagtcaacaccctgaccaaagctaaaaccaagctagaacagcaagtggacgatcttgaaggatctctggaacaagaaaagaaactttgcatggacttagaaagagccaagagaaaactggagggtgacctaaaattggcccaagaatccacaatggatacagaaaatgacaaacagcaacttaatgagaaactcaaaaagaaagagtttgaaatgagcaatctgcaaggcaagattgaagatgaacaagcccttgcaatacagctacaaaagaagatcaaagaattacaggcccgcattgaggagctggaggaggaaatcgaggcagagcgggcctcccgggccaaagcagagaagcagcgctctgacctctcccgggagctggaggagatcagtgagaggctggaagaagccggtggggccacttcagcccagattgagatgaacaagaagcgggaggctgagttccagaaaatgcgcagggacctggaagagtccaccctgcagcacgaagccacggcagctgctcttcggaagaagcacgcagatagtgtggctgagcttggggagcagattgacagccttcagcgggtcaagcagaagctggagaaggaaaagagtgagctgaagatggagatcaatgaccttgctagtaacatggagactgtctccaaagccaaggcaaactttgagaaaatgtgccgcaccctagaggaccagcttagtgaaataaaaacaaaggaagaagagcaacaacgcttaataaatgagttgtcagcccagaaggcacgtttacacacagaatcaggtgagttttcacgacagctagatgaaaaagatgctatggtttctcagctatcccgaggcaaacaagcatttacacaacagattgaagaattaaagaggcagctagaagaggagactaaggccaagagcactctggcccatgccctgcagtcagcccgccatgactgtgacctgctgcgggaacagtatgaggaggagcaggaagccaaggctgagctgcagaggggaatgtccaaggccaacagtgaggttgcccagtggaggaccaagtacgagacggacgccatccagcgcacagaggagctggaggaggccaagaagaagctagcccagcgtctgcaggatgcagaagaacatgtagaagctgtgaattccaaatgtgcttctcttgaaaagacaaagcagaggctacagaatgaagtagaggacctcatgattgatgtggaacgatctaatgctgcctgcatagctctcgataagaagcaaagaaactttgacaaggttctggcagaatggaaacagaagtatgaggaaactcaggctgaacttgaggcctcccagaaggagtcgcgttctctcagcactgagctgttcaaggtgaagaatgcctacgaggaatccctggatcatcttgaaactctaaagcgagagaataagaacttacaacaggagatttctgacctgacagagcaaattgcagagggtggaaagcatatccatgaactggagaaagtaaagaaacaacttgatcatgagaagagtgaactacagacttccctagaggaagcagaggcatctcttgagcatgaagaaggcaaaattcttcgcattcaacttgagctaaatcaggtgaaatctgagattgaccgaaaaattgctgaaaaagatgaagaactcgatcagctaaagaggaaccatctcagagttgtggagtcaatgcagagtacactggatgctgagatcaggagcagaaatgatgctctgaggatcaagaagaagatggagggagatcttaatgaaatggaaatccagctgaaccatgccaaccgccaggctgctgaggcactaaggaatcttagaaacacacaaggaatactgaaggacactcagctacatttggatgatgccatcagaggccaagatgaccttaaggaacaactggcaatggttgagcgcagagctaacctgatgcaggctgaagttgaagagctcagggcatccctggaacggactgagagaggcaggaaaatggcagagcaagagcttctggatgccagtgaacgtgtgcaacttctgcacactcagaacaccagcctgatcaacaccaagaagaagctggaaacagacatttcccaaatccagggagagatggaggacatcgtccaggaagcccgcaatgcagaggagaaggccaagaaggccatcactgatgctgccatgatggctgaggagctgaagaaggaacaggacaccagcgcccacctggagcggatgaagaagaacatggagcagaccgtgaaggatctgcagctccgtctggatgaggctgagcagctggcgctgaagggtgggaagaagcagatccagaaactggaggccagggtgagagagcttgaaagtgaggtggaaagtgaacagaagcacaatgttgaggctgtcaagggtcttcgcaaacatgagagaagagtgaaggaactcacttaccagactgaggaggaccgcaagaatattctcaggctgcaggacttggtggacaaattgcaaaccaaagtcaaagcttacaagagacaagctgaagaggctgaggaacaatccaatgtcaaccttgccaagttccgcaagctccagcacgagctggaggaggccaaggaacgggctgacattgctgagtcccaagtcaacaagctgagagtgaagagtcgggaggttcacacaaaagtcataagtgaagagtaattcattctaatgaaagaaaatgtgaccaaagaaatgcacgaaatgtgaagttctttgtcactgtcctgtatatcaaggaaataaa

SEQ ID NO: 156982 - DNA, 5871 bp, Homo sapiens
  Payload ID: 10765
  Gene Symbol: MYH6
  Gene Name: myosin, heavy chain 6, cardiac muscle, alpha
  Uniprot ID: P13533
  ENST ID: ENST00000356287
  CDS Start-End: 31-5850
cgtgaagggataaccaggggaagcaccaagatgaccgatgcccagatggctgactttggggcagcggcccagtacctccgcaagtcagagaaggagcgtctagaggcccagacccggccctttgacattcgcactgagtgcttcgtgcccgatgacaaggaagagtttgtcaaagccaagattttgtcccgggagggaggcaaggtcattgctgaaaccgagaatgggaagacggtgactgtgaaggaggaccaggtgttgcagcagaacccacccaagttcgacaagattgaggacatggccatgctgaccttcctgcacgagcccgcggtgcttttcaacctcaaggagcgctacgcggcctggatgatatatacctactcgggcctcttctgtgtcactgtcaacccctacaagtggctgccggtgtacaatgccgaggtggtggccgcctaccggggcaagaagaggagtgaggccccgccccacatcttctccatctccgacaacgcctatcagtacatgctgacagatcgggagaaccagtccatcctcatcacgggagaatccggggcggggaagactgtgaacaccaagcgtgtcatccagtactttgccagcattgcagccataggtgaccgtggcaagaaggacaatgccaatgcgaacaagggcaccctggaggaccagatcatccaggccaaccccgctctggaggccttcggcaatgccaagactgtccggaacgacaactcctcccgctttgggaaattcattaggatccactttggggccactggaaagctggcttctgcagacatagagacctacctgctggagaagtcccgggtgatcttccagctgaaagctgagagaaactaccacatcttctaccagattctgtccaacaagaagccggagttgctggacatgctgctggtcaccaacaatccctacgactacgccttcgtgtctcagggagaggtgtccgtggcctccattgatgactccgaggagctcatggccaccgatagtgcctttgacgtgctgggcttcacttcagaggagaaagctggcgtctacaagctgacgggagccatcatgcactacgggaacatgaagttcaagcagaagcagcgggaggagcaggcggagccagacggcaccgaagatgctgacaagtcggcctacctcatggggctgaactcagctgacctgctcaaggggctgtgccaccctcgggtgaaagtgggcaacgagtatgtcaccaaggggcagagcgtgcagcaggtgtactactccatcggggctctggccaaggcagtgtatgagaagatgttcaactggatggtgacgcgcatcaacgccaccctggagaccaagcagccacgccagtacttcataggagtcctggacatcgctggcttcgagatcttcgacttcaacagctttgagcagctctgcatcaacttcaccaacgagaagctgcagcagttcttcaaccaccacatgttcgtgctggagcaggaggagtacaagaaggagggcattgagtggacattcattgactttggcatggacctgcaggcctgcattgacctcatcgagaagcccatgggcatcatgtccatcctggaggaggagtgcatgttccccaaggccactgacatgaccttcaaggccaagctgtacgacaaccacctgggcaagtccaacaatttccagaagccacgcaacatcaaggggaagcaggaagcccacttctccctgatccactacgccggcactgtggactacaacatcctgggctggctggaaaaaaacaaggatcctctcaacgagactgttgtggccctgtaccagaagtcctccctcaagctcatggccactctcttctcctcctacgcaactgccgatactggggacagtggtaaaagcaaaggaggcaagaaaaagggctcatccttccagacggtgtcggctctccaccgggaaaatctcaacaagctaatgaccaacctgaggaccacccatcctcactttgtgcgttgcatcatccccaatgagcggaaggctccaggggtgatggacaaccccctggtcatgcaccagctgcgctgcaatggcgtgctggagggcatccgcatctgcaggaagggcttccccaaccgcatcctctacggggacttccggcagaggtatcgcatcctgaacccagtggccatccctgagggacagttcattgatagcaggaaggggacagagaagctgctcagctctctggacattgatcacaaccagtacaagtttggccacaccaaggtgttcttcaaggcagggctgcttgggctgctggaggagatgcgggatgagaggctgagccgcatcatcacgcgcatgcaggcccaagcccggggccagctcatgcgcattgagttcaagaagatagtggaacgcagggatgccctgctggtaatccagtggaacattcgggccttcatgggggtcaagaattggccctggatgaagctctacttcaagatcaagccgctgctgaagagcgcagagacggagaaggagatggccaccatgaaggaagagttcgggcgcatcaaagagacgctggagaagtccgaggctcgccgcaaggagctggaggagaagatggtgtccctgctgcaggagaagaatgacctgcagctccaagtgcaggcggaacaagacaacctcaatgatgctgaggagcgctgcgaccagctgatcaaaaacaagattcagctggaggccaaagtaaaggagatgaatgagaggctggaggatgaggaggagatgaacgcggagctcactgccaagaagcgcaagctggaagacgagtgctcagagctcaagaaggacattgatgacctggagctgacactggccaaggtggagaaggagaagcatgcaacagagaacaaggtgaagaacctaacagaggagatggctgggctggatgaaatcatcgctaagctgaccaaggagaagaaagctctacaagaggcccatcagcaggccctggatgaccttcaggttgaggaagacaaggtcaacagcctgtccaagtctaaggtcaagctggagcagcaggtggatgatctggagggatccctagagcaagagaagaaggtgcgcatggacctggagcgagcaaagcggaaactggagggcgacctgaagctgacccaggagagcatcatggacctggaaaatgataaactgcagctggaagaaaagcttaagaagaaggagtttgacattaatcagcagaacagtaagattgaggatgagcaggtgctggcccttcaactacagaagaaactgaaggaaaaccaggcacgcatcgaggagctggaggaggagctggaggccgagcgcaccgccagggctaaggtggagaagctgcgctcagacctgtctcgggagctggaggagatcagcgagcggctggaagaggccggcggggccacgtccgtgcagatcgagatgaacaagaagcgcgaggccgagttccagaagatgcggcgggacctggaggaggccacgctgcagcacgaggccactgccgcggccctgcgcaagaagcacgccgacagcgtggccgagctgggcgagcagatcgacaacctgcagcgggtgaagcagaagctggagaaggagaagagcgagttcaagctggagctggatgacgtcacctccaacatggagcagatcatcaaggccaaggcaaacctggagaaagtgtctcggacgctggaggaccaggccaatgagtaccgcgtgaagctagaagaggcccaacgctccctcaatgatttcaccacccagcgagccaagctgcagaccgagaatggagagttggcccggcagctagaggaaaaggaggcgctaatctcgcagctgacccgggggaagctctcttatacccagcaaatggaggacctcaaaaggcagctggaggaggagggcaaggcgaagaacgccctggcccatgcactgcagtcggcccggcatgactgcgacctgctgcgggagcagtacgaggaggagacagaggccaaggccgagctgcagcgcgtcctgtccaaggccaactcggaggtggcccagtggaggaccaagtatgagacggacgccattcagcggactgaggagctcgaagaggccaaaaagaagctggcccagcggctgcaggatgccgaggaggccgtggaggctgttaatgccaagtgctcctcactggagaagaccaagcaccggctacagaatgagatagaggacttgatggtggacgtagagcgctccaatgctgctgctgcagccctggacaagaagcagagaaactttgacaagatcctggccgagtggaagcagaagtatgaggagtcgcagtctgagctggagtcctcacagaaggaggctcgctccctcagcacagagctcttcaagctcaagaacgcctacgaggagtccctggagcacctagagaccttcaagcgggagaacaagaaccttcaggaggaaatctcggaccttactgagcagctaggagaaggaggaaagaatgtgcatgagctggagaaggtccgcaaacagctggaggtggagaagctggagctgcagtcagccctggaggaggcagaggcctccctggagcacgaggagggcaagatcctccgggcccagctagagttcaaccagatcaaggcagagatcgagcggaagctggcagagaaggacgaggagatggaacaggccaagcgcaaccaccagcgggtggtggactcgctgcagacctccctggatgcagagacacgcagccgcaacgaggtcctgagggtgaagaagaagatggaaggagacctcaatgagatggagatccagctcagccacgccaaccgcatggctgccgaggcccagaagcaagtcaagagcctccagagcttgctgaaggacacccagatccagctggacgatgcggtccgtgccaacgacgacctgaaggagaacatcgccatcgtggagcggcgcaacaacctgctgcaggctgagctggaggagctgcgtgccgtggtggagcagacagagcggtcccggaagctggcggagcaggagctgattgagaccagcgagcgggtgcagctgctgcattcccagaacaccagcctcatcaaccagaagaagaagatggagtcggatctgacccagctccagtcggaagtggaggaggcagtgcaggagtgcagaaacgccgaggagaaggccaagaaggccatcacggatgccgccatgatggcagaggagctgaagaaggagcaggacaccagcgcccacctggagcgcatgaagaagaacatggagcagaccattaaggacctgcagcaccggctggacgaggccgagcagatcgccctcaagggaggcaagaagcagctgcagaagctggaagcgcgggtgcgggagctggagggtgagctggaggccgagcagaagcgcaacgcagagtcggtgaagggcatgaggaagagcgagcggcgcatcaaggagctcacctaccagacagaggaagacaaaaagaacctgctgcggctacaggacctggtggacaagctgcaactgaaggtcaaggcctacaagcgccaggccgaggaggcggaggagcaagccaacaccaacctgtccaagttccgcaaggtgcagcatgagctggatgaggcagaggagcgggcggacatcgctgagtcccaggtcaacaagcttcgagccaagagccgtgacattggtgccaagcaaaaaatgcacgatgaggagtgacactgcctcgggaacctcact

SEQ ID NO: 156983 - DNA, 5941 bp, Homo sapiens
  Payload ID: 10765
  Gene Symbol: MYH6
  Gene Name: myosin, heavy chain 6, cardiac muscle, alpha
  Uniprot ID: P13533
  ENST ID: ENST00000405093
  CDS Start-End: 72-5891
agatagagagactcctgcggcccagattcttcaggattctccgtgaagggataaccaggggaagcaccaagatgaccgatgcccagatggctgactttggggcagcggcccagtacctccgcaagtcagagaaggagcgtctagaggcccagacccggccctttgacattcgcactgagtgcttcgtgcccgatgacaaggaagagtttgtcaaagccaagattttgtcccgggagggaggcaaggtcattgctgaaaccgagaatgggaagacggtgactgtgaaggaggaccaggtgttgcagcagaacccacccaagttcgacaagattgaggacatggccatgctgaccttcctgcacgagcccgcggtgcttttcaacctcaaggagcgctacgcggcctggatgatatatacctactcgggcctcttctgtgtcactgtcaacccctacaagtggctgccggtgtacaatgccgaggtggtggccgcctaccggggcaagaagaggagtgaggccccgccccacatcttctccatctccgacaacgcctatcagtacatgctgacagatcgggagaaccagtccatcctcatcacgggagaatccggggcggggaagactgtgaacaccaagcgtgtcatccagtactttgccagcattgcagccataggtgaccgtggcaagaaggacaatgccaatgcgaacaagggcaccctggaggaccagatcatccaggccaaccccgctctggaggccttcggcaatgccaagactgtccggaacgacaactcctcccgctttgggaaattcattaggatccactttggggccactggaaagctggcttctgcagacatagagacctacctgctggagaagtcccgggtgatcttccagctgaaagctgagagaaactaccacatcttctaccagattctgtccaacaagaagccggagttgctggacatgctgctggtcaccaacaatccctacgactacgccttcgtgtctcagggagaggtgtccgtggcctccattgatgactccgaggagctcatggccaccgatagtgcctttgacgtgctgggcttcacttcagaggagaaagctggcgtctacaagctgacgggagccatcatgcactacgggaacatgaagttcaagcagaagcagcgggaggagcaggcggagccagacggcaccgaagatgctgacaagtcggcctacctcatggggctgaactcagctgacctgctcaaggggctgtgccaccctcgggtgaaagtgggcaacgagtatgtcaccaaggggcagagcgtgcagcaggtgtactactccatcggggctctggccaaggcagtgtatgagaagatgttcaactggatggtgacgcgcatcaacgccaccctggagaccaagcagccacgccagtacttcataggagtcctggacatcgctggcttcgagatcttcgacttcaacagctttgagcagctctgcatcaacttcaccaacgagaagctgcagcagttcttcaaccaccacatgttcgtgctggagcaggaggagtacaagaaggagggcattgagtggacattcattgactttggcatggacctgcaggcctgcattgacctcatcgagaagcccatgggcatcatgtccatcctggaggaggagtgcatgttccccaaggccactgacatgaccttcaaggccaagctgtacgacaaccacctgggcaagtccaacaatttccagaagccacgcaacatcaaggggaagcaggaagcccacttctccctgatccactacgccggcactgtggactacaacatcctgggctggctggaaaaaaacaaggatcctctcaacgagactgttgtggccctgtaccagaagtcctccctcaagctcatggccactctcttctcctcctacgcaactgccgatactggggacagtggtaaaagcaaaggaggcaagaaaaagggctcatccttccagacggtgtcggctctccaccgggaaaatctcaacaagctaatgaccaacctgaggaccacccatcctcactttgtgcgttgcatcatccccaatgagcggaaggctccaggggtgatggacaaccccctggtcatgcaccagctgcgctgcaatggcgtgctggagggcatccgcatctgcaggaagggcttccccaaccgcatcctctacggggacttccggcagaggtatcgcatcctgaacccagtggccatccctgagggacagttcattgatagcaggaaggggacagagaagctgctcagctctctggacattgatcacaaccagtacaagtttggccacaccaaggtgttcttcaaggcagggctgcttgggctgctggaggagatgcgggatgagaggctgagccgcatcatcacgcgcatgcaggcccaagcccggggccagctcatgcgcattgagttcaagaagatagtggaacgcagggatgccctgctggtaatccagtggaacattcgggccttcatgggggtcaagaattggccctggatgaagctctacttcaagatcaagccgctgctgaagagcgcagagacggagaaggagatggccaccatgaaggaagagttcgggcgcatcaaagagacgctggagaagtccgaggctcgccgcaaggagctggaggagaagatggtgtccctgctgcaggagaagaatgacctgcagctccaagtgcaggcggaacaagacaacctcaatgatgctgaggagcgctgcgaccagctgatcaaaaacaagattcagctggaggccaaagtaaaggagatgaatgagaggctggaggatgaggaggagatgaacgcggagctcactgccaagaagcgcaagctggaagacgagtgctcagagctcaagaaggacattgatgacctggagctgacactggccaaggtggagaaggagaagcatgcaacagagaacaaggtgaagaacctaacagaggagatggctgggctggatgaaatcatcgctaagctgaccaaggagaagaaagctctacaagaggcccatcagcaggccctggatgaccttcaggttgaggaagacaaggtcaacagcctgtccaagtctaaggtcaagctggagcagcaggtggatgatctggagggatccctagagcaagagaagaaggtgcgcatggacctggagcgagcaaagcggaaactggagggcgacctgaagctgacccaggagagcatcatggacctggaaaatgataaactgcagctggaagaaaagcttaagaagaaggagtttgacattaatcagcagaacagtaagattgaggatgagcaggtgctggcccttcaactacagaagaaactgaaggaaaaccaggcacgcatcgaggagctggaggaggagctggaggccgagcgcaccgccagggctaaggtggagaagctgcgctcagacctgtctcgggagctggaggagatcagcgagcggctggaagaggccggcggggccacgtccgtgcagatcgagatgaacaagaagcgcgaggccgagttccagaagatgcggcgggacctggaggaggccacgctgcagcacgaggccactgccgcggccctgcgcaagaagcacgccgacagcgtggccgagctgggcgagcagatcgacaacctgcagcgggtgaagcagaagctggagaaggagaagagcgagttcaagctggagctggatgacgtcacctccaacatggagcagatcatcaaggccaaggcaaacctggagaaagtgtctcggacgctggaggaccaggccaatgagtaccgcgtgaagctagaagaggcccaacgctccctcaatgatttcaccacccagcgagccaagctgcagaccgagaatggagagttggcccggcagctagaggaaaaggaggcgctaatctcgcagctgacccgggggaagctctcttatacccagcaaatggaggacctcaaaaggcagctggaggaggagggcaaggcgaagaacgccctggcccatgcactgcagtcggcccggcatgactgcgacctgctgcgggagcagtacgaggaggagacagaggccaaggccgagctgcagcgcgtcctgtccaaggccaactcggaggtggcccagtggaggaccaagtatgagacggacgccattcagcggactgaggagctcgaagaggccaaaaagaagctggcccagcggctgcaggatgccgaggaggccgtggaggctgttaatgccaagtgctcctcactggagaagaccaagcaccggctacagaatgagatagaggacttgatggtggacgtagagcgctccaatgctgctgctgcagccctggacaagaagcagagaaactttgacaagatcctggccgagtggaagcagaagtatgaggagtcgcagtctgagctggagtcctcacagaaggaggctcgctccctcagcacagagctcttcaagctcaagaacgcctacgaggagtccctggagcacctagagaccttcaagcgggagaacaagaaccttcaggaggaaatctcggaccttactgagcagctaggagaaggaggaaagaatgtgcatgagctggagaaggtccgcaaacagctggaggtggagaagctggagctgcagtcagccctggaggaggcagaggcctccctggagcacgaggagggcaagatcctccgggcccagctagagttcaaccagatcaaggcagagatcgagcggaagctggcagagaaggacgaggagatggaacaggccaagcgcaaccaccagcgggtggtggactcgctgcagacctccctggatgcagagacacgcagccgcaacgaggtcctgagggtgaagaagaagatggaaggagacctcaatgagatggagatccagctcagccacgccaaccgcatggctgccgaggcccagaagcaagtcaagagcctccagagcttgctgaaggacacccagatccagctggacgatgcggtccgtgccaacgacgacctgaaggagaacatcgccatcgtggagcggcgcaacaacctgctgcaggctgagctggaggagctgcgtgccgtggtggagcagacagagcggtcccggaagctggcggagcaggagctgattgagaccagcgagcgggtgcagctgctgcattcccagaacaccagcctcatcaaccagaagaagaagatggagtcggatctgacccagctccagtcggaagtggaggaggcagtgcaggagtgcagaaacgccgaggagaaggccaagaaggccatcacggatgccgccatgatggcagaggagctgaagaaggagcaggacaccagcgcccacctggagcgcatgaagaagaacatggagcagaccattaaggacctgcagcaccggctggacgaggccgagcagatcgccctcaagggaggcaagaagcagctgcagaagctggaagcgcgggtgcgggagctggagggtgagctggaggccgagcagaagcgcaacgcagagtcggtgaagggcatgaggaagagcgagcggcgcatcaaggagctcacctaccagacagaggaagacaaaaagaacctgctgcggctacaggacctggtggacaagctgcaactgaaggtcaaggcctacaagcgccaggccgaggaggcggaggagcaagccaacaccaacctgtccaagttccgcaaggtgcagcatgagctggatgaggcagaggagcgggcggacatcgctgagtcccaggtcaacaagcttcgagccaagagccgtgacattggtgccaagcaaaaaatgcacgatgaggagtgacactgcctcgggaacctcactcttgccaacctgtaataaatatgagtgcc

SEQ ID NO: 156984 - DNA, 6087 bp, Homo sapiens
  Payload ID: 10766
  Gene Symbol: MYH7
  Gene Name: myosin, heavy chain 7, cardiac muscle, beta
  Uniprot ID: P12883
  ENST ID: ENST00000355349
  CDS Start-End: 164-5971
gggggtgggggtgccctgctgccccatatatacagcccctgagaccaggtctggctccacagctctgtcctgctctgtgtctttccctgctgctctcaggtcccctgcaggccttggcccctttcctcatctgtagacacacttgagtagcccaggcacagccatgggagattcggagatggcagtctttggggctgccgccccctacctgcgcaagtcagagaaggagcggctagaagcgcagaccaggccttttgacctcaagaaggatgtcttcgtgcctgatgacaaacaggagtttgtcaaggccaagatcgtgtctcgagagggtggcaaagtcactgccgagaccgagtatggcaagacagtgaccgtgaaggaggaccaggtgatgcagcagaacccacccaagttcgacaaaatcgaggacatggccatgctgaccttcctgcatgagcccgcggtgctctacaacctcaaggatcgctacggctcctggatgatctacacctactcgggcctcttctgtgtcaccgtcaacccttacaagtggctgccggtgtacactcctgaggtggtggctgcctaccggggcaagaagaggagcgaggccccgccccacatcttctccatctccgacaacgcctatcagtacatgctgacagacagagaaaaccagtccatcctgatcaccggagaatccggagcagggaagacagtcaacaccaagagggtcatccagtactttgctgttattgcagccattggggaccgcagcaagaaggaccagagcccgggcaagggcaccctggaggaccagatcatccaggccaaccctgctctggaggcctttggcaatgccaagaccgtccggaacgacaactcctcccgcttcgggaaattcattcgaattcattttggggcaacaggaaagttggcatctgcagacatagagacctatcttctggaaaaatccagagttattttccagctgaaagcagagagagattatcacattttctaccaaatcctgtctaacaaaaagcctgagctgctggacatgctgctgatcaccaacaacccctacgattatgcattcatctcccaaggagagaccaccgtggcctccattgatgacgctgaggagctcatggccactgataacgcttttgatgtgctgggcttcacttcagaggagaaaaactccatgtataagctgacaggcgccatcatgcactttggaaacatgaagttcaagctgaagcagcgggaggagcaggcggagccagacggcactgaagaggctgacaagtctgcctacctcatggggctgaactcagccgacctgctcaaggggctgtgccaccctcgggtgaaagtgggcaatgagtacgtcaccaaggggcagaatgtccagcaggtgatatatgccactggggcactggccaaggcagtgtatgagaggatgttcaactggatggtgacgcgcatcaatgccaccctggagaccaagcagccacgccagtacttcataggagtcctggacatcgctggcttcgagatcttcgatttcaacagctttgagcagctctgcatcaacttcaccaacgagaagctgcagcagttcttcaaccaccacatgtttgtgctggagcaggaggagtacaagaaggagggcatcgagtggacattcattgactttggcatggacctgcaggcctgcattgacctcatcgagaagcccatgggcatcatgtccatcctggaagaggagtgcatgttccccaaggccaccgacatgaccttcaaggccaagctgtttgacaaccacctgggcaaatccgccaacttccagaagccacgcaatatcaaggggaagcctgaagcccacttctccctgatccactatgccggcatcgtggactacaacatcattggctggctgcagaagaacaaggatcctctcaatgagactgtcgtgggcttgtatcagaagtcttccctcaagctgctcagcaccctgtttgccaactatgctggggctgatgcgcctattgagaagggcaaaggcaaggccaagaaaggctcgtcctttcagactgtgtcagctctgcacagggaaaatctgaacaagctgatgaccaacttgcgctccacccatccccactttgtacgttgtatcatccctaatgagacaaagtctccaggggtgatggacaaccccctggtcatgcaccagctgcgctgcaatggtgtgctggagggcatccgcatctgcaggaaaggcttccccaaccgcatcctctacggggacttccggcagaggtatcgcatcctgaacccagcggccatccctgagggacagttcattgatagcaggaagggggcagagaagctgctcagctccctggacattgatcacaaccagtacaagtttggccacaccaaggtgttcttcaaggccgggctgctggggctgctggaggaaatgagggacgagaggctgagccgcatcatcacgcgtatccaggcccagtcccgaggtgtgctcgccagaatggagtacaaaaagctgctggaacgtagagactccctgctggtaatccagtggaacattcgggccttcatgggggtcaagaattggccctggatgaagctctacttcaagatcaagccgctgctgaagagtgcagaaagagagaaggagatggcctccatgaaggaggagttcacacgcctcaaagaggcgctagagaagtccgaggctcgccgcaaggagctggaggagaagatggtgtccctgctgcaggagaagaatgacctgcagctccaagtgcaggcggaacaagacaacctggcagatgctgaggagcgctgtgatcagctgatcaaaaacaagattcagctggaggccaaggtgaaggagatgaacgagaggctggaggatgaggaggagatgaatgctgagctcactgccaagaagcgcaagctggaagatgagtgctcagagctcaaaagggacatcgatgatctggagctgacactggccaaagtggagaaggagaaacacgcaacagagaacaaggtgaaaaacctgacagaggagatggctgggctggatgagatcattgccaagctgaccaaggagaagaaagctctgcaagaggcccaccaacaggctctggatgaccttcaggccgaggaggacaaggtcaacaccctgactaaggccaaagtcaagctggagcagcaagtggatgatctggaaggatccctggagcaagagaagaaggtgcgcatggacctggagcgagcgaagcggaagctggagggcgacctgaagctgacccaggagagcatcatggacctggagaatgacaagcagcagctggatgagcggctgaaaaaaaaagactttgagctgaatgctctcaacgcaaggattgaggatgaacaggccctcggcagccagctgcagaagaagctcaaggagcttcaggcacgcatcgaggagctggaggaggagctggaggccgagcgcaccgccagggctaaggtggagaagctgcgctcagacctgtctcgggagctggaggagatcagcgagcggctggaagaggccggcggggccacgtccgtgcagatcgagatgaacaagaagcgcgaggccgagttccagaagatgcggcgggacctggaggaggccacgctgcagcacgaggccactgccgcggccctgcgcaagaagcacgccgacagcgtggccgagctgggcgagcagatcgacaacctgcagcgggtgaagcagaagctggagaaggagaagagcgagttcaagctggagctggatgacgtcacctccaacatggagcagatcatcaaggccaaggctaacctggagaagatgtgccggaccttggaagaccagatgaatgagcaccggagcaaggcggaggagacccagcgttctgtcaacgacctcaccagccagcgggccaagttgcaaaccgagaatggtgagctgtcccggcagctggatgagaaggaggcactgatctcccagctgacccgaggcaagctcacctacacccagcagctggaggacctcaagaggcagctggaggaggaggttaaggcgaagaacgccctggcccacgcactgcagtcggcccggcatgactgcgacctgctgcgggagcagtacgaggaggagacggaggccaaggccgagctgcagcgcgtcctttccaaggccaactcggaggtggcccagtggaggaccaagtatgagacggacgccattcagcggactgaggagctcgaggaggccaagaagaagctggcccagcggctgcaggaagctgaggaggccgtggaggctgttaatgccaagtgctcctcgctggagaagaccaagcaccggctacagaatgagatcgaggacttgatggtggacgtagagcgctccaatgctgctgctgcagccctggacaagaagcagaggaacttcgacaagatcctggccgagtggaagcagaagtatgaggagtcgcagtcggagctggagtcctcgcagaaggaggctcgctccctcagcacagagctcttcaaactcaagaacgcctatgaggagtccctggaacatctggagaccttcaagcgggagaacaaaaacctgcaggaggagatctccgacttgactgagcagttgggttccagcggaaagactatccatgagctggagaaggtccgaaagcagctggaggccgagaagatggagctgcagtcagccctggaggaggccgaggcctccctggagcacgaggagggcaagatcctccgggcccagctggagttcaaccagatcaaggcagagatcgagcggaagctggcagagaaggacgaggagatggaacaggccaagcgcaaccacctgcgggtggtggactcgctgcagacctccctggacgcagagacacgcagccgcaacgaggccctgagggtgaagaagaagatggaaggagacctcaatgagatggagatccagctcagccacgccaaccgcatggccgccgaggcccagaagcaagtcaagagcctccagagcttgttgaaggacacccagattcagctggacgatgcagtccgtgccaacgacgacctgaaggagaacatcgccatcgtggagcggcgcaacaacctgctgcaggctgagctggaggagttgcgtgccgtggtggagcagacagagcggtcccggaagctggcggagcaggagctgattgagactagtgagcgggtgcagctgctgcattcccagaacaccagcctcatcaaccagaagaagaagatggatgctgacctgtcccagctccagactgaagtggaggaggcagtgcaggagtgcaggaatgctgaggagaaggccaagaaggccatcacggatgccgccatgatggcagaggagctgaagaaggagcaggacaccagcgcccacctggagcgcatgaagaagaacatggaacagaccattaaggacctgcagcaccggctggacgaagccgagcagatcgccctcaagggcggcaagaagcagctgcagaagctggaagcgcgggtgcgggagctggagaatgagctggaggccgagcagaagcgcaacgcagagtcggtgaagggcatgaggaagagcgagcggcgcatcaaggagctcacctaccagacggaggaggacaggaaaaacctgctgcggctgcaggacctggtagacaagctgcagctaaaggtcaaggcctacaagcgccaggccgaggaggcggaggagcaagccaacaccaacctgtccaagttccgcaaggtgcagcacgagctggatgaggcagaggagcgggcggacatcgccgagtcccaggtcaacaagctgcgggccaagagccgtgacattggcacgaagggcttgaatgaggagtagctttgccacatcttgatctgctcagccctggaggtgccagcaaagccccatgctggagcctgtgtaacagctccttgggaggaagcagaataaagcaattttccttgaagccgaga

SEQ ID NO: 156985 - DNA, 6293 bp, Homo sapiens
  Payload ID: 10767
  Gene Symbol: MYH7B
  Gene Name: myosin, heavy chain 7B, cardiac muscle, beta
  Uniprot ID: A7E2Y1
  ENST ID: ENST00000262873
  CDS Start-End: 93-6044
tggggttttgatgtgttgcccaggctggtcttgaactcctgagcttaagtgatgtgtccgcctgggcctcccaaagtgctggaattacagacatgagtggcaataaaaggggtagcagagcttcctgccctcaccgtggtgccgagtgcctgctgccttgggccgccttgaacctccagggtttccagctcctcctccttcaccccagtgccactgccatgatggatgtgagtgaacttggggagtctgcccgctacctccgccagggctaccaggagatgacgaaggtgcacactatcccatgggacgggaagaagcgagtctgggtgcctgatgaacaggacgcctacgtggaggccgaggtcaagtcggaggctaccgggggcagagtcaccgtggagaccaaagaccagaaggtgctgatggtgcgtgaagccgagctgcagcccatgaacccgcctcgcttcgacttactggaggacatggccatgatgacgcacctgaacgaggcctctgtgctgcacaacctgcgccagcgctatgcccgctggatgatctatacctactcaggcctcttctgtgtcaccatcaacccctacaaatggctcccagtctatacggcctccgtagtggctgcttacaagggaaagcgccgctcagattccccgccccatatatatgcggtggcggacaacgcctacaacgacatgctgcgcaaccgagacaaccagtccatgctgatcaccggagagtcgggggccggtaagacggttaacaccaagcgggtcattcagtactttgccatcgtcgctgccctgggagacgggccgggcaagaaggcccaatttctggcaacaaagacggggggcacccttgaggatcaaatcatcgaggccaaccctgccatggaggcctttggcaacgccaagaccctgaggaatgataactcctcccgctttggcaagttcatccgcattcactttggtccctctgggaagctggcatccgcggatattgacagctatctcctggagaagtcgcgggtgatcttccagttgcctggtgagcgcagctaccatgtctactaccagatcctctcagggaggaagccagagctgcaggacatgctgcttctgtctatgaacccctatgactaccacttctgcagccagggcgtcatcaccgtggacaacatgaatgatggggaggagctcatcgccaccgaccatgccatggacatcctaggcttcagcgtggatgagaaatgtgcctgctataagatcgtgggcgccctcctgcactttggcaacatgaagttcaagcagaagcagcgggaggagcaggcggaggccgatggcactgagagtgctgacaaggctgcctacctgatgggggtcagcagtggggacctcctcaaaggccttttgcacccccgggtgcgtgtagggaacgagtacgtgaccaagggccagagtgtggagcaggtggtgtttgctgtgggggctctggccaaggccacctatgaccggctgttcaggtggctggtgtctcggatcaaccagaccctggacacaaagctgccccggcagttcttcatcggggttctggacatcgctgggtttgagatctttgagttcaacagcttcgaacagctgtgcatcaacttcaccaatgagaaattgcagcagttcttcaaccagcacatgtttgtgctggagcaggaggagtacaagcgggagggcatcgactgggtcttcatcgacttcggccttgacctgcagccttgcatcgacctcatcgagaagccactgggcatcctgtccatcctggaggaggaatgcatgttccccaaggcctcagacgccagcttccgggccaagctctacgacaaccacgcggggaagtcacccaatttccagcagcctcggcctgacaagaagcgcaagtaccaggcccacttcgaggtggtccactacgcaggcgtggtgccttacagcattgtgggctggctggagaaaaacaaggatcccctgaatgagaccgtggtccccatcttccagaagtcacagaataggctcctggcgactctctatgagaattatgcgggctcctgctccactgagccccccaagtctggggtgaaagagaagcgtaagaaggcagcatcgttccagacggtgtcccagctgcacaaggagaacctcaacaagctgatgaccaacctgcgggccacacagccccacttcgtccgctgcattgtccccaacgagaacaaaaccccaggggtcatggatgccttcttggtgctacaccagctgcgctgcaatggggtcctggaggggatccggatctgccgccaagggttccccaacaggttgctctacaccgacttccggcagcggtaccgtatcctgaaccccagtgccatcccggatgacaccttcatggacagcaggaaggccacagagaaactgctgggctcgctggacttggatcacacccagtaccagtttggccacaccaaggtgttcttcaaggctgggcttctaggcgtcctggaagagctccgtgaccagcgcctggccaaggtgctgacgctgctgcaggcgcggagccgtggccgcctcatgcgccttgagtaccagcgcctgctgggaggcagggatgcgctgttcaccatccagtggaacatccgtgccttcaatgccgtcaagaactggtcatggatgaagctctttttcaagatgaagccgctgctgcgctcggcgcaggctgaggaggagctggcggccctgcgggcagagctgcgggggttgcgaggggcgctggctgcggccgaggccaagcgccaggaactggaggagacgcacgtcagcatcacccaggagaagaatgacctggccctgcagctgcaggctgagcaggacaacctggcagatgccgaggagcgctgccacttgctgatcaagtccaaggtgcagctggaggggaaggtgaaggagctgagtgagcggctggaggatgaggaggaggtgaacgctgacctggccgcccgccggcgcaagctggaggacgagtgcacggagctcaagaaggacattgatgacctggagctgacactggccaaagctgagaaggagaagcaagccactgagaacaaggtgaagaacctgacggaagagatggctgcgctggacgagtcagtggcccggctgaccaaggagaagaaggcgttgcaggaggcccaccaacaggccctgggtgacctgcaggccgaggaggaccgtgtgagcgcgctgaccaaggccaagctccggctggagcaacaggtggaggacctggaatgctccctggagcaggagaagaagctgcgcatggacacggagcgggccaagcgcaagctggagggtgacctgaagctgacgcaggagtcggtggctgatgctgctcaagacaagcagcagctggaggagaagctcaagaagaaggactccgagctgagccagctgagcctgcgggtggaagacgagcagctcttgggggcccagatgcagaagaagatcaaggagctgcaggctcgggcggaggagctggaagaggagctggaggcagagcgggcagcccgggcccgcgtggagaagcagcgtgcagaggcggcgcgggagctggaggagctgagcgagcggctggaggaggcaggcggcgcatccgcggggcagcgcgagggctgccgcaagcgggaggcggagctggggaggctgcggcgggagctggaggaggcggcgctgcggcacgaggccacagtggcggcactgcggcgcaagcaggcggagggcgcggcggagctgggggagcaggtggacagcctgcagcgggtgcggcagaagctggagaaggagaagagtgagctgcgcatggaggtggacgacctggctgccaacgtggagactctgacccgcgccaaggccagtgcagagaagctgtgccggacctatgaggatcagctaagcgaggccaagatcaaggtggaggagctgcagcggcagctggcggacgcaagcacgcagcgtgggcgactacagacggaaagcggggagctgagtcgcctgctagaggagaaggagtgtctgatcagtcagctgagccgtggaaaggccctggccgcccaaagcctggaagagttgcggcgccagctagaggaggaaagcaaggccaagagtgccctggcccacgccgtgcaggctctgcggcacgactgtgacctcctgcgggagcaacacgaggaggaggctgaggcccaggctgagctgcagcggctgctgtccaaggccaatgccgaggtggcccagtggaggagcaagtacgaagcagatgccatccagaggaccgaggagctggaggaggccaaaaaaaagctggcactgcggctgcaggaggcagaggagggcgtggaggctgccaacgccaagtgctcatcgttggagaaggccaagctgcggctacagacagagtcagaggatgtaaccctggagctggagcgggcgacctcagcagctgctgcgctggacaagaagcagcggcacttggaacgggcactggaggaacggcggcggcaggaggaggagatgcagcgggagctggaggcggcacagagggagtcccgtggcctgggcaccgagctcttccggctgcggcacggccacgaggaggcacttgaagccctggagacgctcaagcgggagaacaagaacctgcaggaggagatcagcgacctcacagaccaggtgagtctcagtgggaagagcatccaggaactggagaaaaccaagaaggcgctggaaggcgagaagagtgagatccaggctgcactggaggaggcagagggggccctggagctggaggagaccaagacgctgcggatccagctggagctctcccaggtcaaagcagaagtggaccggaagctggcagagaaagacgaggagtgcgctaacctgaggcgcaaccaccagcgagctgtggagtccctgcaggcctccctggatgcagagacacgggcccgcaatgaggcgctgcggctcaagaagaagatggagggtgacctcaacgacctggagctgcagctgggccatgccacccgtcaggccacagaggcccaggctgccacgcggctgatgcaggcacagctcaaggaggagcaggcagggcgggacgaggagcagcggctggcagctgagctccacgagcaggcgcaggctctggagcgccgggcctcgctgctggctgcggagctggaggagctgcgggctgccctggagcagggcgagcgcagccggcgactggcagagcaggagcttttggaggccaccgagcgcctcaaccttctgcattcgcagaacacaggcctcctaaaccagaagaagaagctggaggcggacttggcccagctgagcggggaggtggaggaggctgcacaggagaggcgggaggctgaggagaaggccaaaaaggccatcactgatgcggccatgatggccgaggagctgaagaaggagcaggacacaagtgcacacctggaacggatgaagaagacgctggagcagacggtgcgcgagctccaggcccgccttgaggaggcagaacaggccgccctccgtggcgggaagaagcaggtgcagaagctggaggccaaggtacgggagctggaggctgagcttgatgcagagcagaagaagcacgccgaggcccttaagggcgtgcgcaagcatgagcgccgtgtcaaggagctcgcataccaggccgaggaggacaggaagaacctggctcgcatgcaggacctggtggacaagctgcagagcaaggtcaagagctacaagcgccagtttgaggaggcggagcagcaggccaacaccaacctggccaagtatcgcaaggcccagcacgagctggatgatgcggaggagcgggcagacatggcggaaacccaggccaacaagctgcgggcacggacccgggacgccctgggccccaagcacaaggagtgacggcctgaccccctgggctctaaagaggaatgtctgctgttgcacatctggctgaggccacctgccccgatcctgccatctctgcatcgccccctgctgccttcagccttccctgggccctgaataaacaccacagccagtttccttctcattcttttctttggggttcaggaggaaaaacacagtcctagggacaaaagccaggtccacagcagtcatttttaaaataaagttatttaatagtctcca

SEQ ID NO: 156986 - DNA, 699 bp, Homo sapiens
  Payload ID: 10767
  Gene Symbol: MYH7B
  Gene Name: myosin, heavy chain 7B, cardiac muscle, beta
  ENST ID: ENST00000435272
  CDS Start-End: 1-450
gtacgggagctggaggctgagcttgatgcagagcagaagaagcacgccgaggcccttaagggcgtgcgcaagcatgagcgccgtgtcaaggagctcgcataccaggtgggcgacagggtctccctggggagtggccctggagctggcccagcccaagcaagccctgagtcccccttgcccgcccaggccgaggaggacaggaagaacctggctcgcatgcaggacctggtggacaagctgcagagcaaggtcaagagctacaagcgccagtttgaggaggcggagcagcaggccaacaccaacctggccaagtatcgcaaggcccagcacgagctggatgatgcggaggagcgggcagacatggcggaaacccaggccaacaagctgcgggcacggacccgggacgccctgggccccaagctatccctttctcctcagcacaaggagtgacggcctgaccccctgggctctaaagaggaatgtctgctgttgcacatctggctgaggccacctgccccgatcctgccatctctgcatcgccccctgctgccttcagccttccctgggccctgaataaacaccacagccagtttccttctcattcttttctttggggttcaggaggaaaaacacagtcctagggacaaaagccaggtccacagcagtcatttttaaaataaagttatttaatagtctcca

SEQ ID NO: 156987 - DNA, 684 bp, Homo sapiens
  Payload ID: 10767
  Gene Symbol: MYH7B
  Gene Name: myosin, heavy chain 7B, cardiac muscle, beta
  ENST ID: ENST00000446156
  CDS Start-End: 1-435
gtacgggagctggaggctgagcttgatgcagagcagaagaagcacgccgaggcccttaagggcgtgcgcaagcatgagcgccgtgtcaaggagctcgcataccaggccgaggaggacaggaagaacctggctcgcatgcaggacctggtggacaagctgcagagcaaggtcaagagctacaagcgccagtttgaggaggcggtgagtgcgctggggcctggacacctggaccgggcaccccagctctgccccagggtctgtggccaggagcagcaggccaacaccaacctggccaagtatcgcaaggcccagcacgagctggatgatgcggaggagcgggcagacatggcggaaacccaggccaacaagctgcgggcacggacccgggacgccctgggccccaagctatccctttctcctcagcacaaggagtgacggcctgaccccctgggctctaaagaggaatgtctgctgttgcacatctggctgaggccacctgccccgatcctgccatctctgcatcgccccctgctgccttcagccttccctgggccctgaataaacaccacagccagtttccttctcattcttttctttggggttcaggaggaaaaacacagtcctagggacaaaagccaggtccacagcagtcatttttaaaataaagttatttaatagtctcca

SEQ ID NO: 156988 - DNA, 691 bp, Homo sapiens
  Payload ID: 10767
  Gene Symbol: MYH7B
  Gene Name: myosin, heavy chain 7B, cardiac muscle, beta
  ENST ID: ENST00000456649
  CDS Start-End: 1-450
gtacgggagctggaggctgagcttgatgcagagcagaagaagcacgccgaggcccttaagggcgtgcgcaagcatgagcgccgtgtcaaggagctcgcataccaggccgaggaggacaggaagaacctggctcgcatgcaggacctggtggacaagctgcagagcaaggtcaagagctacaagcgccagtttgaggaggcggagcagcaggccaacaccaacctggccaagtatcgcaaggcccagcacgagctggatgatgcggaggagcgggcagacatggcggaaacccaggccaacaagctgcgggcacggacccgggacgccctgggccccaaggtgaggagtggcaggggcattgctctctgtgcagggggactgtgggggctgacaggtagtactgctcactcagctatccctttctcctcagcacaaggagtgacggcctgaccccctgggctctaaagaggaatgtctgctgttgcacatctggctgaggccacctgccccgatcctgccatctctgcatcgccccctgctgccttcagccttccctgggccctgaataaacaccacagccagtttccttctcattcttttctttggggttcaggaggaaaaacacagtcctagggacaaaagccaggtccacagcagtcatttttaaaataaagttatttaatagtctcca

SEQ ID NO: 156989 - DNA, 618 bp, Homo sapiens
  Payload ID: 10767
  Gene Symbol: MYH7B
  Gene Name: myosin, heavy chain 7B, cardiac muscle, beta
  ENST ID: ENST00000453028
  CDS Start-End: 1-369
gtacgggagctggaggctgagcttgatgcagagcagaagaagcacgccgaggcccttaagggcgtgcgcaagcatgagcgccgtgtcaaggagctcgcataccaggccgaggaggacaggaagaacctggctcgcatgcaggacctggtggacaagctgcagagcaaggtcaagagctacaagcgccagtttgaggaggcggagcagcaggccaacaccaacctggccaagtatcgcaaggcccagcacgagctggatgatgcggaggagcgggcagacatggcggaaacccaggccaacaagctgcgggcacggacccgggacgccctgggccccaagctatccctttctcctcagcacaaggagtgacggcctgaccccctgggctctaaagaggaatgtctgctgttgcacatctggctgaggccacctgccccgatcctgccatctctgcatcgccccctgctgccttcagccttccctgggccctgaataaacaccacagccagtttccttctcattcttttctttggggttcaggaggaaaaacacagtcctagggacaaaagccaggtccacagcagtcatttttaaaataaagttatttaatagtctcca

SEQ ID NO: 156990 - DNA, 681 bp, Homo sapiens
  Payload ID: 10767
  Gene Symbol: MYH7B
  Gene Name: myosin, heavy chain 7B, cardiac muscle, beta
  ENST ID: ENST00000433934
  CDS Start-End: 1-432
gtacgggagctggaggctgagcttgatgcagagcagaagaagcacgccgaggcccttaagggcgtgcgcaagcatgagcgccgtgtcaaggagctcgcataccaggtgggcgacagggtctccctggggagtggccctggagctggcccagcccaagcaagccctgagtcccccttgcccgcccaggccgaggaggacaggaagaacctggctcgcatgcaggacctggtggacaagctgcagagcaaggtcaagagctacaagcgccagtttgaggaggcggagcagcaggccaacaccaacctggccaagtatcgcaaggcccagcacgagctggatgatgcggaggagcgggcagacatggcggaaacccaggccaacaagctgcgggcacggacccgggacgccctgggccccaagcacaaggagtgacggcctgaccccctgggctctaaagaggaatgtctgctgttgcacatctggctgaggccacctgccccgatcctgccatctctgcatcgccccctgctgccttcagccttccctgggccctgaataaacaccacagccagtttccttctcattcttttctttggggttcaggaggaaaaacacagtcctagggacaaaagccaggtccacagcagtcatttttaaaataaagttatttaatagtctcca

SEQ ID NO: 156991 - DNA, 6197 bp, Homo sapiens
  Payload ID: 10767
  Gene Symbol: MYH7B
  Gene Name: myosin, heavy chain 7B, cardiac muscle, beta
  ENST ID: ENST00000618182
  CDS Start-End: 1-5949
agtggcaataaaaggggtagcagagcttcctgccctcaccgtggtgccgagtgcctgctgccttgggccgccttgaacctccagggtttccagctcctcctccttcaccccagtgccactgccatgatggatgtgagtgaacttggggagtctgcccgctacctccgccagggctaccaggagatgacgaaggtgcacactatcccatgggacgggaagaagcgagtctgggtgcctgatgaacaggacgcctacgtggaggccgaggtcaagtcggaggctaccgggggcagagtcaccgtggagaccaaagaccagaaggtgctgatggtgcgtgaagccgagctgcagcccatgaacccgcctcgcttcgacttactggaggacatggccatgatgacgcacctgaacgaggcctctgtgctgcacaacctgcgccagcgctatgcccgctggatgatctatacctactcaggcctcttctgtgtcaccatcaacccctacaaatggctcccagtctatacggcctccgtagtggctgcttacaagggaaagcgccgctcagattccccgccccatatatatgcggtggcggacaacgcctacaacgacatgctgcgcaaccgagacaaccagtccatgctgatcaccggagagtcgggggccggtaagacggttaacaccaagcgggtcattcagtactttgccatcgtcgctgccctgggagacgggccgggcaagaaggcccaatttctggcaacaaagacggggggcacccttgaggatcaaatcatcgaggccaaccctgccatggaggcctttggcaacgccaagaccctgaggaatgataactcctcccgctttggcaagttcatccgcattcactttggtccctctgggaagctggcatccgcggatattgacagctatctcctggagaagtcgcgggtgatcttccagttgcctggtgagcgcagctaccatgtctactaccagatcctctcagggaggaagccagagctgcaggacatgctgcttctgtctatgaacccctatgactaccacttctgcagccagggcgtcatcaccgtggacaacatgaatgatggggaggagctcatcgccaccgaccatgccatggacatcctaggcttcagcgtggatgagaaatgtgcctgctataagatcgtgggcgccctcctgcactttggcaacatgaagttcaagcagaagcagcgggaggagcaggcggaggccgatggcactgagagtgctgacaaggctgcctacctgatgggggtcagcagtggggacctcctcaaaggccttttgcacccccgggtgcgtgtagggaacgagtacgtgaccaagggccagagtgtggagcaggtggtgtttgctgtgggggctctggccaaggccacctatgaccggctgttcaggtggctggtgtctcggatcaaccagaccctggacacaaagctgccccggcagttcttcatcggggttctggacatcgctgggtttgagatctttgagttcaacagcttcgaacagctgtgcatcaacttcaccaatgagaaattgcagcagttcttcaaccagcacatgtttgtgctggagcaggaggagtacaagcgggagggcatcgactgggtcttcatcgacttcggccttgacctgcagccttgcatcgacctcatcgagaagccactgggcatcctgtccatcctggaggaggaatgcatgttccccaaggcctcagacgccagcttccgggccaagctctacgacaaccacgcggggaagtcacccaatttccagcagcctcggcctgacaagaagcgcaagtaccaggcccacttcgaggtggtccactacgcaggcgtggtgccttacagcattgtgggctggctggagaaaaacaaggatcccctgaatgagaccgtggtccccatcttccagaagtcacagaataggctcctggcgactctctatgagaattatgcgggctcctgctccactgagccccccaagtctggggtgaaagagaagcgtaagaaggcagcatcgttccagacggtgtcccagctgcacaaggagaacctcaacaagctgatgaccaacctgcgggccacacagccccacttcgtccgctgcattgtccccaacgagaacaaaaccccaggggtcatggatgccttcttggtgctacaccagctgcgctgcaatggggtcctggaggggatccggatctgccgccaagggttccccaacaggttgctctacaccgacttccggcagcggtaccgtatcctgaaccccagtgccatcccggatgacaccttcatggacagcaggaaggccacagagaaactgctgggctcgctggacttggatcacacccagtaccagtttggccacaccaaggtgttcttcaaggctgggcttctaggcgtcctggaagagctccgtgaccagcgcctggccaaggtgctgacgctgctgcaggcgcggagccgtggccgcctcatgcgccttgagtaccagcgcctgctgggaggcagggatgcgctgttcaccatccagtggaacatccgtgccttcaatgccgtcaagaactggtcatggatgaagctctttttcaagatgaagccgctgctgcgctcggcgcaggctgaggaggagctggcggccctgcgggcagagctgcgggggttgcgaggggcgctggctgcggccgaggccaagcgccaggaactggaggagacgcacgtcagcatcacccaggagaagaatgacctggccctgcagctgcaggctgagcaggacaacctggcagatgccgaggagcgctgccacttgctgatcaagtccaaggtgcagctggaggggaaggtgaaggagctgagtgagcggctggaggatgaggaggaggtgaacgctgacctggccgcccgccggcgcaagctggaggacgagtgcacggagctcaagaaggacattgatgacctggagctgacactggccaaagctgagaaggagaagcaagccactgagaacaaggtgaagaacctgacggaagagatggctgcgctggacgagtcagtggcccggctgaccaaggagaagaaggcgttgcaggaggcccaccaacaggccctgggtgacctgcaggccgaggaggaccgtgtgagcgcgctgaccaaggccaagctccggctggagcaacaggtggaggacctggaatgctccctggagcaggagaagaagctgcgcatggacacggagcgggccaagcgcaagctggagggtgacctgaagctgacgcaggagtcggtggctgatgctgctcaagacaagcagcagctggaggagaagctcaagaagaaggactccgagctgagccagctgagcctgcgggtggaagacgagcagctcttgggggcccagatgcagaagaagatcaaggagctgcaggctcgggcggaggagctggaagaggagctggaggcagagcgggcagcccgggcccgcgtggagaagcagcgtgcagaggcggcgcgggagctggaggagctgagcgagcggctggaggaggcaggcggcgcatccgcggggcagcgcgagggctgccgcaagcgggaggcggagctggggaggctgcggcgggagctggaggaggcggcgctgcggcacgaggccacagtggcggcactgcggcgcaagcaggcggagggcgcggcggagctgggggagcaggtggacagcctgcagcgggtgcggcagaagctggagaaggagaagagtgagctgcgcatggaggtggacgacctggctgccaacgtggagactctgacccgcgccaaggccagtgcagagaagctgtgccggacctatgaggatcagctaagcgaggccaagatcaaggtggaggagctgcagcggcagctggcggacgcaagcacgcagcgtgggcgactacagacggaaagcggggagctgagtcgcctgctagaggagaaggagtgtctgatcagtcagctgagccgtggaaaggccctggccgcccaaagcctggaagagttgcggcgccagctagaggaggaaagcaaggccaagagtgccctggcccacgccgtgcaggctctgcggcacgactgtgacctcctgcgggagcaacacgaggaggaggctgaggcccaggctgagctgcagcggctgctgtccaaggccaatgccgaggtggcccagtggaggagcaagtacgaagcagatgccatccagaggaccgaggagctggaggaggccaaaaaaaagctggcactgcggctgcaggaggcagaggagggcgtggaggctgccaacgccaagtgctcatcgttggagaaggccaagctgcggctacagacagagtcagaggatgtaaccctggagctggagcgggcgacctcagcagctgctgcgctggacaagaagcagcggcacttggaacgggcactggaggaacggcggcggcaggaggaggagatgcagcgggagctggaggcggcacagagggagtcccgtggcctgggcaccgagctcttccggctgcggcacggccacgaggaggcacttgaagccctggagacgctcaagcgggagaacaagaacctgcaggaggagatcagcgacctcacagaccaggtgagtctcagtgggaagagcatccaggaactggagaaaaccaagaaggcgctggaaggcgagaagagtgagatccaggctgcactggaggaggcagagggggccctggagctggaggagaccaagacgctgcggatccagctggagctctcccaggtcaaagcagaagtggaccggaagctggcagagaaagacgaggagtgcgctaacctgaggcgcaaccaccagcgagctgtggagtccctgcaggcctccctggatgcagagacacgggcccgcaatgaggcgctgcggctcaagaagaagatggagggtgacctcaacgacctggagctgcagctgggccatgccacccgtcaggccacagaggcccaggctgccacgcggctgatgcaggcacagctcaaggaggagcaggcagggcgggacgaggagcagcggctggcagctgagctccacgagcaggcgcaggctctggagcgccgggcctcgctgctggctgcggagctggaggagctgcgggctgccctggagcagggcgagcgcagccggcgactggcagagcaggagcttttggaggccaccgagcgcctcaaccttctgcattcgcagaacacaggcctcctaaaccagaagaagaagctggaggcggacttggcccagctgagcggggaggtggaggaggctgcacaggagaggcgggaggctgaggagaaggccaaaaaggccatcactgatgcggccatgatggccgaggagctgaagaaggagcaggacacaagtgcacacctggaacggatgaagaagacgctggagcagacggtgcgcgagctccaggcccgccttgaggaggcagaacaggccgccctccgtggcgggaagaagcaggtgcagaagctggaggccaaggtacgggagctggaggctgagcttgatgcagagcagaagaagcacgccgaggcccttaagggcgtgcgcaagcatgagcgccgtgtcaaggagctcgcataccaggccgaggaggacaggaagaacctggctcgcatgcaggacctggtggacaagctgcagagcaaggtcaagagctacaagcgccagtttgaggaggcggagcagcaggccaacaccaacctggccaagtatcgcaaggcccagcacgagctggatgatgcggaggagcgggcagacatggcggaaacccaggccaacaagctgcgggcacggacccgggacgccctgggccccaagcacaaggagtgacggcctgaccccctgggctctaaagaggaatgtctgctgttgcacatctggctgaggccacctgccccgatcctgccatctctgcatcgccccctgctgccttcagccttccctgggccctgaataaacaccacagccagtttccttctcattcttttctttggggttcaggaggaaaaacacagtcctagggacaaaagccaggtccacagcagtcatttttaaaataaagttatttaatagtctcc

SEQ ID NO: 156992 - DNA, 6041 bp, Homo sapiens
  Payload ID: 10768
  Gene Symbol: MYH8
  Gene Name: myosin, heavy chain 8, skeletal muscle, perinatal
  Uniprot ID: P13535
  ENST ID: ENST00000403437
  CDS Start-End: 96-5909
atttccaccaagaacccagagagtggaacacttctgaacctgcatttttatctggaactccagaggcagaatcctttgctaaataaatcgcagccatgagtgcgagctcagacgctgagatggctgtttttggcgaagctgctccctaccttcgaaaatcagaaaaggagcggattgaggcccaaaacaagccgtttgatgctaaaacatctgtctttgtggcggagcccaaggaatcctatgtgaagagcactatacaaagcaaagaaggagggaaagtaaccgtaaagactgaaggtggagcaactctaactgtcagggaagaccaagtcttccctatgaaccctccgaaatatgacaaaattgaggacatggccatgatgactcatctacacgagcctggagtgctgtacaacctcaaagagcgctatgcagcctggatgatctacacctactcaggcctcttctgtgtcaccgtcaacccctacaagtggctgccggtgtacaagcccgaggtggtggctgcctacagaggcaaaaagcgccaggaggccccgccccacatcttctccatctctgacaatgcctatcagttcatgttgactgatcgagagaatcagtccatcctgatcaccggagaatctggtgccggaaagactgtgaacaccaagcgtgtcatccaatactttgcaacaattgcagttactggagagaagaagaaggatgaatctggcaaaatgcaggggactctggaagatcaaatcatcagcgccaatcccctactggaggcctttggcaatgccaaaactgtgaggaatgacaactcctctcgctttggtaaattcattagaatccactttggtactacagggaagctggcatctgctgatatagaaacatatcttttagaaaagtccagagttactttccagctaaaggcggaaagaagctaccatattttttatcagatcacttccaataagaagccagatctaattgaaatgctcctgatcaccaccaacccatatgactatgccttcgtcagtcagggggagatcacagttcccagtattgatgaccaagaagagttgatggccactgatagtgccattgacatcctgggcttcactcctgaagagaaagtgtccatctataaactcacaggggctgtgatgcattatgggaacatgaaattcaagcaaaagcagcgtgaggagcaagctgagccagatggcacagaagtcgctgacaaggcagcctatctccagagtctgaactctgcagacctactcaaagccctctgctaccctagggtcaaggttggcaatgagtatgtcaccaaaggccagactgtgcagcaggtgtacaatgcggtgggtgctctggccaaagccgtctacgagaagatgttcctgtggatggtcacccgcatcaaccagcagctggacaccaagcagcccaggcagtacttcatcggggtcttggacattgctggctttgaaatctttgattttaacagcctggagcagctgtgcatcaacttcaccaacgagaaactgcaacagtttttcaaccaccacatgtttgtgctagagcaggaggagtacaagaaggaaggcatcgagtggacgttcattgactttgggatggacctggctgcctgcattgagctcattgagaagccactgggcatcttctccatcctggaagaggagtgcatgttccctaaggcaacggacacctccttcaagaacaagctgtatgaccagcacctgggcaagtctgccaacttccagaagcccaaggtggtcaaaggcaaggctgaggcccacttctctctgattcactatgctggcactgtggactacaacattactggctggctggacaaaaataaggaccccctgaatgatactgtggttgggctgtaccagaagtctgcaatgaagactctagccagtctcttttccacgtatgctagtgctgaagcagatagcagcgcgaagaaaggtgctaagaaaaagggctcttctttccagactgtgtctgcccttttcagggaaaatttaaataaattgatgacgaatctgaggagcacacaccctcacttcgtacggtgtatcattcccaatgaaaccaaaactcctggggcaatggaacatgaacttgtgttgcaccagctgaggtgtaatggtgtgctggaaggcatccgcatctgtaggaaaggattcccaagcagaatcttatatggtgatttcaaacaaagatacaaggttttaaatgcaagtgctattccagagggacagttcattgacagcaagaaggcttctgagaaacttcttgcatctattgatattgatcatactcaatataaatttggacataccaaggttttcttcaaagctggacttctgggtcttctggaagaaatgagagatgaaaaattagcccaaattataacaagaacacaagctgtctgtaggggattcctaatgagggtagaatatcagaagatgttgcaaaggagagaagcacttttctgcatccagtataatgtccgtgccttcatgaacgtcaagcactggccctggatgaaactctttttcaagattaagcccctcctcaagagtgcagagaccgagaaagagatggccaccatgaaggaagaattccagaaaaccaaagatgaactcgccaagtcagaggcaaaacggaaggagctagaggaaaaaatggtcactctcttaaaagagaaaaatgacctgcaactccaggttcaatctgaagcagatagcttggctgatgcagaggaaaggtgtgagcaactgattaaaaacaaaatccaacttgaggccaaaatcaaagaggtgactgaaagagctgaggaggaggaagagatcaatgctgagctgacagccaagaagagaaaactggaggatgaatgttcagaactcaagaaagacattgatgaccttgagctgacactggccaaggttgagaaggagaaacatgccacggagaacaaggtgaaaaatcttacagaagagatggcaggcctggatgaaaccattgcaaaactgtccaaggagaagaaggctctccaagagacccaccagcagaccctggatgacctgcaggcagaggaggacaaagtcaacatcctgaccaaagctaaaaccaagctagaacagcaagtggatgatcttgaagggtctctggaacaagaaaagaagcttcgaatggatctagaaagagcaaagcggaaactggagggtgacctcaaattggcccaagaatccacaatggatatggaaaatgacaaacagcaacttgatgaaaagcttgaaaagaaagaatttgaaatcagcaatttgataagcaaaattgaagatgagcaagctgtagaaattcaactacagaagaagatcaaagagttgcaggcccgcattgaggagctgggggaagaaatcgaggcagagagggcgtcccgagccaaagcggagaagcagcgctctgacctctcccgggaactggaggagatcagcgagaggctggaagaagccggtggggcaacttctgctcaggtggaattgaacaagaagcgggaggctgagtttcagaaactgcgcagggacctggaggaggccaccctgcagcatgaagctatggtggctgctcttcggaagaagcacgcagacagtatggctgagcttggggagcagattgacaacttgcagcgggtcaaacagaagctggagaaggagaagagtgagctgaagatggagactgatgacctcagcagtaacgcagaggccatttccaaagccaagggaaaccttgaaaagatgtgccgctctctagaagatcaagtgagtgagcttaagaccaaggaagaggagcagcagcggctgatcaatgacctcacagcacagagagcgcgcctgcagacagaagcgggtgaatattctcgacaattagatgagaaagatgctttagtctctcagctttcaaggagcaagcaagcatctactcagcagattgaagagctgaaacatcaactagaggaagaaactaaagccaagaacgccctggcacacgccctgcagtcctcccgccatgactgcgacctgctgcgggaacagtatgaggaagagcaggaaggcaaagctgagctgcagagggcgctgtccaaggccaacagtgaggttgcccagtggagaaccaaatacgagacggatgccatccagcgcacagaggagctggaggaggccaagaaaaagttggcccagcgcctgcaagaagctgaggaacatgtagaagctgtgaacgccaaatgtgcttcccttgagaagacgaagcagcggctccagaatgaagttgaagacctcatgcttgatgtggaaaggtctaatgcagcctgtgcagcccttgataagaagcaaaggaactttgacaaggtcctatcagaatggaagcagaagtatgaggaaactcaggctgaacttgaggcctcccagaaggagtcacgttctcttagcactgagctgttcaaggtgaagaatgtctatgaggaatccctggatcaactcgaaacgctaagaagagaaaataagaacttgcaacaggagatttctgacctcactgagcagattgcagagggaggaaagcaaattcatgaattggagaaaataaagaagcaagtagaacaagagaaatgtgaaattcaggctgctttagaggaagcagaggcatctcttgaacatgaagaaggaaagattctgcgtatccagcttgagttaaaccaagtcaagtctgaagttgatagaaaaatcgcagaaaaggatgaggaaattgaccagctgaagagaaaccacactagagtcgtggagacaatgcagagcacgctggatgcagagattagaagcagaaatgatgctctgagagtcaagaagaaaatggaaggagatctgaatgaaatggaaatccagctgaaccatgccaatcgcttagctgcagagagtttaaggaactacaggaacacccaaggaatcctgaaggaaacccagctccacctggatgatgctctccggggccaggaggacctcaaggaacagctggcaattgtggagcgcagagccaacctgctgcaggctgagatcgaggagctgtgggccactctggaacagacagagagaagcaggaaaatcgccgaacaggagctcctggatgccagtgagcgtgtccagctcctccacacccagaataccagtctcattaacaccaagaagaaattagaaaatgacgtttcccaactccaaagtgaagtggaagaagtaatccaagaatcacgcaatgcagaagagaaagccaagaaggccatcactgatgctgccatgatggctgaggagctgaagaaggaacaggacaccagcgcccacctggagcggatgaagaagaacctggagcagacggtgaaggacctgcagcatcgtctagatgaggccgagcagctggcgctgaagggtgggaagaagcagatccagaaactggaggccagggtacgtgagcttgaaggagaggttgaaaatgaacagaaacgtaatgcagaggctgttaaaggtttacggaaacatgagcgacgagtaaaagaactcacctaccagactgaagaagatcgcaagaatgttctcaggctgcaggacttggtagataaattacaggcgaaggtgaaatcatacaagagacaagctgaggaggctgaggaacaatccaatgctaatctatctaaattccgcaaactccagcatgagctggaggaggccgaggaacgggctgacattgctgagtcccaggtcaacaaattgcgagtgaagagccgagaggttcacacaaaaatcagtgcagagtaaacacacctgcctgatgctatcaagaggctgaagaaaggcacaaaatgtgctatttttggtcacttgctttatgacgtttattttcctgttaaagctgaataaataaaaactacagtaaatgtatacattaaa

SEQ ID NO: 156993 - DNA, 7501 bp, Homo sapiens
  Payload ID: 10769
  Gene Symbol: MYH9
  Gene Name: myosin, heavy chain 9, non-muscle
  Uniprot ID: P35579
  ENST ID: ENST00000216181
  CDS Start-End: 232-6114
gagggcggggcgggaaggcggcgaggagccgagctgggtgcggtgaggcgcgcagatcaccgcggttcctgggcagggcacggaaggctaagcaaggctgacctgctgcagctcccgcctcgtgcgctcgccccacccggccgccgcccgagcgctcgagaaagtcctctcgggagaagcagcgcctgttcccggggcagatccaggttcaggtcctggctataagtcaccatggcacagcaagctgccgataagtatctctatgtggataaaaacttcatcaacaatccgctggcccaggccgactgggctgccaagaagctggtatgggtgccttccgacaagagtggctttgagccagccagcctcaaggaggaggtgggcgaagaggccatcgtggagctggtggagaatgggaagaaggtgaaggtgaacaaggatgacatccagaagatgaacccgcccaagttctccaaggtggaggacatggcagagctcacgtgcctcaacgaagcctcggtgctgcacaacctcaaggagcgttactactcagggctcatctacacctattcaggcctgttctgtgtggtcatcaatccttacaagaacctgcccatctactctgaagagattgtggaaatgtacaagggcaagaagaggcacgagatgccccctcacatctatgccatcacagacaccgcctacaggagtatgatgcaagaccgagaagatcaatccatcttgtgcactggtgaatctggagctggcaagacggagaacaccaagaaggtcatccagtatctggcgtacgtggcgtcctcgcacaagagcaagaaggaccagggcgagctggagcggcagctgctgcaggccaaccccatcctggaggccttcgggaacgccaagaccgtgaagaatgacaactcctcccgcttcggcaaattcattcgcatcaactttgatgtcaatggctacattgttggagccaacattgagacttatcttttggagaaatctcgtgctatccgccaagccaaggaagaacggaccttccacatcttctattatctcctgtctggggctggagagcacctgaagaccgatctcctgttggagccgtacaacaaataccgcttcctgtccaatggacacgtcaccatccccgggcagcaggacaaggacatgttccaggagaccatggaggccatgaggattatgggcatcccagaagaggagcaaatgggcctgctgcgggtcatctcaggggttcttcagctcggcaacatcgtcttcaagaaggagcggaacactgaccaggcgtccatgcccgacaacacagctgcccaaaaggtgtcccatctcttgggtatcaatgtgaccgatttcaccagaggaatcctcaccccgcgcatcaaggtgggacgggattacgtccagaaggcgcagactaaagagcaggctgactttgccatcgaggccttggccaaggcgacctatgagcggatgttccgctggctggtgctgcgcatcaacaaggctctggacaagaccaagaggcagggcgcctccttcatcgggatcctggacattgccggcttcgagatctttgatctgaactcgtttgagcagctgtgcatcaattacaccaatgagaagctgcagcagctcttcaaccacaccatgttcatcctggagcaggaggagtaccagcgcgagggcatcgagtggaacttcatcgactttggcctcgacctgcagccctgcatcgacctcattgagaagccagcaggccccccgggcattctggccctgctggacgaggagtgctggttccccaaagccaccgacaagagcttcgtggagaaggtgatgcaggagcagggcacccaccccaagttccagaagcccaagcagctgaaggacaaagctgatttctgcattatccactatgccggcaaggtggattacaaagctgacgagtggctgatgaagaacatggatcccctgaatgacaacatcgccacactgctccaccagtcctctgacaagtttgtctcggagctgtggaaggatgtggaccgcatcatcggcctggaccaggtggccggcatgtcggagaccgcactgcccggggccttcaagacgcggaagggcatgttccgcactgtggggcagctttacaaggagcagctggccaagctgatggctacgctgaggaacacgaaccccaactttgtccgctgcatcatccccaaccacgagaagaaggccggcaagctggacccgcatctcgtgctggaccagctgcgctgcaacggtgttctcgagggcatccgtatctgccgccagggcttccccaacagggtggtcttccaggagtttcggcagagatatgagatcctgactccaaactccattcccaagggtttcatggacgggaagcaggcgtgcgtgctcatgataaaagccctggagctcgacagcaatctgtaccgcattggccagagcaaagtcttcttccgtgccggtgtgctggcccacctggaggaggagcgagacctgaagatcaccgacgtcatcatagggttccaggcctgctgcaggggctacctggccaggaaagcatttgccaagcggcagcagcagcttaccgccatgaaggtcctccagcggaactgcgctgcctacctgaagctgcggaactggcagtggtggcggctcttcaccaaggtcaagccgctgctgcaggtgagccggcaggaggaggagatgatggccaaggaggaggagctggtgaaggtcagagagaagcagctggctgcggagaacaggctcacggagatggagacgctgcagtctcagctcatggcagagaaattgcagctgcaggagcagctccaggcagaaaccgagctgtgtgccgaggctgaggagctccgggcccgcctgaccgccaagaagcaggaattagaagagatctgccatgacctagaggccagggtggaggaggaggaggagcgctgccagcacctgcaggcggagaagaagaagatgcagcagaacatccaggagcttgaggagcagctggaggaggaggagagcgcccggcagaagctgcagctggagaaggtgaccaccgaggcgaagctgaaaaagctggaggaggagcagatcatcctggaggaccagaactgcaagctggccaaggaaaagaaactgctggaagacagaatagctgagttcaccaccaacctcacagaagaggaggagaaatctaagagcctcgccaagctcaagaacaagcatgaggcaatgatcactgacttggaagagcgcctccgcagggaggagaagcagcgacaggagctggagaagacccgccggaagctggagggagactccacagacctcagcgaccagatcgccgagctccaggcccagatcgcggagctcaagatgcagctggccaagaaagaggaggagctccaggccgccctggccagagtggaagaggaagctgcccagaagaacatggccctcaagaagatccgggagctggaatctcagatctctgaactccaggaagacctggagtctgagcgtgcttccaggaataaagctgagaagcagaaacgggaccttggggaagagctagaggctctgaaaacagagttggaggacacgctggattccacagctgcccagcaggagctcaggtcaaaacgtgagcaggaggtgaacatcctgaagaagaccctggaggaggaggccaagacccacgaggcccagatccaggagatgaggcagaagcactcacaggccgtggaggagctggcggagcagctggagcagacgaagcgggtgaaagcaaacctcgagaaggcaaagcagactctggagaacgagcggggggagctggccaacgaggtgaaggtgctgctgcagggcaaaggggactcggagcacaagcgcaagaaagtggaggcgcagctgcaggagctgcaggtcaagttcaacgagggagagcgcgtgcgcacagagctggccgacaaggtcaccaagctgcaggtggagctggacaacgtgaccgggcttctcagccagtccgacagcaagtccagcaagctcaccaaggacttctccgcgctggagtcccagctgcaggacactcaggagctgctgcaggaggagaaccggcagaagctgagcctgagcaccaagctcaagcaggtggaggacgagaagaattccttccgggagcagctggaggaggaggaggaggccaagcacaacctggagaagcagatcgccaccctccatgcccaggtggccgacatgaaaaagaagatggaggacagtgtggggtgcctggaaactgctgaggaggtgaagaggaagctccagaaggacctggagggcctgagccagcggcacgaggagaaggtggccgcctacgacaagctggagaagaccaagacgcggctgcagcaggagctggacgacctgctggtggacctggaccaccagcgccagagcgcgtgcaacctggagaagaagcagaagaagtttgaccagctcctggcggaggagaagaccatctctgccaagtatgcagaggagcgcgaccgggctgaggcggaggcccgagagaaggagaccaaggctctgtcgctggcccgggccctggaggaagccatggagcagaaggcggagctggagcggctcaacaagcagttccgcacggagatggaggaccttatgagctccaaggatgatgtgggcaagagtgtccacgagctggagaagtccaagcgggccctagagcagcaggtggaggagatgaagacgcagctggaagagctggaggacgagctgcaggccaccgaagatgccaagctgcggttggaggtcaacctgcaggccatgaaggcccagttcgagcgggacctgcagggccgggacgagcagagcgaggagaagaagaagcagctggtcagacaggtgcgggagatggaggcagagctggaggacgagaggaagcagcgctcgatggcagtggccgcccggaagaagctggagatggacctgaaggacctggaggcgcacatcgactcggccaacaagaaccgggacgaagccatcaaacagctgcggaagctgcaggcccagatgaaggactgcatgcgcgagctggatgacacccgcgcctctcgtgaggagatcctggcccaggccaaagagaacgagaagaagctgaagagcatggaggccgagatgatccagttgcaggaggaactggcagccgcggagcgtgccaagcgccaggcccagcaggagcgggatgagctggctgacgagatcgccaacagcagcggcaaaggagccctggcgttagaggagaagcggcgtctggaggcccgcatcgcccagctggaggaggagctggaggaggagcagggcaacacggagctgatcaacgaccggctgaagaaggccaacctgcagatcgaccagatcaacaccgacctgaacctggagcgcagccacgcccagaagaacgagaatgctcggcagcagctggaacgccagaacaaggagcttaaggtcaagctgcaggagatggagggcactgtcaagtccaagtacaaggcctccatcaccgccctcgaggccaagattgcacagctggaggagcagctggacaacgagaccaaggagcgccaggcagcctgcaaacaggtgcgtcggaccgagaagaagctgaaggatgtgctgctgcaggtggatgacgagcggaggaacgccgagcagtacaaggaccaggccgacaaggcatctacccgcctgaagcagctcaagcggcagctggaggaggccgaagaggaggcccagcgggccaacgcctcccgccggaaactgcagcgcgagctggaggacgccactgagacggccgatgccatgaaccgcgaagtcagctccctaaagaacaagctcaggcgcggggacctgccgtttgtcgtgccccgccgaatggcccggaaaggcgccggggatggctccgacgaagaggtagatggcaaagcggatggggctgaggccaaacctgccgaataagcctcttctcctgcagcctgagatggatggacagacagacaccacagcctccccttcccagaccccgcagcacgcctctccccaccttcttgggactgctgtgaacatgcctcctcctgccctccgccccgtccccccatcccgtttccctccaggtgttgttgagggcatttggcttcctctgctgcatccccttccagctccctcccctgctcagaatctgataccaaagagacagggcccgggcccaggcagagagcgaccagcaggctcctcagccctctcttgccaaaaagcacaagatgttgaggcgagcagggcaggcccccggggaggggccagagttttctatgaatctatttttcttcagactgaggccttttggtagtcggagcccccgcagtcgtcagcctccctgacgtctgccaccagcgcccccactcctcctcctttctttgctgtttgcaatcacacgtggtgacctcacacacctctgccccttgggcctcccactcccatggctctgggcggtccagaaggagcaggccctgggcctccacctctgtgcagggcacagaaggctggggtggggggaggagtggattcctccccaccctgtcccaggcagcgccactgtccgctgtctccctcctgattctaaaatgtctcaagtgcaatgccccctcccctcctttaccgaggacagcctgcctctgccacagcaaggctgtcggggtcaagctggaaaggccagcagccttccagtggcttctcccaacactcttggggaccaaatatatttaatggttaagggacttgtcccaagtctgacagccagagcgttagaggggccagcggccctcccaggcgatcttgtgtctactctaggactgggcccgagggtggtttacctgcaccgttgactcagtatagtttaaaaatctgccacctgcacaggtatttttgaaagcaaaataaggttttcttttttcccctttcttgtaataaatgataaaattccgagtctttctcactgcctttgtttagaagagagtagctcgtcctcactggtctacactggttgccgaatttacttgtattcctaactgttttgtatatgctgcattgagacttacggcaagaaggcattttttttttttaaaggaaacaaactctcaaatcatgaagtgatataaaagctgcatatgcctacaaagctctgaattcaggtcccagttgctgtcacaaaggagtgagtgaaactcccaccctacccccttttttatataataaaagtgccttagcatgtgttgcagctgtcaccactacagtaagctggtttacagatgttttccactgagcatcacaataaagagaaccatgtgct

SEQ ID NO: 156994 - DNA, 789 bp, Homo sapiens
  Payload ID: 10769
  Gene Symbol: MYH9
  Gene Name: myosin, heavy chain 9, non-muscle
  ENST ID: ENST00000401701
  CDS Start-End: 87-743
aggggctggtgttcggggctgccccgagcccagctctgggagcttattttgtcatcacagtggcactgtcctggctataagtcaccatggcacagcaagctgccgataagtatctctatgtggataaaaacttcatcaacaatccgctggcccaggccgactgggctgccaagaagctggtatgggtgccttccgacaagagtggctttgagccagccagcctcaaggaggaggtgggcgaagaggccatcgtggagctggtggagaatgggaagaaggtgaaggtgaacaaggatgacatccagaagatgaacccgcccaagttctccaaggtggaggacatggcagagctcacgtgcctcaacgaagcctcggtgctgcacaacctcaaggagcgttactactcagggctcatctacacctattcaggcctgttctgtgtggtcatcaatccttacaagaacctgcccatctactctgaagagattgtggaaatgtacaagggcaagaagaggcacgagatgccccctcacatctatgccatcacagacaccgcctacaggagtatgatgcaagaccgagaagatcaatccatcttgtgcactggtgaatctggagctggcaagacggagaacaccaagaaggtcatccagtatctggcgtacgtggcgtcctcgcacaagagcaagaaggaccaggaggcctattttaaaaacagagctgtgaggttaggagttctctagctgtgcttttccatctctgaatttgcagtaaaatccatttcccaag

SEQ ID NO: 156995 - DNA, 449 bp, Homo sapiens
  Payload ID: 10769
  Gene Symbol: MYH9
  Gene Name: myosin, heavy chain 9, non-muscle
  ENST ID: ENST00000456729
  CDS Start-End: 141-449
ggggctggtgttcggggctgccccgagcccagctctgggagcttattttgtcatcacagtggcactgcagcctgtctacctcctggctgcggctcgtcctcagatgccttctgtgaaggctgtcctggctataagtcaccatggcacagcaagctgccgataagtatctctatgtggataaaaacttcatcaacaatccgctggcccaggccgactgggctgccaagaagctggtatgggtgccttccgacaagagtggctttgagccagccagcctcaaggaggaggtgggcgaagaggccatcgtggagctggtggagaatgggaagaaggtgaaggtgaacaaggatgacatccagaagatgaacccgcccaagttctccaaggtggaggacatggcagagctcacgtgcctcaacgaagcctcggtgctgcacaacctcaaggag

SEQ ID NO: 156996 - DNA, 1065 bp, Homo sapiens
  Payload ID: 10770
  Gene Symbol: MYL1
  Gene Name: myosin, light chain 1, alkali
  skeletal, fast
  Uniprot ID: P05976
  ENST ID: ENST00000352451
  CDS Start-End: 149-733
tgcccttatgccgtttaacactctgggtccatcttcaagacactgggctgtggatcaacccaaccaccactcctcttccaagaatcattttgacaggttcttttggaggaactccttctctttttaacccacccttttaaaaaaaaaaatggcaccaaagaaagacgtgaagaaacctgtggctgcggctgcggctgccccagccccggcaccggcacctgcacctgcccctgccccagccaaacccaaagaagaaaaaattgacctctctgccattaagatcgagttctctaaggaacagcaggatgaattcaaggaggcatttctcctgtttgacagaacaggtgattccaagatcaccttaagccaggtcggtgatgtccttcgagctctgggcacaaatcccaccaatgcagaggtcaggaaagttctgggaaaccccagcaatgaagagctgaatgccaagaaaattgagtttgaacaatttctgcctatgatgcaagccatttccaacaacaaggaccaggccacctatgaagactttgttgagggtctgcgtgtctttgacaaggaaggcaatggcacagtcatgggtgctgaactccgccatgttctagccaccctgggtgaaaagatgaaagaggaagaagtggaagccctgatggcaggtcaagaagactccaatggctgcatcaactacgaagcttttgtcaagcacatcatgtctatctgaatggagctctcaagaacaagcattgtttaggaagactggctggaaacttattttaatcacacccatgacaaactctccagatctgtttaccatcattcaggaaaacaaagcaatctggacggttcaagactgagcaactccctgaatttttatacatcttcagtttttctctgaattgaattcataccacacaaacaaagtgtctgctgctctagatgagaagaataaaatattgacaatctcaaatccaagcaccattctttattatctaccatgaatcaacaaacattcttaaaacaataaatcaataaacaattttggtcagtctggaa

SEQ ID NO: 156997 - DNA, 870 bp, Homo sapiens
  Payload ID: 10770
  Gene Symbol: MYL1
  Gene Name: myosin, light chain 1, alkali
  skeletal, fast
  Uniprot ID: P05976
  ENST ID: ENST00000341685
  CDS Start-End: 86-538
ccagggatgaccccactcagggaccggagcagccctcaactcactcttcagcttccctgctgtgttgcagcccagccgctccatcatgtccttcagtgctgaccagattgctgaattcaaggaggcatttctcctgtttgacagaacaggtgattccaagatcaccttaagccaggtcggtgatgtccttcgagctctgggcacaaatcccaccaatgcagaggtcaggaaagttctgggaaaccccagcaatgaagagctgaatgccaagaaaattgagtttgaacaatttctgcctatgatgcaagccatttccaacaacaaggaccaggccacctatgaagactttgttgagggtctgcgtgtctttgacaaggaaggcaatggcacagtcatgggtgctgaactccgccatgttctagccaccctgggtgaaaagatgaaagaggaagaagtggaagccctgatggcaggtcaagaagactccaatggctgcatcaactacgaagcttttgtcaagcacatcatgtctatctgaatggagctctcaagaacaagcattgtttaggaagactggctggaaacttattttaatcacacccatgacaaactctccagatctgtttaccatcattcaggaaaacaaagcaatctggacggttcaagactgagcaactccctgaatttttatacatcttcagtttttctctgaattgaattcataccacacaaacaaagtgtctgctgctctagatgagaagaataaaatattgacaatctcaaatccaagcaccattctttattatctaccatgaatcaacaaacattcttaaaacaataaatcaataaacaattttggtcagtctggaa

SEQ ID NO: 156998 - DNA, 1009 bp, Homo sapiens
  Payload ID: 10771
  Gene Symbol: MYL10
  Gene Name: myosin, light chain 10, regulatory
  Uniprot ID: Q9BUA6
  ENST ID: ENST00000223167
  CDS Start-End: 179-859
ccatagcctgcctgtctgcatggtccgcctagaggtttgagcagctgggcatggaagaagcgagccacacccccatcgcatgccctatgaacgggataagggaactttttcacttcaccactatgcctgactaattttttaattaaaaaaaatttttttgtagaaacagagtttcaccatgttgcttaggctggtctcaaactcctggcctcaagtgatcctccctcctcggcctcccaaagtgctgggattacaggcaccgagaagagctcggaaaagagcagaaggcaccgccagctccaacgtcttctccatgtttgatcagtcccagatccaggagtttaaagagagtctggctctgtcgcccaggctggagcgcaatggcatgatctcggctcactgcaacctctgcctcacgggttcaagcaattctcctgcctcagcctcccaagctttcaccatcatggaccagaaccgtgatggcttcatcgacaaagaggacttgagggacacctttgccgcgctgggccgcatcaatgtcaagaacgaggaactggaggccatggtgaaggaggcccccggacccatcaacttcacggtgttcctgaccatgtttggggagaagctgaagggcacggacccagaggagaccattctccacgccttcaaagtgttcgacactgaagggaaaggtttcgtcaaggccgatgtcatcaaagaaaaacttatgacccaggcagaccgcttcagtgaggaggaggtcaagcagatgtttgcagcatttcccccagatgtgtgcggcaacctggactacagaaacctgtgctacgtcatcactcacggtgaagagaaggattaggggatcacaagtctccccgacattcaggggcagcaaacactgttgtggggtgtgacagggagctcttgcagccagaggctgcaggaaaaaggcttcccttgtcctacggttggggacaaagcaagaataaataatgctaatgaggtctga

SEQ ID NO: 156999 - DNA, 1229 bp, Homo sapiens
  Payload ID: 10772
  Gene Symbol: MYL12A
  Gene Name: myosin, light chain 12A, regulatory, non-sarcomeric
  Uniprot ID: P19105
  ENST ID: ENST00000217652
  CDS Start-End: 396-911
ggacgcaaccatctgcggaaaggataggggggaggaagacttaacactgcaacaacaggtacaaaaaagaaggaaactcagtaacaggacccagaggaccattatatattgctctatattctaggtcgcccactttacacttccttctcatgcacttggtcaataccacgcccgctgaccacactggcgacttccctctctgtcgcccctccgtgaagtcagacccactctgcgggccaagaaaggtgaccgggcttccttccggcttgctaagcagaggccggaagcggtggtttttagcggctctctgggtagcagggtggtgtgatagcggcagcgaggggctcggagaggtgctcggattctcgtagctgtgccgggacttaaccaccaccatgtcgagcaaaagaacaaagaccaagaccaagaagcgccctcagcgtgcaacatccaatgtgtttgctatgtttgaccagtcacagattcaggagttcaaagaggccttcaacatgattgatcagaacagagatggtttcatcgacaaggaagatttgcatgatatgcttgcttcattggggaagaatccaactgatgagtatctagatgccatgatgaatgaggctccaggccccatcaatttcaccatgttcctcaccatgtttggtgagaagttaaatggcacagatcctgaagatgtcatcagaaatgcctttgcttgctttgatgaagaagcaactggcaccatacaggaagattacttgagagagctgctgacaaccatgggggatcggtttacagatgaggaagtggatgagctgtacagagaagcacctattgataaaaaggggaatttcaattacatcgagttcacacgcatcctgaaacatggagccaaagacaaagatgactgaaataacttcaaattccagccaaacgttccttgttgccactttgggtattctgagattttctcttgcatgcccttagctttacagcttttgcatttcctgttgtatttattctcagccattttgggcatatgtatctttataatcagactggaaacgggactttctattaatatcattttcagaataaaaaataggataatttaacctaccagcccttctcccccaataactgtggtctatacagagtcaatatattttttcagagaaagttattcgctcgattttttctgaatcataattaaactttatgataaaata

SEQ ID NO: 157000 - DNA, 899 bp, Homo sapiens
  Payload ID: 10772
  Gene Symbol: MYL12A
  Gene Name: myosin, light chain 12A, regulatory, non-sarcomeric
  Uniprot ID: P19105
  ENST ID: ENST00000536605
  CDS Start-End: 67-582
gctgctgagcggttttgcagactaccatcttccctgcaactctgaaggatggacttaaccaccaccatgtcgagcaaaagaacaaagaccaagaccaagaagcgccctcagcgtgcaacatccaatgtgtttgctatgtttgaccagtcacagattcaggagttcaaagaggccttcaacatgattgatcagaacagagatggtttcatcgacaaggaagatttgcatgatatgcttgcttcattggggaagaatccaactgatgagtatctagatgccatgatgaatgaggctccaggccccatcaatttcaccatgttcctcaccatgtttggtgagaagttaaatggcacagatcctgaagatgtcatcagaaatgcctttgcttgctttgatgaagaagcaactggcaccatacaggaagattacttgagagagctgctgacaaccatgggggatcggtttacagatgaggaagtggatgagctgtacagagaagcacctattgataaaaaggggaatttcaattacatcgagttcacacgcatcctgaaacatggagccaaagacaaagatgactgaaataacttcaaattccagccaaacgttccttgttgccactttgggtattctgagattttctcttgcatgcccttagctttacagcttttgcatttcctgttgtatttattctcagccattttgggcatatgtatctttataatcagactggaaacgggactttctattaatatcattttcagaataaaaaataggataatttaacctaccagcccttctcccccaataactgtggtctatacagagtcaatatattttttcagagaaagttattcgctcgattttttctgaatcataattaaactttatgataaaat

SEQ ID NO: 157001 - DNA, 947 bp, Homo sapiens
  Payload ID: 10772
  Gene Symbol: MYL12A
  Gene Name: myosin, light chain 12A, regulatory, non-sarcomeric
  Uniprot ID: P19105
  ENST ID: ENST00000579226
  CDS Start-End: 123-638
ccgcccttcgccgtgccctggaatgtgcggccaggcaaagccacaggacggacgcaaccatctgcggaaaggataggggggaggaagacttaacactgcaacaacaggacttaaccaccaccatgtcgagcaaaagaacaaagaccaagaccaagaagcgccctcagcgtgcaacatccaatgtgtttgctatgtttgaccagtcacagattcaggagttcaaagaggccttcaacatgattgatcagaacagagatggtttcatcgacaaggaagatttgcatgatatgcttgcttcattggggaagaatccaactgatgagtatctagatgccatgatgaatgaggctccaggccccatcaatttcaccatgttcctcaccatgtttggtgagaagttaaatggcacagatcctgaagatgtcatcagaaatgcctttgcttgctttgatgaagaagcaactggcaccatacaggaagattacttgagagagctgctgacaaccatgggggatcggtttacagatgaggaagtggatgagctgtacagagaagcacctattgataaaaaggggaatttcaattacatcgagttcacacgcatcctgaaacatggagccaaagacaaagatgactgaaataacttcaaattccagccaaacgttccttgttgccactttgggtattctgagattttctcttgcatgcccttagctttacagcttttgcatttcctgttgtatttattctcagccattttgggcatatgtatctttataatcagactggaaacgggactttctattaatatcattttcagaataaaaaataggataatttaacctaccagcccttctcccccaataactgtggtctatacagagtcaatatattttttcagagaaagttattcgctcgattttttctgaatcataattaaactttat

SEQ ID NO: 157002 - DNA, 334 bp, Homo sapiens
  Payload ID: 10772
  Gene Symbol: MYL12A
  Gene Name: myosin, light chain 12A, regulatory, non-sarcomeric
  ENST ID: ENST00000583449
  CDS Start-End: 298-334
gctcggagaggtgctcggattctcgtagctgtgccggcccacaatgattctgagctaaaacacaaaataaaaaccagattcattgccaccagcgctcacctcgcctgacttaaaaaaaagtttcgtacaacagacactccttgacaccaaggatctttcacttaatccctcaaaaataaagactcgagctgggtgcggtggctcacgcctgtaattccagcactttgggaggccgaggcaggtggatcacgaagtcaggagttcaagaccagcctgcacaaggacttaaccaccaccatgtcgagcaaaagaacaaagaccaagaccaagaagc

SEQ ID NO: 157003 - DNA, 623 bp, Homo sapiens
  Payload ID: 10772
  Gene Symbol: MYL12A
  Gene Name: myosin, light chain 12A, regulatory, non-sarcomeric
  ENST ID: ENST00000578562
  CDS Start-End: 281-623
tagtgcctattttagacctgcttggaagaatataactcaatgcagtgtcttacttttgctgctgagcggttttgcagactaccatcttccctgcaactctgaaggatggtatggtagaattttattgtctgatgactgagatttttaacttgaaacaaatttttgtagtttttaacagattgagtattgaaaattgcctttttattttaggtattattagacattctttttaattttaacttaaattttaccgggataaatttaggacttaaccaccaccatgtcgagcaaaagaacaaagaccaagaccaagaagcgccctcagcgtgcaacatccaatgtgtttgctatgtttgaccagtcacagattcaggagttcaaagaggccttcaacatgattgatcagaacagagatggtttcatcgacaaggaagatttgcatgatatgcttgcttcattggggaagaatccaactgatgagtatctagatgccatgatgaatgaggctccaggccccatcaatttcaccatgttcctcaccatgtttggtgagaagttaaatggcacagatcctgaagatgtcatcagaaatgcctttgcttgctttgatgaagaagcaactg

SEQ ID NO: 157004 - DNA, 1004 bp, Homo sapiens
  Payload ID: 10772
  Gene Symbol: MYL12A
  Gene Name: myosin, light chain 12A, regulatory, non-sarcomeric
  Uniprot ID: P19105
  ENST ID: ENST00000578611
  CDS Start-End: 196-711
gaagcggtggtttttagcggctctctgggtagcagggtggtgtgatagcggcagcgaggggctcggagaggtgctcggattctcgtagctgtgccggcccacaatgattctgagctaaaacacaaaataaaaaccagattcattgccaccagcgctcacctcgcctgacttaaaaaaaaggacttaaccaccaccatgtcgagcaaaagaacaaagaccaagaccaagaagcgccctcagcgtgcaacatccaatgtgtttgctatgtttgaccagtcacagattcaggagttcaaagaggccttcaacatgattgatcagaacagagatggtttcatcgacaaggaagatttgcatgatatgcttgcttcattggggaagaatccaactgatgagtatctagatgccatgatgaatgaggctccaggccccatcaatttcaccatgttcctcaccatgtttggtgagaagttaaatggcacagatcctgaagatgtcatcagaaatgcctttgcttgctttgatgaagaagcaactggcaccatacaggaagattacttgagagagctgctgacaaccatgggggatcggtttacagatgaggaagtggatgagctgtacagagaagcacctattgataaaaaggggaatttcaattacatcgagttcacacgcatcctgaaacatggagccaaagacaaagatgactgaaataacttcaaattccagccaaacgttccttgttgccactttgggtattctgagattttctcttgcatgcccttagctttacagcttttgcatttcctgttgtatttattctcagccattttgggcatatgtatctttataatcagactggaaacgggactttctattaatatcattttcagaataaaaaataggataatttaacctaccagcccttctcccccaataactgtggtctatacagagtcaatatattttttcagagaaagttattcgctcgattttttctgaat

SEQ ID NO: 157005 - DNA, 899 bp, Homo sapiens; identical to SEQ ID NO: 157000
  Payload ID: 10772
  Gene Symbol: MYL12A
  Gene Name: myosin, light chain 12A, regulatory, non-sarcomeric
  ENST ID: ENST00000580887
  CDS Start-End: 49-582

SEQ ID NO: 157006 - DNA, 1210 bp, Homo sapiens
  Payload ID: 10773
  Gene Symbol: MYL12B
  Gene Name: myosin, light chain 12B, regulatory
  Uniprot ID: O14950
  ENST ID: ENST00000237500
  CDS Start-End: 345-863
cgcagcgcaggccgcgatatcgcagcggatcggagcaggccggaggggcaattaagaccccggccgtgtgcgtccggcctcagcagccccgccgctcggcggacacgcagaccccgccggcccgggcgcgaacactcagcgcacccccgttccacttggtcccgccgcgccttccggtgcgccttccggtgcgccttccggtgcgccttccgctccgccccttcaggcaggaagtgtcggcgccgccactgtccggccacagcctaacgctcttcgctgtcgtttgtggtctcgcgcagggcggccccggttctggtgtttggcgtcggaattaaacaaccaccatgtcgagcaaaaaggcaaagaccaagaccaccaagaagcgccctcagcgtgcaacatccaatgtgtttgccatgtttgaccagtcacagattcaggagttcaaagaggccttcaacatgattgatcagaacagagatggcttcatcgacaaggaagatttgcatgatatgcttgcttctctagggaagaatcccactgatgcataccttgatgccatgatgaatgaggccccagggcccatcaatttcaccatgttcctgaccatgtttggtgagaagttaaatggcacagatcctgaagatgtcatcagaaacgcctttgcttgctttgatgaagaagcaacaggcaccattcaggaagattacctaagagagctgctgacaaccatgggggatcggtttacagatgaggaagtggatgagctgtacagagaagcacctattgacaaaaaggggaatttcaattacatcgagttcacacgcatcctgaaacatggagccaaagacaaagatgactgaaagaactttagctaaaatcttccagttacattgtcttactctcttttacttctcagacacttcccccaccctcatagaacctgttgcatgcaacttagtttcacagctttgcctcttctttttgatgtatttattccagacctttctgccacttagcacttgtataatcagactggaaatggggatgagggtgtaaattgtattgaaaaagatcgcgaataaaaatcaacaaatgtgaaagcccagaaaaatatattcgtatttctggttttgctggatttttacatttttatataataaaaatgttattttgaaataaagattatgctgactcaaatgcaatgtaa

SEQ ID NO: 157007 - DNA, 1025 bp, Homo sapiens
  Payload ID: 10773
  Gene Symbol: MYL12B
  Gene Name: myosin, light chain 12B, regulatory
  Uniprot ID: O14950
  ENST ID: ENST00000400175
  CDS Start-End: 160-678
ctgccctcccggcgccgcggcgggtcctggcggtggattggggccgacccgggcgtgttcgtgtggagcacctgccctgtgcccaacactatcctagatgctttggagggtggaggagcctcctgttgcacggtcttgcctaagaattaaacaaccaccatgtcgagcaaaaaggcaaagaccaagaccaccaagaagcgccctcagcgtgcaacatccaatgtgtttgccatgtttgaccagtcacagattcaggagttcaaagaggccttcaacatgattgatcagaacagagatggcttcatcgacaaggaagatttgcatgatatgcttgcttctctagggaagaatcccactgatgcataccttgatgccatgatgaatgaggccccagggcccatcaatttcaccatgttcctgaccatgtttggtgagaagttaaatggcacagatcctgaagatgtcatcagaaacgcctttgcttgctttgatgaagaagcaacaggcaccattcaggaagattacctaagagagctgctgacaaccatgggggatcggtttacagatgaggaagtggatgagctgtacagagaagcacctattgacaaaaaggggaatttcaattacatcgagttcacacgcatcctgaaacatggagccaaagacaaagatgactgaaagaactttagctaaaatcttccagttacattgtcttactctcttttacttctcagacacttcccccaccctcatagaacctgttgcatgcaacttagtttcacagctttgcctcttctttttgatgtatttattccagacctttctgccacttagcacttgtataatcagactggaaatggggatgagggtgtaaattgtattgaaaaagatcgcgaataaaaatcaacaaatgtgaaagcccagaaaaatatattcgtatttctggttttgctggatttttacatttttatataataaaaatgttattttgaaataaagattatgctgactcaaatgcaatgtaa

SEQ ID NO: 157008 - DNA, 1249 bp, Homo sapiens
  Payload ID: 10773
  Gene Symbol: MYL12B
  Gene Name: myosin, light chain 12B, regulatory
  Uniprot ID: O14950
  ENST ID: ENST00000581193
  CDS Start-End: 384-902
ggcgggaggagggttggtggcgaggccctggcccggacgtccaggggccgggaggctgcaggcgatggagccggtatggggagacgccctgctggagaagtggccgggtcccggccgtgcgtgggccggccctgcgccacctgggtgacctcagacacctgggccttggacggcccggctgcccggcggccaacgcctgccctcccggcgccgcggcgggtcctggcggtggattggggccgacccgggcgtgttcgtgtggagcacctgccctgtgcccaacactatcctagatgctttggagggtggaggagcctcctgttgcacggtcttgcctaaggtgaagcctccaaggaagccattagcataattaaacaaccaccatgtcgagcaaaaaggcaaagaccaagaccaccaagaagcgccctcagcgtgcaacatccaatgtgtttgccatgtttgaccagtcacagattcaggagttcaaagaggccttcaacatgattgatcagaacagagatggcttcatcgacaaggaagatttgcatgatatgcttgcttctctagggaagaatcccactgatgcataccttgatgccatgatgaatgaggccccagggcccatcaatttcaccatgttcctgaccatgtttggtgagaagttaaatggcacagatcctgaagatgtcatcagaaacgcctttgcttgctttgatgaagaagcaacaggcaccattcaggaagattacctaagagagctgctgacaaccatgggggatcggtttacagatgaggaagtggatgagctgtacagagaagcacctattgacaaaaaggggaatttcaattacatcgagttcacacgcatcctgaaacatggagccaaagacaaagatgactgaaagaactttagctaaaatcttccagttacattgtcttactctcttttacttctcagacacttcccccaccctcatagaacctgttgcatgcaacttagtttcacagctttgcctcttctttttgatgtatttattccagacctttctgccacttagcacttgtataatcagactggaaatggggatgagggtgtaaattgtattgaaaaagatcgcgaataaaaatcaacaaatgtgaaagcccagaaaaatatattcgtatttctggttttgctggatttttacatttttatataataaaaatgttattttgaaataaagattatgctgactcaaatgcaatgtaa

SEQ ID NO: 157009 - DNA, 1064 bp, Homo sapiens
  Payload ID: 10773
  Gene Symbol: MYL12B
  Gene Name: myosin, light chain 12B, regulatory
  Uniprot ID: O14950
  ENST ID: ENST00000584539
  CDS Start-End: 199-717
actgaaggccttggattcaaccttaagagggagaacttagcgtttccggctagatgtgtgggaggtggtaacgagcaaaactcaaaagctgggaattgtgtcctgtgaaaagcaggccgtggggacaccggcgggtatggaacagaactgtaatgactaatagtcggaaataagggtagatagaattaaacaaccaccatgtcgagcaaaaaggcaaagaccaagaccaccaagaagcgccctcagcgtgcaacatccaatgtgtttgccatgtttgaccagtcacagattcaggagttcaaagaggccttcaacatgattgatcagaacagagatggcttcatcgacaaggaagatttgcatgatatgcttgcttctctagggaagaatcccactgatgcataccttgatgccatgatgaatgaggccccagggcccatcaatttcaccatgttcctgaccatgtttggtgagaagttaaatggcacagatcctgaagatgtcatcagaaacgcctttgcttgctttgatgaagaagcaacaggcaccattcaggaagattacctaagagagctgctgacaaccatgggggatcggtttacagatgaggaagtggatgagctgtacagagaagcacctattgacaaaaaggggaatttcaattacatcgagttcacacgcatcctgaaacatggagccaaagacaaagatgactgaaagaactttagctaaaatcttccagttacattgtcttactctcttttacttctcagacacttcccccaccctcatagaacctgttgcatgcaacttagtttcacagctttgcctcttctttttgatgtatttattccagacctttctgccacttagcacttgtataatcagactggaaatggggatgagggtgtaaattgtattgaaaaagatcgcgaataaaaatcaacaaatgtgaaagcccagaaaaatatattcgtatttctggttttgctggatttttacatttttatataataaaaatgttattttgaaataaagattatgctgactcaaatgcaatgtaa

SEQ ID NO: 157010 - DNA, 807 bp, Homo sapiens
  Payload ID: 10774
  Gene Symbol: MYL2
  Gene Name: myosin, light chain 2, regulatory, cardiac, slow
  Uniprot ID: P10916
  ENST ID: ENST00000228841
  CDS Start-End: 49-549
gcggagtgtggaattcttctcgggaggcagtgctgggtcctttccaccatggcacctaagaaagcaaagaagagagccgggggcgccaactccaacgtgttctccatgttcgaacagacccaaatccaggaatttaaggaggccttcactatcatggaccagaacagggatggcttcattgacaagaacgatctgagagacacctttgctgcccttgggcgagtgaacgtgaaaaatgaagaaattgatgaaatgatcaaggaggctccgggtccaattaactttactgtgttcctcacaatgtttggggagaaacttaagggagcggaccctgaggaaaccattctcaacgcattcaaagtgtttgaccctgaaggcaaaggggtgctgaaggctgattacgttcgggaaatgctgaccacgcaggcggagaggttttccaaggaggaggttgaccagatgttcgccgccttcccccctgacgtgactggcaacttggactacaagaacctggtgcacatcatcacccacggagaagagaaggactaggagggggctcgctgctgcgccctgggctcgtctttgcagagtggtccctgccctcatctctctcccccgagtaccgcctctgtccctaccttgtctgttagccatgtggctgccccatttatccacctccatcttctttgcagcctgggtggctatgggtacttcgtggccgcacatcctacagttggaaatccatccagaggccatgttccaataaacaggaggtcgtgtatttggtcacgacatttctctgacaaa

SEQ ID NO: 157011 - DNA, 664 bp, Homo sapiens
  Payload ID: 10774
  Gene Symbol: MYL2
  Gene Name: myosin, light chain 2, regulatory, cardiac, slow
  ENST ID: ENST00000548438
  CDS Start-End: 47-505
ggagtgtggaattcttctcgggaggcagtgctgggtcctttccaccatggcacctaagaaagcaaagaagagagccgggggcgccaactccaacgtgttctccatgttcgaacagacccaaatccaggaatttaaggagctcggagtccctgagtgtgtgtttcctaccctagggcgagtgaacgtgaaaaatgaagaaattgatgaaatgatcaaggaggctccgggtccaattaactttactgtgttcctcacaatgtttggggagaaacttaagggagcggaccctgaggaaaccattctcaacgcattcaaagtgtttgaccctgaaggcaaaggggtgctgaaggctgattacgttcgggaaatgctgaccacgcaggcggagaggttttccaaggaggaggttgaccagatgttcgccgccttcccccctgacgtgactggcaacttggactacaagaacctggtgcacatcatcacccacggagaagagaaggactaggagggggctcgctgctgcgccctgggctcgtctttgcagagtggtccctgccctcatctctctcccccgagtaccgcctctgtccctaccttgtctgttagccatgtggctgccccatttatccacctccatcttctttgcagcctgggtggctatggg

SEQ ID NO: 157012 - DNA, 924 bp, Homo sapiens
  Payload ID: 10775
  Gene Symbol: MYL3
  Gene Name: myosin, light chain 3, alkali
  ventricular, skeletal, slow
  Uniprot ID: P08590
  ENST ID: ENST00000292327
  CDS Start-End: 94-681
atccgggcaggataaaggcctgggtgaggcggctcacctaccctgctttctgcattcttctctccacatccctctctgtacttacagcccccaatggcccccaaaaagccagagcccaagaaggatgatgccaaggcagcccccaaggcagctccagctcccgcacctccccctgagcctgagcgccctaaggaggtcgagtttgatgcttccaagatcaagattgagttcacacctgagcagattgaagagttcaaggaagccttcatgctgttcgaccgcacacccaagtgtgagatgaagatcacctacgggcagtgtggggatgtcctgcgggcgctgggccagaaccccacacaggcagaagtgctccgtgtcctggggaagccaagacaggaagagctcaataccaagatgatggactttgaaactttcctgcctatgctccagcacatttccaagaacaaggacacaggcacctatgaggacttcgtggaggggctgcgggtcttcgacaaggagggcaatggcactgtcatgggtgctgagcttcgccacgtgctggccacgctgggtgagaggctgacagaagacgaagtggagaagttgatggctgggcaagaggactccaatggctgcatcaactatgaagcatttgtgaagcacatcatgtccagctaaacctcgtgcccaggaagcccagggaaggctgtgcagggacgtctcatctcccatgtgtgatgctgacaccagcggcctggagtcgtgggaaggaggggagccttaccaagactcctgcaaaaacccttggacctctccacgtggttgccgtctctggcccctctcaggctgtgcttacctgtgacagcagctctgtccccaccccatgggcctcatgaataaatggcttcttgccggccttcc

SEQ ID NO: 157013 - DNA, 1012 bp, Homo sapiens
  Payload ID: 10775
  Gene Symbol: MYL3
  Gene Name: myosin, light chain 3, alkali
  ventricular, skeletal, slow
  Uniprot ID: P08590
  ENST ID: ENST00000395869
  CDS Start-End: 53-640
cctgctttctgcattcttctctccacatccctctctgtacttacagcccccaatggcccccaaaaagccagagcccaagaaggatgatgccaaggcagcccccaaggcagctccagctcccgcacctccccctgagcctgagcgccctaaggaggtcgagtttgatgcttccaagatcaagattgagttcacacctgagcagattgaagagttcaaggaagccttcatgctgttcgaccgcacacccaagtgtgagatgaagatcacctacgggcagtgtggggatgtcctgcgggcgctgggccagaaccccacacaggcagaagtgctccgtgtcctggggaagccaagacaggaagagctcaataccaagatgatggactttgaaactttcctgcctatgctccagcacatttccaagaacaaggacacaggcacctatgaggacttcgtggaggggctgcgggtcttcgacaaggagggcaatggcactgtcatgggtgctgagcttcgccacgtgctggccacgctgggtgagaggctgacagaagacgaagtggagaagttgatggctgggcaagaggactccaatggctgcatcaactatgaagcatttgtgaagcacatcatgtccagctaaacctcgtgcccaggtaggcacccactccctcctgaacccgctgctgccacctgcccacactccaccagctgcagtgctcacttgacatcctgctgcctccgtctccctcctcctctgtaatctgcactgcctttgctctcaggaagcccagggaaggctgtgcagggacgtctcatctcccatgtgtgatgctgacaccagcggcctggagtcgtgggaaggaggggagccttaccaagactcctgcaaaaacccttggacctctccacgtggttgccgtctctggcccctctcaggctgtgcttacctgtgacagcagctctgtccccaccccatgggcctcatgaataaatggcttcttgccggccttcc

SEQ ID NO: 157014 - DNA, 451 bp, Homo sapiens
  Payload ID: 10775
  Gene Symbol: MYL3
  Gene Name: myosin, light chain 3, alkali
  ventricular, skeletal, slow
  ENST ID: ENST00000431168
  CDS Start-End: 314-451
gacgcgggagtgtggagaggccgagaggagccttccgccccccgccccgggacattgcgctagaggccgaggcccggagtcttacggcggcgggatgtcctgggaaaatgtagctgtggaagagcagaacattcctccctcctgtgatggctgacattcataggaaggcggacacacggaagacgccaggtaacaagagcccagaagaaggccggcgtggccgggctttcctgccttagtccacaggctcctcagaagtcagggcccatatcttccccgcattctccttggctgggggaagggagagcccccaatggcccccaaaaagccagagcccaagaaggatgatgccaaggcagcccccaaggcagctccagctcccgcacctccccctgagcctgagcgccctaaggaggtcgagtttgatgcttccaagatcaagattgagttc

SEQ ID NO: 157015 - DNA, 907 bp, Homo sapiens
  Payload ID: 10776
  Gene Symbol: MYL4
  Gene Name: myosin, light chain 4, alkali
  atrial, embryonic
  Uniprot ID: P12829
  ENST ID: ENST00000354968
  CDS Start-End: 129-722
ctctctggctgctccggcatatttgagaaggtctgtttccctggtccttctgggtttccaccaattggcaagaagggatcagcctgtcctagagatcactcctctgccaaagatcccaacaagacaacatggctcccaagaagcctgagcctaagaaggaggcagccaagccagctccagctccagctccagcccctgcaccagcccctgccccagctcctgaggctcccaaggaacctgcctttgaccccaagagtgtaaagatagacttcactgccgaccagattgaagagttcaaagaggccttttcattgtttgaccggaccccgactggagagatgaagatcacctacggccagtgcggggatgtactgcgggccctgggccagaaccctaccaatgccgaggtgctgcgtgtgctgggcaagcccaagcctgaagagatgaatgtcaagatgctggactttgagacgttcttgcccatcctgcagcacatttcccgcaacaaggagcagggcacctatgaggacttcgtggagggcctgcgtgtctttgacaaggagagcaatggcacggtcatgggtgctgagcttcggcacgtccttgccaccctgggagagaagatgactgaggctgaagtggagcagctgttagctgggcaagaggatgccaatggctgcatcaattatgaagcctttgtcaagcacatcatgtcagggtgaagcagagtcttccaggtgcctggcccttggctttagccataccagggtgagttaaagagaggccccggctgggtgagctgagatggagtcctcgacttatcaccacaccactgccccaaggaccttacaggccctccctgttaataaacagctctaacacggccaggctgggctctgggattctg

SEQ ID NO: 157016 - DNA, 855 bp, Homo sapiens
  Payload ID: 10776
  Gene Symbol: MYL4
  Gene Name: myosin, light chain 4, alkali
  atrial, embryonic
  Uniprot ID: P12829
  ENST ID: ENST00000393450
  CDS Start-End: 76-669
atctcatctcccagacgccacgtctctcggtttcttcttagatcactcctctgccaaagatcccaacaagacaacatggctcccaagaagcctgagcctaagaaggaggcagccaagccagctccagctccagctccagcccctgcaccagcccctgccccagctcctgaggctcccaaggaacctgcctttgaccccaagagtgtaaagatagacttcactgccgaccagattgaagagttcaaagaggccttttcattgtttgaccggaccccgactggagagatgaagatcacctacggccagtgcggggatgtactgcgggccctgggccagaaccctaccaatgccgaggtgctgcgtgtgctgggcaagcccaagcctgaagagatgaatgtcaagatgctggactttgagacgttcttgcccatcctgcagcacatttcccgcaacaaggagcagggcacctatgaggacttcgtggagggcctgcgtgtctttgacaaggagagcaatggcacggtcatgggtgctgagcttcggcacgtccttgccaccctgggagagaagatgactgaggctgaagtggagcagctgttagctgggcaagaggatgccaatggctgcatcaattatgaagcctttgtcaagcacatcatgtcagggtgaagcagagtcttccaggtgcctggcccttggctttagccataccagggtgagttaaagagaggccccggctgggtgagctgagatggagtcctcgacttatcaccacaccactgccccaaggaccttacaggccctccctgttaataaacagctctaacacggccaggctgggctctgggattctga

SEQ ID NO: 157017 - DNA, 650 bp, Homo sapiens
  Payload ID: 10776
  Gene Symbol: MYL4
  Gene Name: myosin, light chain 4, alkali
  atrial, embryonic
  ENST ID: ENST00000536623
  CDS Start-End: 61-650
ctggctgctccggcatatttgagaagatcactcctctgccaaagatcccaacaagacaacatggctcccaagaagcctgagcctaagaaggaggcagccaagccagctccagctccagctccagcccctgcaccagcccctgccccagctcctgaggctcccaaggaacctgcctttgaccccaagagtgtaaagatagacttcactgccgaccagattgaagagttcaaagaggccttttcattgtttgaccggaccccgactggagagatgaagatcacctacggccagtgcggggatgtactgcgggccctgggccagaaccctaccaatgccgaggtgctgcgtgtgctgggcaagcccaagcctgaagagatgaatgtcaagatgctggactttgagacgttcttgcccatcctgcagcacatttcccgcaacaaggagcagggcacctatgaggacttcgtggagggcctgcgtgtctttgacaaggagagcaatggcacggtcatgggtgctgagcttcggcacgtccttgccaccctgggagagaagatgactgaggctgaagtggagcagctgttagctgggcaagaggatgccaatggctgcatcaattatgaagcctttgtcaagcacatcatgtcagg

SEQ ID NO: 157018 - DNA, 582 bp, Homo sapiens
  Payload ID: 10776
  Gene Symbol: MYL4
  Gene Name: myosin, light chain 4, alkali
  atrial, embryonic
  ENST ID: ENST00000570772
  CDS Start-End: 128-313
tctctggctgctccggcatatttgagaaggtctgtttccctggtccttctgggtttccaccaattggcaagaagggatcagcctgtcctagagatcactcctctgccaaagatcccaacaagacaacatggctcccaagaagcctgagcctaagaaggaggcagccaagccagctccagctccagctccagcccctgcaccagcccctgccccagctcctgaggctcccaaggaacctgcctttgaccccaagagtgtaaagagttcaaagaggccttttcattgtttgaccggaccccgactggagagatgaagatcacctacggccagtgcggggatgtactgcgggccctgggccagaaccctaccaatgccgaggtgctgcgtgtgctgggcaagcccaagcctgaagagatgaatgtcaagatgctggactttgagacgttcttgcccatcctgcagcacatttcccgcaacaaggagcagggcacctatgaggacttcgtggagggcctgcgtgtctttgacaaggagagcaatggcacggtcatgggtgctgagcttcggcacgtccttgccacc

SEQ ID NO: 157019 - DNA, 641 bp, Homo sapiens
  Payload ID: 10776
  Gene Symbol: MYL4
  Gene Name: myosin, light chain 4, alkali
  atrial, embryonic
  ENST ID: ENST00000576874
  CDS Start-End: 125-641
ctggctgctccggcatatttgagaaggtctgtttccctggtccttctgggtttccaccaattggcaagaagggatcagcctgtcctagagatcactcctctgccaaagatcccaacaagacaacatggctcccaagaagcctgagcctaagaaggaggcagccaagccagctccagctccagctccagcccctgcaccagcccctgccccagctcctgaggctcccaaggaacctgcctttgaccccaagagtgtaaagatagacttcactgccgaccagattgaagagttcaaagaggccttttcattgtttgaccggaccccgactggagagatgaagatcacctacggccagtgcggggatgtactgcgggccctgggccagaaccctaccaatgccgaggtgctgcgtgtgctgggcaagcccaagcctgaagagatgaatgtcaagatgctggactttgagacgttcttgcccatcctgcagcacatttcccgcaacaaggagcagggcacctatgaggacttcgtggagggcctgcgtgtctttgacaaggagagcaatggcacggtcatgggtgctgagcttcggcacgtccttgccaccctgggagagaagatgactgaggctgaagtggagc

SEQ ID NO: 157020 - DNA, 920 bp, Homo sapiens
  Payload ID: 10776
  Gene Symbol: MYL4
  Gene Name: myosin, light chain 4, alkali
  atrial, embryonic
  ENST ID: ENST00000571981
  CDS Start-End: 176-361
tggttgtcttagcatcctgcattctagtctcaggtcggtcataactcagtgtgacgttgggcaagtcacccccttctctctggacctctgaagttccttgtagctgttagcatatctgggatgatgcagtttggatgactgatcactcctctgccaaagatcccaacaagacaacatggctcccaagaagcctgagcctaagaaggaggcagccaagccagctccagctccagctccagcccctgcaccagcccctgccccagctcctgaggctcccaaggaacctgcctttgaccccaagagtgtaaagagttcaaagaggccttttcattgtttgaccggaccccgactggagagatgaagatcacctacggccagtgcggggatgtactgcgggccctgggccagaaccctaccaatgccgaggtgctgcgtgtgctgggcaagcccaagcctgaagagatgaatgtcaagatgctggactttgagacgttcttgcccatcctgcagcacatttcccgcaacaaggagcagggcacctatgaggacttcgtggagggcctgcgtgtctttgacaaggagagcaatggcacggtcatgggtgctgagcttcggcacgtccttgccaccctgggagagaagatgactgaggctgaagtggagcagctgttagctgggcaagaggatgccaatggctgcatcaattatgaagcctttgtcaagcacatcatgtcagggtgaagcagagtcttccaggtgcctggcccttggctttagccataccagggtgagttaaagagaggccccggctgggtgagctgagatggagtcctcgacttatcaccacaccactgccccaaggaccttacaggccctccctgttaataaacagctctaacacggccaggctgggctctggg

SEQ ID NO: 157021 - DNA, 640 bp, Homo sapiens
  Payload ID: 10776
  Gene Symbol: MYL4
  Gene Name: myosin, light chain 4, alkali
  atrial, embryonic
  ENST ID: ENST00000573747
  CDS Start-End: 82-429
gctcctatctcatctcccagacgccacgtctctcggtttcttcttagatcactcctctgccaaagatcccaacaagacaacatggctcccaagaagcctgagcctaagaaggaggcagccaagccagctccagctccagctccagcccctgcaccagcccctgccccagctcctgaggctcccaaggaacctgcctttgaccccaagagtgtaaagatagacttcactgccgaccagattgaagagttcaaagaggccttttcattgtttgaccggaccccgactggagagatgaagatcacctacggccagtgcggggatgtactgcgggccctgggccagaaccctaccaatgccgaggtgctgcgtgtgctgggcaagcccaagcctgaagcacatttcccgcaacaaggagcagggcacctatgaggacttcgtggagggcctgcgtgtctttgacaaggagagcaatggcacggtcatgggtgctgagcttcggcacgtccttgccaccctgggagagaagatgactgaggctgaagtggagcagctgttagctgggcaagaggatgccaatggctgcatcaattatgaagcctttgtcaagcacatcatgtcagggtgaagcagagtcttccag

SEQ ID NO: 157022 - DNA, 740 bp, Homo sapiens
  Payload ID: 10776
  Gene Symbol: MYL4
  Gene Name: myosin, light chain 4, alkali
  atrial, embryonic
  ENST ID: ENST00000570671
  CDS Start-End: 1-305
tgctgggcaagcccaagcctgaagagatgaatgtcaagatgctggactttgagacgttcttgcccatcctgcagcacatttcccgcaacaaggagcagggcacctatgaggacttcgtggagggcctgcgtgtctttgacaaggagagcaatggcacggtcatgggtgctgagcttcggcacgtccttgccaccctgggagagaagatgactgaggctgaagtggagcagctgttagctgggcaagaggatgccaatggctgcatcaattatgaagcctttgtcaagcacatcatgtcagggtgaagcagagtcttccaggtgagtgcagcctctccctcctggtcccttccggggtcacatagggccttaagaataacaccatgtgccctagaaggcatctgtcccagccctgaccccttaagaggaaacctcttgggatcaggaagtgaggacagccctgctcactcaccatctcctgtctcctgcctgcccttgcctgttcaccctgtcttgaccctatcagtcacatcctcttgcctctcccaggatctctcaaggcaatgcccttccctcaggcctggggcctcctgtacaggctcctgggagtgagaaagccgatcccaagtggaagagaaggtccctggcctgtgctcttgaccccgttcttcctcacttctttccctaggttttccctgggatccccctgggtgtggtaaggggctgggtctaggagggtga

SEQ ID NO: 157023 - DNA, 850 bp, Homo sapiens
  Payload ID: 10776
  Gene Symbol: MYL4
  Gene Name: myosin, light chain 4, alkali
  atrial, embryonic
  Uniprot ID: P12829
  ENST ID: ENST00000572316
  CDS Start-End: 92-685
gcttatcaactgctcaagtcagctcatctctctggctgctccggcatatttgagaagatcactcctctgccaaagatcccaacaagacaacatggctcccaagaagcctgagcctaagaaggaggcagccaagccagctccagctccagctccagcccctgcaccagcccctgccccagctcctgaggctcccaaggaacctgcctttgaccccaagagtgtaaagatagacttcactgccgaccagattgaagagttcaaagaggccttttcattgtttgaccggaccccgactggagagatgaagatcacctacggccagtgcggggatgtactgcgggccctgggccagaaccctaccaatgccgaggtgctgcgtgtgctgggcaagcccaagcctgaagagatgaatgtcaagatgctggactttgagacgttcttgcccatcctgcagcacatttcccgcaacaaggagcagggcacctatgaggacttcgtggagggcctgcgtgtctttgacaaggagagcaatggcacggtcatgggtgctgagcttcggcacgtccttgccaccctgggagagaagatgactgaggctgaagtggagcagctgttagctgggcaagaggatgccaatggctgcatcaattatgaagcctttgtcaagcacatcatgtcagggtgaagcagagtcttccaggtgcctggcccttggctttagccataccagggtgagttaaagagaggccccggctgggtgagctgagatggagtcctcgacttatcaccacaccactgccccaaggaccttacaggccctccctgttaataaacagctctaacacggcca

SEQ ID NO: 157024 - DNA, 544 bp, Homo sapiens
  Payload ID: 10776
  Gene Symbol: MYL4
  Gene Name: myosin, light chain 4, alkali
  atrial, embryonic
  ENST ID: ENST00000572303
  CDS Start-End: 24-544
gccaaagatcccaacaagacaacatggctcccaagaagcctgagcctaagaaggaggcagccaagccagctccagctccagctccagcccctgcaccagcccctgccccagctcctgaggctcccaaggaacctgcctttgaccccaagagtgtaaagatagacttcactgccgaccagattgaaggtgagtatggacaaccccacctctccgtctctattgcactttcctggaggaggaggaggaggaggaagaagaggaggagtagttgtcctcatgagttcaaagaggccttttcattgtttgaccggaccccgactggagagatgaagatcacctacggccagtgcggggatgtactgcgggccctgggccagaaccctaccaatgccgaggtgctgcgtgtgctgggcaagcccaagcctgaagagatgaatgtcaagatgctggactttgagacgttcttgcccatcctgcagcacatttcccgcaacaaggagcagggcacctatgaggacttcgtggagggcctgcgtgtctttga

SEQ ID NO: 157025 - DNA, 666 bp, Homo sapiens
  Payload ID: 10777
  Gene Symbol: MYL5
  Gene Name: myosin, light chain 5, regulatory
  Uniprot ID: Q02045
  ENST ID: ENST00000400159
  CDS Start-End: 106-627
ggagtggcagccggagtctgaactgtcctgggggaccaagcaggagcttaagatgggcaagacctggggccctgggcagacgcatcaaagcaggcagaagcaggcatggccagcaggaagaccaagaagaaggaagggggtgccctccgggcccagagagcctcatccaatgtcttctccaactttgagcagactcagatccaggagttcaaggaggcattcacactcatggatcagaaccgagatggcttcattgacaaggaggacctgaaggacacctatgcctccctgggcaagaccaacgtcaaggacgacgagctggacgccatgctcaaagaggcctcggggcccatcaacttcaccatgtttctgaacctgtttggggagaagctgagcggtaccgacgccgaggagaccattcttaacgccttcaagatgctggacccggacgggaaagggaaaatcaacaaggagtacatcaagcgtctgctgatgtcccaggctgacaagatgacggcggaagaggtggaccagatgttccagttcgcctccatcgatgtggcgggcaacctggactacaaggcgctcagctacgtgatcacccacggggaggagaaggaggagtgagacccagccgggtcaataaacctggacgcttggaccctg

SEQ ID NO: 157026 - DNA, 731 bp, Homo sapiens
  Payload ID: 10777
  Gene Symbol: MYL5
  Gene Name: myosin, light chain 5, regulatory
  ENST ID: ENST00000513662
  CDS Start-End: 74-391
ggaccaagcaggagcttaagatgggcaagacctggggccctgggcagacgcatcaaagcaggcagaagcaggcatggccagcaggaagaccaagaagaaggaagggggtgccctccgggcccagagagcctcatccaatgtcttctccaactttgagcagactcagatccaggagttcaaggaggcattcacactcatggatcagaaccgagatggcttcattgacaaggaggacctgaaggacacctatgcctccctgggtaggtacccaggcagaacgcctcagagcccttggaggaggcgaacacagaggtcctccagctccagacgccgcggcccctcctcgaatggagccagggcccgcgcctcagaggcccaccaacggccctgaagctgcaaggcaagaccaacgtcaaggacgacgagctggacgccatgctcaaagaggcctcggggcccatcaacttcaccatgtttctgaacctgtttggggagaagctgagcggtaccgacgccgaggagaccattcttaacgccttcaagatgctggacccggacgggaaagggaaaatcaacaaggagtacatcaagcgtctgctgatgtcccaggctgacaagatgacggcggaagaggtggaccagatgttccagttcgcctccatcgatgtggcgggcaacctggactacaaggcgctcagctacgtgatcacccacggggaggagaaggagga

SEQ ID NO: 157027 - DNA, 584 bp, Homo sapiens
  Payload ID: 10777
  Gene Symbol: MYL5
  Gene Name: myosin, light chain 5, regulatory
  Uniprot ID: Q02045
  ENST ID: ENST00000505477
  CDS Start-End: 158-556
aggaacagggcggagtagcggccgagctgcgaaagaggccagcaggaagaccaagaagaaggaagggggtgccctccgggcccagagagcctcatccaatgtcttctccaactttgagcagactcagatccaggagttcaaggaggcattcacactcatggatcagaaccgagatggcttcattgacaaggaggacctgaaggacacctatgcctccctgggcaagaccaacgtcaaggacgacgagctggacgccatgctcaaagaggcctcggggcccatcaacttcaccatgtttctgaacctgtttggggagaagctgagcggtaccgacgccgaggagaccattcttaacgccttcaagatgctggacccggacgggaaagggaaaatcaacaaggagtacatcaagcgtctgctgatgtcccaggctgacaagatgacggcggaagaggtggaccagatgttccagttcgcctccatcgatgtggcgggcaacctggactacaaggcgctcagctacgtgatcacccacggggaggagaaggaggagtgagacccagccgggtcaataaacctggacg

SEQ ID NO: 157028 - DNA, 1780 bp, Homo sapiens
  Payload ID: 10777
  Gene Symbol: MYL5
  Gene Name: myosin, light chain 5, regulatory
  ENST ID: ENST00000503300
  CDS Start-End: 1209-1403
gcgtgaggcgggatctgcgccgagtgggcggggggtttcctttccccgcagggctgggggtccgctgtttccccgcgctgctgccgaggccccgccgtccgcgtcctggccgtgtgtccacaccccagactgcgggccggggcgcactctgtcttcttgcgcggagcgtcggaggcctgaggtcagggcggctcgggcgggtccagccccgcggaccgcgcccacccgagggtggcctgggcagggacctgggggtcctgggagcggagtgtgagccgagtgcaggtggctccccgggcaggtccttctcctacaaggcagtagtgtctgtcgccggccgggccgcgttggattccgcggcccgcgggagcatggcctccaggcccctcttcctgcggctgctctgcccgggagcacggggcgcccttcatcccggagctggagcttcctcaccccaggatgccccatcacttctgtcccgaagaggggctgggatcttcttgggaagaccagcccccaacagaggctgctccctgggtcccccgactccaggcctcaggactccacggctccaagggcctgccccggcccaggcctggggaccactgagccccacactggtctttgctggcctctgtccacctcccggtagctgtgtgtctcccacagctgcccagagatggggcctgcggtgcctatgcagcctccccgctgtgcccgaagtgctgacccgccagccccatggacaccaggcttggagtctaggcaggagcctggcaccccctccacgttctgggtcttcctggcggcagccatgctgcccgtgctgggccaccctcgggccccctttggccccatgcagtagtgacgcaaggcctcctgtgtcccctcctggccctgcactgctacaggcagaagcaactggagaactatggctcgggtctcgctaagggggccagaagcaaactccagccctccccgtgtctactgctcgctgaggaagccgcaggtgcacactggatccacaaggcacagaaccatcttggccctcggcaagcccccgcttccgccagggcagacggcctcaggccagcaggaagaccaagaagaaggaagggggtgccctccgggcccagagagcctcatccaatgtcttctccaactttgagcagactcagatccaggagttcaaggaggcattcacactcatggatcagaaccgagatggcttcattgacaaggaggacctgaaggacacctatgcctccctgggtaggtacccaggcagaacgcctcagagcccttggaggaggcgaacacagaggtcctccagctccagacgccgcggcccctcctcgaatggagccagggcccgcgcctcagaggcccaccaacggccctgaagctgcaaggcaagaccaacgtcaaggacgacgagctggacgccatgctcaaagaggcctcggggcccatcaacttcaccatgtttctgaacctgtttggggagaagctgagcggtaccgacgccgaggagaccattcttaacgccttcaagatgctggacccggacgggaaagggaaaatcaacaaggagtacatcaagcgtctgctgatgtcccaggctgacaagatgacggcggaagaggtggaccagatgttccagttcgcctccatcgatgtggcgggcaacctggactacaaggcgctcagctacgtgatcacccacggggaggagaaggaggagtgagacccagccgggtcaataaacctggacgcttgg

SEQ ID NO: 157029 - DNA, 781 bp, Homo sapiens
  Payload ID: 10777
  Gene Symbol: MYL5
  Gene Name: myosin, light chain 5, regulatory
  Uniprot ID: Q02045
  ENST ID: ENST00000511290
  CDS Start-End: 349-747
gggtccgctgtttccccgcgctgctgccgaggccccgccgtccgcgtcctggccgtgtgtccacaccccagactgcgggccggggcgcactctgtcttcttgcgcggagcgtcggaggcctgaggtcagggcggctcgggcgggtccagccccgcggaccgcgcccacccgagggtggcctgggcagggacctgggggtcctgggagcggagtgtgagccgagtgcaggccagcaggaagaccaagaagaaggaagggggtgccctccgggcccagagagcctcatccaatgtcttctccaactttgagcagactcagatccaggagttcaaggaggcattcacactcatggatcagaaccgagatggcttcattgacaaggaggacctgaaggacacctatgcctccctgggcaagaccaacgtcaaggacgacgagctggacgccatgctcaaagaggcctcggggcccatcaacttcaccatgtttctgaacctgtttggggagaagctgagcggtaccgacgccgaggagaccattcttaacgccttcaagatgctggacccggacgggaaagggaaaatcaacaaggagtacatcaagcgtctgctgatgtcccaggctgacaagatgacggcggaagaggtggaccagatgttccagttcgcctccatcgatgtggcgggcaacctggactacaaggcgctcagctacgtgatcacccacggggaggagaaggaggagtgagacccagccgggtcaataaacctggacgcttgga

SEQ ID NO: 157030 - DNA, 2956 bp, Homo sapiens
  Payload ID: 10777
  Gene Symbol: MYL5
  Gene Name: myosin, light chain 5, regulatory
  Uniprot ID: Q02045
  ENST ID: ENST00000506838
  CDS Start-End: 2525-2923
acagggcccctgctgcccacccgctcacgcactggctcactcgtcctctgcgaacagggactgcctcccatcaagacctcagcactcgaacagccatttagcacccgttttcaccaagaagcagccgttttcgagtcccccgcccgggcctcagaagcctgagctttgggtgagctgattccactatcggggtcacgctcggtggaggacacggtcctgcagcctcgcatgcgtcccaagcccccttccagagctggagttctccaaatagcacaggagctccacaggaaagccgagcagaccccgccccggccccgcccgcggtcactcactgtagcgcgtggctccgtaggccacaccgaggaacagggcggagtagcggccgagctgcgaaagaggttggtcagaggcggcgcgaaacggggctcgcgggacgggggtcgcgggaggagggggggcggggtcgctgggcagaggtcgcaggaggggtgggggtccggtcgccgggcgagggtcacggggcgaggatcatgggggcgggggccgggggtcgcagcccgcggggtcggagctgcggggcgggacacgggggggcccagagcactgggcggcggctgcaaagcctggatcaccttgatgagcggagagacctgcaccggtggcaccatcttgtccctgacctccgcaccggaagcacaacctgcagacggagcaggatgccgcacaagccagcaaagccttggaggcaaaggcggagctgggcgcacgcatgcgccgtcagcggcgagagagcggggggccgcgccccctggcgaccgaagggtgactgcgcgcccccgcgcggcggtgacgtcacgtgaggcgcacgcgcacaaaggctggggagtgcgcggaggatcatcggctgcgcctgcgcagttgctgcgtgaggcgggatctgcgccgagtgggcggggggtttcctttccccgcagggctgggggtccgctgtttccccgcgctgctgccgaggccccgccgtccgcgtcctggccgtgtgtccacaccccagactgcgggccggggcgcactctgtcttcttgcgcggagcgtcggaggcctgaggtcagggcggctcgggcgggtccagccccgcggaccgcgcccacccgagggtggcctgggcagggacctgggggtcctgggagcggagtgtgagccgagtgcaggtggctccccgggcaggtccttctcctacaaggcagtagtgtctgtcgccggccgggccgcgttggattccgcggcccgcgggagcatggcctccaggcccctcttcctgcggctgctctgcccgggagcacggggcgcccttcatcccggagctggagcttcctcaccccaggatgccccatcacttctgtcccgaagaggggctgggatcttcttgggaagaccagcccccaacagaggctgctccctgggtcccccgactccaggcctcaggactccacggctccaagggcctgccccggcccaggcctggggaccactgagccccacactggtctttgctggcctctgtccacctcccggtagctgtgtgtctcccacagctgcccagagatggggcctgcggtgcctatgcagcctccccgctgtgcccgaagtgctgacccgccagccccatggacaccaggcttggagtctaggcaggagcctggcaccccctccacgttctgggtcttcctggcggcagccatgctgcccgtgctgggccaccctcgggccccctttggccccatgcagtagtgacgcaaggcctcctgtgtcccctcctggccctgcactgctacaggcagaagcaactggagaactatggctcgggtctcgctaaggtgcagcatcacaaactccaggactcttgaagcaagcatggggaggacccgtgatcctggcggcctgggctacctgtccgggcctaagtcgcctctgccccctctcctggcttgctctggggtccagggcctgggcctctctggctgagaaactaggaagtcactgggctctgtttcctgagctgggtataccaaggccagtcctatagggcaggggtccccaacccccaggtgcagaccagtaccagcttgtggcccgttaggaaccgggcagcacaggacgaggtgagggagcatgattgcccgagctccacccactttcagatcagcctgggcatcagattcccataggagcgtgaaccctactgtgagctgcgcacttggatctggattgcgctctgggggccagaagcaaactccagccctccccgtgtctactgctcgctgaggaagccgcaggtgcacactggatccacaaggcacagaaccatcttggccctcggcaagcccccgcttccgccagggcagacggcctcaggaagaccaagaagaaggaagggggtgccctccgggcccagagagcctcatccaatgtcttctccaactttgagcagactcagatccaggagttcaaggaggcattcacactcatggatcagaaccgagatggcttcattgacaaggaggacctgaaggacacctatgcctccctgggcaagaccaacgtcaaggacgacgagctggacgccatgctcaaagaggcctcggggcccatcaacttcaccatgtttctgaacctgtttggggagaagctgagcggtaccgacgccgaggagaccattcttaacgccttcaagatgctggacccggacgggaaagggaaaatcaacaaggagtacatcaagcgtctgctgatgtcccaggctgacaagatgacggcggaagaggtggaccagatgttccagttcgcctccatcgatgtggcgggcaacctggactacaaggcgctcagctacgtgatcacccacggggaggagaaggaggagtgagacccagccgggtcaataaacctggacgcttgg

SEQ ID NO: 157031 - DNA, 829 bp, Homo sapiens
  Payload ID: 10777
  Gene Symbol: MYL5
  Gene Name: myosin, light chain 5, regulatory
  ENST ID: ENST00000507804
  CDS Start-End: 452-829
tatgtgcgtgtgtgtgaccttgcgggtgtgggctgtgctgtgttgtgggaagtacgtgcctcacgttgctctcctggtgagagtccggagcaggatgagggggttcctggctttcacaaaatcccggtacccagaacaagcccacccagagtccacttgcccctcaagccttcagaggccaagctggctcctgctggacggcgatccctgaccactgtgctctgtgggccttctggaagccactgtccctcccccagtccctgtgctgaagccagacacctgcagccgtcctgcccccaaccccagctacccaggcctgaggctggcatgctcctcagctgtctggccccctccagcccgaagggctgaggtccacccttcatctgagttaagtctctcaaaactctgggtgccctggagggtttcgtcagccagcccaggaccctcagccatggtgctcccaccgcaggccagcaggaagaccaagaagaaggaagggggtgccctccgggcccagagagcctcatccaatgtcttctccaactttgagcagactcagatccaggagttcaaggaggcattcacactcatggatcagaaccgagatggcttcattgacaaggaggacctgaaggacacctatgcctccctgggcaagaccaacgtcaaggacgacgagctggacgccatgctcaaagaggcctcggggcccatcaacttcaccatgtttctgaacctgtttggggagaagctgagcggtaccgacgccgaggagaccattcttaacgccttcaagatgctggacccggacgggaaagggaaaatcaac

SEQ ID NO: 157032 - DNA, 664 bp, Homo sapiens
  Payload ID: 10778
  Gene Symbol: MYL6
  Gene Name: myosin, light chain 6, alkali, smooth muscle and non-muscle
  ENST ID: ENST00000293422
  CDS Start-End: 47-505
ggagccattactgcaggaaaaggtcccggagagctgagcagtcaagatgcagtgtgacttcaccgaagaccagaccgcagagttcaaggaggccttccagctgtttgaccgaacaggtgatggcaagatcctgtacagccagtgtggggatgtgatgagggccctgggccagaaccctaccaacgccgaggtgctcaaggtcctggggaaccccaagagtgatgagatgaatgtgaaggtgctggactttgagcactttctgcccatgctgcagacagtggccaagaacaaggaccagggcacctatgaggattatgtcgaaggacttcgggtgtttgacaaggaaggaaatggcaccgtcatgggtgctgaaatccggcatgttcttgtcacactgggtgagaagatgacagaggaagaagtagagatgctggtggcagggcatgaggacagcaatggttgtatcaactatgaagagctcgtccgcatggtgctgaatggctgaggaccttcccagtctccccagagtccgtgcctttccctgtgtgaattttgtatctagcctaaagtttccctaggctttcttgtctcagcaactttcccatcttgtctctcttggatgatgtttgccgtcagcattcaccaaataaacttgctctctggg

SEQ ID NO: 157033 - DNA, 722 bp, Homo sapiens
  Payload ID: 10778
  Gene Symbol: MYL6
  Gene Name: myosin, light chain 6, alkali, smooth muscle and non-muscle
  ENST ID: ENST00000348108
  CDS Start-End: 47-505
ggagccattactgcaggaaaaggtcccggagagctgagcagtcaagatgcagtgtgacttcaccgaagaccagaccgcagagttcaaggaggccttccagctgtttgaccgaacaggtgatggcaagatcctgtacagccagtgtggggatgtgatgagggccctgggccagaaccctaccaacgccgaggtgctcaaggtcctggggaaccccaagagtgatgagatgaatgtgaaggtgctggactttgagcactttctgcccatgctgcagacagtggccaagaacaaggaccagggcacctatgaggattatgtcgaaggacttcgggtgtttgacaaggaaggaaatggcaccgtcatgggtgctgaaatccggcatgttcttgtcacactgggtgagaagatgacagaggaagaagtagagatgctggtggcagggcatgaggacagcaatggttgtatcaactatgaagcgtttgtgaggcatatcctgtcggggtgacgggcccatggggcggagctcgtccgcatggtgctgaatggctgaggaccttcccagtctccccagagtccgtgcctttccctgtgtgaattttgtatctagcctaaagtttccctaggctttcttgtctcagcaactttcccatcttgtctctcttggatgatgtttgccgtcagcattcaccaaataaacttgctctctgggccctcggttcggt

SEQ ID NO: 157034 - DNA, 1221 bp, Homo sapiens
  Payload ID: 10778
  Gene Symbol: MYL6
  Gene Name: myosin, light chain 6, alkali, smooth muscle and non-muscle
  ENST ID: ENST00000536128
  CDS Start-End: 41-757
attactgcaggaaaaggtcccggagagctgagcagtcaagatggtggggcccaggtcttgggagacgggcaggattggggacgagaggcaggaagagacgggtggggggcgaggagaaggcaggggtaggaggcaaagggaatctgaggacccgaaaggttggaggtggggttggaaagactggggccctgcggggaagcgagtctgcagcctgaaacaggagtttgtgggtcagagtttgtgggtcagagtttgtggggctgggatagaaactcgggggattggcgttcagatgctgaccacttccctcttctctgagcagtgtgacttcaccgaagaccagaccgcagagttcaaggaggccttccagctgtttgaccgaacaggtgatggcaagatcctgtacagccagtgtggggatgtgatgagggccctgggccagaaccctaccaacgccgaggtgctcaaggtcctggggaaccccaagagtgatgagatgaatgtgaaggtgctggactttgagcactttctgcccatgctgcagacagtggccaagaacaaggaccagggcacctatgaggattatgtcgaaggacttcgggtgtttgacaaggaaggaaatggcaccgtcatgggtgctgaaatccggcatgttcttgtcacactgggtgagaagatgacagaggaagaagtagagatgctggtggcagggcatgaggacagcaatggttgtatcaactatgaaggtaagaggtgaactgcgctttctcagagaaagcagccatatggggcaggtcaagtatagtgtctggggctttccctatccctggacttgggctccaaaaagagccaggaggcaaggtgcagggccctgcccagcccagcccaggagtgggaggtcagggcggtataacaggaaaggaagggggtagtattgtagagggtgggaaggaatgagaagtgaaataatggaatgtctgtccccactgcctgacccctcaccccatgtctttgtcttgtcttcaccatgaatgtctcttccttcctgcagcgtttgtgaggcatatcctgtcggggtgacgggcccatggggcgggtacggctcctcccagcctctcctctagttgatctccccagtgtttcttttttccccaacctgtgctctttatcccctgcccttaccctactaccatctgacttcctcctggcatgtttctgcat

SEQ ID NO: 157035 - DNA, 528 bp, Homo sapiens
  Payload ID: 10778
  Gene Symbol: MYL6
  Gene Name: myosin, light chain 6, alkali, smooth muscle and non-muscle
  ENST ID: ENST00000548580
  CDS Start-End: 57-368
gccgagagtcggagccattactgcaggaaaaggtcccggagagctgagcagtcaagatgtgtgacttcaccgaagaccagaccgcagagatgaatgtgaaggtgctggactttgagcactttctgcccatgctgcagacagtggccaagaacaaggaccagggcacctatgaggattatgtcgaaggacttcgggtgtttgacaaggaaggaaatggcaccgtcatgggtgctgaaatccggcatgttcttgtcacactgggtgagaagatgacagaggaagaagtagagatgctggtggcagggcatgaggacagcaatggttgtatcaactatgaagagctcgtccgcatggtgctgaatggctgaggaccttcccagtctccccagagtccgtgcctttccctgtgtgaattttgtatctagcctaaagtttccctaggctttcttgtctcagcaactttcccatcttgtctctcttggatgatgtttgccgtcagcattcaccaaataaacttgctctctgggc

SEQ ID NO: 157036 - DNA, 1438 bp, Homo sapiens
  Payload ID: 10778
  Gene Symbol: MYL6
  Gene Name: myosin, light chain 6, alkali, smooth muscle and non-muscle
  ENST ID: ENST00000551589
  CDS Start-End: 34-471
caggaaaaggtcccggagagctgagcagtcaagatgtgtgacttcaccgaagaccagaccgcagagttcaaggaggccttccagctgtttgaccgaacaggtgatggcaagatcctgtacagccagtgtggggatgtgatgagggccctgggccagaaccctaccaacgccgaggtgctcaaggtcctggggaaccccaagagtgatgagatgaatgtgaaggtgctggactttgagcactttctgcccatgctgcagacagtggccaagaacaaggaccagggcacctatgaggattatgtcgaaggacttcgggtgtttgacaaggaaggaaatggcaccgtcatgggtgctgaaatccggcatgttcttgtcacactgggtgagaagatgacagaggaagaagtagagatgctggtggcagggcatgaggacagcaatggttgtatcaactatgaaggtaagaggtgaactgcgctttctcagagaaagcagccatatggggcaggtcaagtatagtgtctggggctttccctatccctggacttgggctccaaaaagagccaggaggcaaggtgcagggccctgcccagcccagcccaggagtgggaggtcagggcggtataacaggaaaggaagggggtagtattgtagagggtgggaaggaatgagaagtgaaataatggaatgtctgtccccactgcctgacccctcaccccatgtctttgtcttgtcttcaccatgaatgtctcttccttcctgcagcgtttgtgaggcatatcctgtcggggtgacgggcccatggggcgggtacggctcctcccagcctctcctctagttgatctccccagtgtttcttttttccccaacctgtgctctttatcccctgcccttaccctactaccatctgacttcctcctggcatgtttctgcatggagctgactagggaggggagggattcctcaaagaggaagacaacctgggggtacagtacctccttacctctagaatgggccctgaggttttacttatgcggccctgggtgctggtgtctgggaactctcaccagcctgtataccagtcttgctttagggtgaccttctggccctggagcatgggtagctggcatagaggggtatgggttgcctgccccattctgctgctatagctgaacagtcctttccccttccctcgctgggcagcttggaggtaccctaacccaaaactctgtcctctcctcccgccagtggctgacagtagctgtaggtgtagtggagaacttttctgcctctgctgtgttcttgctgcttaggtttgggtgggggactaacagctgctgggaggggagctaggggcatggagaactggtcagactcaaggtggctcctctgcaaactgaccccagggttggttgctgtgggcatgttcccgcttatg

SEQ ID NO: 157037 - DNA, 685 bp, Homo sapiens
  Payload ID: 10778
  Gene Symbol: MYL6
  Gene Name: myosin, light chain 6, alkali, smooth muscle and non-muscle
  ENST ID: ENST00000549566
  CDS Start-End: 45-635
agccattactgcaggaaaaggtcccggagagctgagcagtcaagatggtggggcccaggtcttgggagacgggcaggattggggacgagaggcaggaagagacgggtggggggcgaggagaaggcaggggtaggaggcaaagggaatctgaggacccgaaaggttggaggtggggttggaaagactggggccctgcggggaagcgagtctgcagcctgaaacaggagtttgtgggtcagagtttgtgggtcagagtttgtggggctgggatagaaactcgggggattggcgttcagatgctgaccacttccctcttctctgagcagtgtgacttcaccgaagaccagaccgcagagatgaatgtgaaggtgctggactttgagcactttctgcccatgctgcagacagtggccaagaacaaggaccagggcacctatgaggattatgtcgaaggacttcgggtgtttgacaaggaaggaaatggcaccgtcatgggtgctgaaatccggcatgttcttgtcacactgggtgagaagatgacagaggaagaagtagagatgctggtggcagggcatgaggacagcaatggttgtatcaactatgaagagctcgtccgcatggtgctgaatggctgaggaccttcccagtctccccagagtccgtgcctttccctgtgtgaattttg

SEQ ID NO: 157038 - DNA, 655 bp, Homo sapiens
  Payload ID: 10778
  Gene Symbol: MYL6
  Gene Name: myosin, light chain 6, alkali, smooth muscle and non-muscle
  Uniprot ID: P60660
  ENST ID: ENST00000547649
  CDS Start-End: 41-496
attactgcaggaaaaggtcccggagagctgagcagtcaagatgtgtgacttcaccgaagaccagaccgcagagttcaaggaggccttccagctgtttgaccgaacaggtgatggcaagatcctgtacagccagtgtggggatgtgatgagggccctgggccagaaccctaccaacgccgaggtgctcaaggtcctggggaaccccaagagtgatgagatgaatgtgaaggtgctggactttgagcactttctgcccatgctgcagacagtggccaagaacaaggaccagggcacctatgaggattatgtcgaaggacttcgggtgtttgacaaggaaggaaatggcaccgtcatgggtgctgaaatccggcatgttcttgtcacactgggtgagaagatgacagaggaagaagtagagatgctggtggcagggcatgaggacagcaatggttgtatcaactatgaagagctcgtccgcatggtgctgaatggctgaggaccttcccagtctccccagagtccgtgcctttccctgtgtgaattttgtatctagcctaaagtttccctaggctttcttgtctcagcaactttcccatcttgtctctcttggatgatgtttgccgtcagcattcaccaaataaacttgctctctggg

SEQ ID NO: 157039 - DNA, 683 bp, Homo sapiens
  Payload ID: 10778
  Gene Symbol: MYL6
  Gene Name: myosin, light chain 6, alkali, smooth muscle and non-muscle
  ENST ID: ENST00000547408
  CDS Start-End: 35-520
gcaggaaaaggtcccggagagctgagcagtcaagatgtgtgacttcaccgaagaccagaccgcagagttcaaggaggccttccagctgtttgaccgaacaggtgatggcaagatcctgtacagccagtgtggggatgtgatgagggccctgggccagaaccctaccaacgccgaggtgctcaaggtcctggggaaccccaagagtgatgagatgaatgtgaaggtgctggactttgagcactttctgcccatgctgcagacagtggccaagaacaaggaccagggcacctatgaggattatgtcgaaggacttcgggtgtttgacaaggaaggaaatggcaccgtcatgggtgctgaaatccggcatgttcttgtcacactgggtgagaagatgacagaggaagaagtagagatgctggtggcagggcatgaggacagcaatggttgtatcaactatgaaggtaaacgccgctgtgaaggactccaggaaagctgctcccatcacaatccccctgcctgacagccacaggagtccatggatacagcccagggaaggaaggagaacagcccccagtgccctttcttctcctattacctaccacagaaatccccgaaattaggttttccccaccaaatacacatacgctgacatcaactaagcaagtgacttttaaaaacaaaac

SEQ ID NO: 157040 - DNA, 901 bp, Homo sapiens
  Payload ID: 10778
  Gene Symbol: MYL6
  Gene Name: myosin, light chain 6, alkali, smooth muscle and non-muscle
  Uniprot ID: P60660
  ENST ID: ENST00000550697
  CDS Start-End: 242-697
ctccccccacgaccccccccacctccgagcgggttctgtgcccaggtggcgctggagaaaggaacagcggaccccgcccaagtcattactaatgtagcaatcgtctgcataaacccaggccacggttcctattggctgagtcctctgagggtgacgtcatcgggacgtactaagactagggttgggccgagagtcggagccattactgcaggaaaaggtcccggagagctgagcagtcaagatgtgtgacttcaccgaagaccagaccgcagagttcaaggaggccttccagctgtttgaccgaacaggtgatggcaagatcctgtacagccagtgtggggatgtgatgagggccctgggccagaaccctaccaacgccgaggtgctcaaggtcctggggaaccccaagagtgatgagatgaatgtgaaggtgctggactttgagcactttctgcccatgctgcagacagtggccaagaacaaggaccagggcacctatgaggattatgtcgaaggacttcgggtgtttgacaaggaaggaaatggcaccgtcatgggtgctgaaatccggcatgttcttgtcacactgggtgagaagatgacagaggaagaagtagagatgctggtggcagggcatgaggacagcaatggttgtatcaactatgaagcgtttgtgaggcatatcctgtcggggtgacgggcccatggggcggagctcgtccgcatggtgctgaatggctgaggaccttcccagtctccccagagtccgtgcctttccctgtgtgaattttgtatctagcctaaagtttccctaggctttcttgtctcagcaactttcccatcttgtctctcttggatgatgtttgccgtcagcattcaccaaataaacttgctctctggg

SEQ ID NO: 157041 - DNA, 753 bp, Homo sapiens
  Payload ID: 10778
  Gene Symbol: MYL6
  Gene Name: myosin, light chain 6, alkali, smooth muscle and non-muscle
  Uniprot ID: P60660
  ENST ID: ENST00000548293
  CDS Start-End: 7-462
gtcaagatgtgtgacttcaccgaagaccagaccgcagagttcaaggaggccttccagctgtttgaccgaacaggtgatggcaagatcctgtacagccagtgtggggatgtgatgagggccctgggccagaaccctaccaacgccgaggtgctcaaggtcctggggaaccccaagagtgatgagatgaatgtgaaggtgctggactttgagcactttctgcccatgctgcagacagtggccaagaacaaggaccagggcacctatgaggattatgtcgaaggacttcgggtgtttgacaaggaaggaaatggcaccgtcatgggtgctgaaatccggcatgttcttgtcacactgggtgagaagatgacagaggaagaagtagagatgctggtggcagggcatgaggacagcaatggttgtatcaactatgaagcgtttgtgaggcatatcctgtcggggtgacgggcccatggggcgggtacggctcctcccagcctctcctctagttgatctccccagtgtttcttttttccccaacctgtgctctttatcccctgcccttaccctactaccatctgacttcctcctggcatgtttctgcatggagctgactagggaggggagggattcctcaaagaggaagacaacctgggggtacagtacctccttacctctagaatgggccctgaggttttacttatgcggccctgggtgctggtgtctgggaactctcaccagcctgtataccagtct

SEQ ID NO: 157042 - DNA, 452 bp, Homo sapiens
  Payload ID: 10778
  Gene Symbol: MYL6
  Gene Name: myosin, light chain 6, alkali, smooth muscle and non-muscle
  ENST ID: ENST00000546845
  CDS Start-End: 1-250
gaacaaggaccagggcacctatgaggattatgtcgaaggacttcgggtgtttgacaaggaaggaaatggcaccgtcatgggtgctgaaatccggcatgttcttgtcacactgggtgagaagatgacagaggaagaagtagagatgctggtggcagggcatgaggacagcaatggttgtatcaactatgaaggtaaacgccgctgtgaaggactccaggaaagctgctcccatcacaatccccctgcctgacagccacaggggagaagctgggacacgtggagcaggaatgcgggaagcagagttgagctgcgagccaagggttggtccaacccaaggagtccatggatacagcccagggaaggaaggagaacagcccccagtgccctttcttctcctattacctaccacagaaatccccgaaattaggttttccccaccaaatacacatacg

SEQ ID NO: 157043 - DNA, 573 bp, Homo sapiens
  Payload ID: 10778
  Gene Symbol: MYL6
  Gene Name: myosin, light chain 6, alkali, smooth muscle and non-muscle
  ENST ID: ENST00000548400
  CDS Start-End: 21-368
cggagagctgagcagtcaagatgtgtgacttcaccgaagaccagaccgcagagttcaaggaggccttccagctgtttgaccgaacagagatgaatgtgaaggtgctggactttgagcactttctgcccatgctgcagacagtggccaagaacaaggaccagggcacctatgaggattatgtcgaaggacttcgggtgtttgacaaggaaggaaatggcaccgtcatgggtgctgaaatccggcatgttcttgtcacactgggtgagaagatgacagaggaagaagtagagatgctggtggcagggcatgaggacagcaatggttgtatcaactatgaagcgtttgtgaggcatatcctgtcggggtgacgggcccatggggcggagctcgtccgcatggtgctgaatggctgaggaccttcccagtctccccagagtccgtgcctttccctgtgtgaattttgtatctagcctaaagtttccctaggctttcttgtctcagcaactttcccatcttgtctctcttggatgatgtttgccgtcagcattcaccaaataaacttgctctctgggc

SEQ ID NO: 157044 - DNA, 502 bp, Homo sapiens
  Payload ID: 10778
  Gene Symbol: MYL6
  Gene Name: myosin, light chain 6, alkali, smooth muscle and non-muscle
  ENST ID: ENST00000549017
  CDS Start-End: 200-343
gagccattactgcaggaaaaggtcccggagagctgagcagtcaagatgtgtgacttcaccgaagaccagaccgcagagttcaaggaggccttccagctgtttgaccgaacagacagtggccaagaacaaggaccagggcacctatgaggattatgtcgaaggacttcgggtgtttgacaaggaaggaaatggcaccgtcatgggtgctgaaatccggcatgttcttgtcacactgggtgagaagatgacagaggaagaagtagagatgctggtggcagggcatgaggacagcaatggttgtatcaactatgaagagctcgtccgcatggtgctgaatggctgaggaccttcccagtctccccagagtccgtgcctttccctgtgtgaattttgtatctagcctaaagtttccctaggctttcttgtctcagcaactttcccatcttgtctctcttggatgatgtttgccgtcagcattcaccaaataaacttgctctctggg

SEQ ID NO: 157045 - DNA, 411 bp, Homo sapiens
  Payload ID: 10778
  Gene Symbol: MYL6
  Gene Name: myosin, light chain 6, alkali, smooth muscle and non-muscle
  ENST ID: ENST00000549392
  CDS Start-End: 21-411
cggagagctgagcagtcaagatgtgtgacttcaccgaagaccagaccgcaggtgatggcaagatcctgtacagccagtgtggggatgtgatgagggccctgggccagaaccctaccaacgccgaggtgctcaaggtcctggggaaccccaagagtgatgagatgaatgtgaaggtgctggactttgagcactttctgcccatgctgcagacagtggccaagaacaaggaccagggcacctatgaggattatgtcgaaggacttcgggtgtttgacaaggaaggaaatggcaccgtcatgggtgctgaaatccggcatgttcttgtcacactgggtgagaagatgacagaggaagaagtagagatgctggtggcagggcatgaggacagcaatggttgtatcaactatgaag

SEQ ID NO: 157046 - DNA, 1034 bp, Homo sapiens
  Payload ID: 10779
  Gene Symbol: MYL6B
  Gene Name: myosin, light chain 6B, alkali, smooth muscle and non-muscle
  Uniprot ID: P14649
  ENST ID: ENST00000550443
  CDS Start-End: 304-930
agtcaccaaccaccgccatgggccggaagccaccgccctcgcgtcaactgcaatctagagcgcggcgcatcccgtgagcccgcggggaactacgactcccggcatgctccgcggccaccggaattaacccttcagggctgggggccgcgctatgccccgccccctccccagccccagacacggaccccgcaggccaactggctccctgcccctgcccccgccccttgacatcccagactccctggctatttaaacagagatgggtgcccccatccgcacactgtcctttggccaccggacatcatgcctcccaagaaggatgttcccgtgaagaaaccagcagggccctccatctccaaacctgctgctaagccagcagcagcaggggctcctccagccaagaccaaagctgagccagctgtcccccaggcccctcagaaaacccaggagcctccagtcgatctctccaaagtggtgatcgagtttaacaaggaccagctggaggagttcaaggaggccttcgagctgtttgaccgagtgggggatggcaagatcctgtacagccagtgtggggacgtgatgagggccctgggccagaaccccaccaacgccgaggtgctcaaggtcctggggaaccccaagagtgatgagctgaagtcgcggcgtgtggactttgagactttcctgcccatgctccaggcagtggccaagaaccgaggccaaggcacatatgaggactacttggaggggtttcgtgtgtttgacaaggaggggaacggcaaagtcatgggagcagagctcagacatgttctcaccacccttggagagaagatgactgaggaggaggtggagaccgttctggcaggacacgaggacagcaacggctgcatcaactacgaggccttcttgaaacacatcctaagcgtctgagtgctgcagatccagtggggtccggacactgggccccgcaggcgaaagcacgttccagccaccaggaggccacctattgtttcaaaataaagactgggttcctc

SEQ ID NO: 157047 - DNA, 703 bp, Homo sapiens
  Payload ID: 10779
  Gene Symbol: MYL6B
  Gene Name: myosin, light chain 6B, alkali, smooth muscle and non-muscle
  ENST ID: ENST00000552568
  CDS Start-End: 72-599
cagccccagacacggaccccgcaggagatgggtgcccccatccgcacactgtcctttggccaccggacatcatgcctcccaagaaggatgttcccgtgaagaaaccagcagggccctccatctccaaacctgctgctaagccagcagcagcaggggctcctccagccaagaccaaagctgagccagctgtcccccaggcccctcagaaaacccaggagcctccagtcgatctctccaaagtggtgatcgagtttaacaaggaccagctggaggagttcaaggaggccttcgagctgtttgaccgagtgggggatggcaagatcctgtacagccagtgtggggacgtgatgagggccctgggccagaaccccaccaacgccgaggtgctcaaggtcctggggaaccccaagagtgatgagctgaagtcgcggcgtgtggactttgagactttcctgcccatgctccaggcagtggccaagaaccgaggccaaggagagaagatgactgaggaggaggtggagaccgttctggcaggacacgaggacagcaacggctgcatcaactacgaggccttcttgaaacacatcctaagcgtctgagtgctgcagatccagtggggtccggacactgggccccgcaggcgaaagcacgttccagccaccaggaggccacctattgtttcaaaataaagactgggttcctc

SEQ ID NO: 157048 - DNA, 562 bp, Homo sapiens
  Payload ID: 10779
  Gene Symbol: MYL6B
  Gene Name: myosin, light chain 6B, alkali, smooth muscle and non-muscle
  ENST ID: ENST00000551834
  CDS Start-End: 476-562
atgccccgccccctccccagccccagacacggaccccgcaggttcacacaagcctccctggctgctacccctcaccccacccttcaagaagactaaagctgctggatcacctgctttgcctcaccacccccatctcagtgccactggcaagcatcctatcctcaccctggaggttaactacctcattctgggcagtctctggcttcctcccctacccctaaaggaaacattgttcttttctggtcagcctttggggataaggggacagagggaagaagaccttggggcaggagtcctgaaccataggaggccaggggagtgagggcaggcggttatatctctcctctacctcatctttgccacagccaactggctccctgcccctgcccccgccccttgacatcccagactccctggctatttaaacagagatgggtgcccccatccgcacactgtcctttggccaccggacatcatgcctcccaagaaggatgttcccgtgaagaaaccagcagggccctccatctccaaacctgctgctaagccagcagcagcaggggct

SEQ ID NO: 157049 - DNA, 1305 bp, Homo sapiens
  Payload ID: 10779
  Gene Symbol: MYL6B
  Gene Name: myosin, light chain 6B, alkali, smooth muscle and non-muscle
  Uniprot ID: P14649
  ENST ID: ENST00000553066
  CDS Start-End: 423-1049
ctttcagcagtaggtccaggaaaacagccgccccgccccctccacctcccgagactaggagcccgccagggttaagtaggagggataccctaggggccccgcagggtttttagggttggggtggattggaaattgttcattgcctttcagttccgggacataaagcgcgctggaaggacactgagtcaccaaccaccgccatgggccggaagccaccgccctcgcgtcaactgcaatctagagcgcggcgcatcccgtgagcccgcggggaactacgactcccggcatgctccgcggccaccggaattaacccttcagggctgggggccgcgctatgccccgccccctccccagccccagacacggaccccgcaggagatgggtgcccccatccgcacactgtcctttggccaccggacatcatgcctcccaagaaggatgttcccgtgaagaaaccagcagggccctccatctccaaacctgctgctaagccagcagcagcaggggctcctccagccaagaccaaagctgagccagctgtcccccaggcccctcagaaaacccaggagcctccagtcgatctctccaaagtggtgatcgagtttaacaaggaccagctggaggagttcaaggaggccttcgagctgtttgaccgagtgggggatggcaagatcctgtacagccagtgtggggacgtgatgagggccctgggccagaaccccaccaacgccgaggtgctcaaggtcctggggaaccccaagagtgatgagctgaagtcgcggcgtgtggactttgagactttcctgcccatgctccaggcagtggccaagaaccgaggccaaggcacatatgaggactacttggaggggtttcgtgtgtttgacaaggaggggaacggcaaagtcatgggagcagagctcagacatgttctcaccacccttggagagaagatgactgaggaggaggtggagaccgttctggcaggacacgaggacagcaacggctgcatcaactacgaggccttcttgaaacacatcctaagcgtctgagtgctgcaggtagggccctcccaccccttcgccgcgccttacgaggcaagtctcccgcccttctctcagccaacatagaaaagcagcggagttcattctgctgtccggttgctgcacgggctccagcgcttcgcaactttggtttttttccacagatccagtggggtccggacactgggccccgcaggcgaaagcacgttccagccaccaggaggccacctattgtttcaaaataaagactgggttcctctcttgg

SEQ ID NO: 157050 - DNA, 612 bp, Homo sapiens
  Payload ID: 10780
  Gene Symbol: MYL7
  Gene Name: myosin, light chain 7, regulatory
  Uniprot ID: Q01449
  ENST ID: ENST00000223364
  CDS Start-End: 28-555
gacagcagccacacctctgcagagagaatggccagcaggaaggcggggacccggggcaaggtggcagccaccaagcaggcccaacgtggttcttccaacgtcttttccatgtttgaacaagcccagatacaggagttcaaagaagccttcagctgtatcgaccagaatcgtgatggcatcatctgcaaggcagacctgagggagacctactcccagctggggaaggtgagtgtcccagaggaggagctggacgccatgctgcaagagggcaagggccccatcaacttcaccgtcttcctcacgctctttggggagaagctcaatgggacagaccccgaggaagccatcctgagtgccttccgcatgtttgaccccagcggcaaaggggtggtgaacaaggatgagttcaagcagcttctcctgacccaggcagacaagttctctccagctgaggtggagcagatgttcgccctgacacccatggacctggcggggaacatcgactacaagtcactgtgctacatcatcacccatggagacgagaaagaggaatgaggggcagggccaggcccacgggggggcacctcaataaactctgttgcaaaattggaa

SEQ ID NO: 157051 - DNA, 646 bp, Homo sapiens
  Payload ID: 10780
  Gene Symbol: MYL7
  Gene Name: myosin, light chain 7, regulatory
  ENST ID: ENST00000457314
  CDS Start-End: 1-594
gccagcaggaaggcggggacccggggcaaggtggcagccaccaagcaggcccaacgtggttcttccaacgtcttttccatgtttgaacaagcccagatacaggagttcaaagaagtctctcccccacctcccaccttccctagagctgggggctgctcccacctgaaggcccccatcccacaggccttcagctgtatcgaccagaatcgtgatggcatcatctgcaaggcagacctgagggagacctactcccagctggggaaggtgagtgtcccagaggaggagctggacgccatgctgcaagagggcaagggccccatcaacttcaccgtcttcctcacgctctttggggagaagctcaatgggacagaccccgaggaagccatcctgagtgccttccgcatgtttgaccccagcggcaaaggggtggtgaacaaggatgagttcaagcagcttctcctgacccaggcagacaagttctctccagctgaggtggagcagatgttcgccctgacacccatggacctggcggggaacatcgactacaagtcactgtgctacatcatcacccatggagacgagaaagaggaatgaggggcagggccaggcccacgggggggcacctcaataaactctgttgcaaaat

SEQ ID NO: 157052 - DNA, 421 bp, Homo sapiens
  Payload ID: 10780
  Gene Symbol: MYL7
  Gene Name: myosin, light chain 7, regulatory
  ENST ID: ENST00000431289
  CDS Start-End: 1-116
ggaaggcggggacccggggcaaggtggcagccaccaagcaggcccaacgtggttcttccaacgtcttttccatgtttgaacaagcccagatacaggagttcaaagaaggaaggtgagtgtcccagaggaggagctggacgccatgctgcaagagggcaagggccccatcaacttcaccgtcttcctcacgctctttggggagaagctcaatgggacagaccccgaggaagccatcctgagtgccttccgcatgtttgaccccagcggcaaaggggtggtgaacaaggatgagtaagtatgggcccagccagatgaggagcaccgtggtggaagcagagagcggggtgaggcccctagtgaggggggctgcctgtgcttcggggccttacactgctctttggggtgcagccaacccttccct

SEQ ID NO: 157053 - DNA, 791 bp, Homo sapiens
  Payload ID: 10780
  Gene Symbol: MYL7
  Gene Name: myosin, light chain 7, regulatory
  ENST ID: ENST00000458240
  CDS Start-End: 290-736
aagaaaggctagcggtctcccaggtgctggcctttgggctgggggagcagagttttctgtgcttgtgttgggttgagggtggtccccagggagaggaagaggatcctggccctggctctcctgggaatgctctgggactgtgcatgatgggtggggtggggagactctgaggagttggggagaggacccctccctactcacagtgttgcaggccagcaggaaggcggggacccggggcaaggtggcagccaccaagcaggcccaacgtggttcttccaacgtcttttccatgtttgaacaagcccagatacaggagttcaaagaagccttcagctgtatcgaccagaatcgtgatggcatcatctgcaaggcagacctgagggagacctactcccagctggggaaggtgagtgtcccagaggaggagctggacgccatgctgcaagagggcaagggccccatcaacttcaccgtcttcctcacgctctttggggagaagctcaatgggacagaccccgaggaagccatcctgagtgccttccgcatgtttgaccccagcggcaaaggggtggtgaacaaggatgagttcaagcagcttctcctgacccaggcagacaagttctctccagctgaggtggagcagatgttcgccctgacacccatggacctggcggggaacatcgactacaagtcactgtgctacatcatcacccatggagacgagaaagaggaatgaggggcagggccaggcccacgggggggcacctcaataaactctgttgcaaaattgg

SEQ ID NO: 157054 - DNA, 516 bp, Homo sapiens
  Payload ID: 10780
  Gene Symbol: MYL7
  Gene Name: myosin, light chain 7, regulatory
  ENST ID: ENST00000447951
  CDS Start-End: 1-516
gccagcaggaaggcggggacccggggcaaggtggcagccaccaagcaggcccaacgtggttcttccaacgtcttttccatgtttgaacaagcccagatacaggagttcaaagaagccttcagctgtatcgaccagaatcgtgatggcatcatctgcaaggcagacctgagggagacctactcccagctggcccctgtggccaggatggagggagggcggcctgggccttctgggggacacccagggtccctgtgtgcacctcatgccccacccccaccagggaaggtgagtgtcccagaggaggagctggacgccatgctgcaagagggcaagggccccatcaacttcaccgtcttcctcacgctctttggggagaagctcaatgggacagaccccgaggaagccatcctgagtgccttccgcatgtttgaccccagcggcaaaggggtggtgaacaaggatgagttcaagcagcttctcctgacccaggcagacaagttctctccagctgaggtg

SEQ ID NO: 157055 - DNA, 547 bp, Homo sapiens
  Payload ID: 10780
  Gene Symbol: MYL7
  Gene Name: myosin, light chain 7, regulatory
  ENST ID: ENST00000457910
  CDS Start-End: 28-123
gacagcagccacacctctgcagagagaatggtgagtgcctgctggggaagaaaggctagcggtctcccaggtgctggcctttgggctgggggagcagagttttctgtgcttgtgttgggttgagggtggtccccagggagaggaagaggatcctggccctggctctcctgggaatgctctgggactgtgcatgatgggtggggtggggagactctgaggagttggggagaggacccctccctactcacagtgttgcaggccagcaggaaggcggggacccggggcaaggtggcagccaccaagcaggcccaacgtggttcttccaacgtcttttccatgtttgaacaagcccagatacaggagttcaaagaagccttcagctgtatcgaccagaatcgtgatggcatcatctgcaaggcagacctgagggagacctactcccagctgggtgcgtgcacccacctcccaccctgcgcactggggtccctactctgagctgctgggcgggtgggagtggctggggggacaggactctgctcccctgctt

SEQ ID NO: 157056 - DNA, 321 bp, Homo sapiens
  Payload ID: 10780
  Gene Symbol: MYL7
  Gene Name: myosin, light chain 7, regulatory
  ENST ID: ENST00000431007
  CDS Start-End: 1-321
gccagcaggaaggcggggacccggggcaaggtggcagccaccaagcaggcccaacgtggttcttccaacgtcttttccatgtttgaacaagcccagatacaggagttcaaagaaagctgggggctgctcccacctgaaggcccccatcccacaggccttcagctgtatcgaccagaatcgtgatggcatcatctgcaaggcagacctgagggagacctactcccagctggggaaggtgagtgtcccagaggaggagctggacgccatgctgcaagagggcaagggccccatcaacttcaccgtcttcctcacgctctttgg

SEQ ID NO: 157057 - DNA, 465 bp, Homo sapiens
  Payload ID: 10780
  Gene Symbol: MYL7
  Gene Name: myosin, light chain 7, regulatory
  ENST ID: ENST00000446581
  CDS Start-End: 1-408
ctggacgccatgctgcaagagggcaagggccccatcaacttcaccgtcttcctcacgctctttggggagaagctcaatgggacagaccccgaggaagccatcctgagtgccttccgcatgtttgaccccagcggcaaaggggtggtgaacaaggatgagttcaagcagcttctcctgacccaggcagacaagttctctccagctgaggtgaggctgcccagccccttcaatactcatccccagcaccttctctgggccttcacccatgacccagagcccagtaccagtgaggcagttgctggaagggtggagcagatgttcgccctgacacccatggacctggcggggaacatcgactacaagtcactgtgctacatcatcacccatggagacgagaaagaggaatgaggggcagggccaggcccacgggggggcacctcaataaactctgttgcaaaattggaa

SEQ ID NO: 157058 - DNA, 1024 bp, Homo sapiens
  Payload ID: 10781
  Gene Symbol: MYL9
  Gene Name: myosin, light chain 9, regulatory
  Uniprot ID: P24844
  ENST ID: ENST00000346786
  CDS Start-End: 92-448
gtccagacccgacggccggcccagttccacgcacccagcgagcccaagcgccttctccgcaccagggaagccccacccaccagaagccaagatgtccagcaagcgggccaaagccaagaccaccaagaagcggccacagcgggccacatccaatgtcttcgcaatgtttgaccagtcccagatccaggagtttaaggaggctttcaacatgattgaccagaaccgtgatggcttcattgacaaggaggacctgcacgacatgctggcctcgctgggtttcatccatgaggaccacctccgggagctgctcaccaccatgggtgaccgcttcacagatgaggaagtggacgagatgtaccgggaggcacccattgataagaaaggcaacttcaactacgtggagttcacccgcatcctcaaacatggcgccaaggataaagacgactaggccaccccagccccctgacaccccagcccccgccagtcacccctccccgcacacacccgtccataccagctccctgcccatgaccctcgctcagggatccccctttgaggggttagggtcccagttcccagtggaagaaacaggccaggagaagtgcgtgccgagctgaggcagatgttcccacagtgaccccagagccctgggctatagtctctgacccctccaaggaaagaccaccttctggggacatgggctggagggcaggacctagaggcaccaagggaaggccccattccggggctgttccccgaggaggaagggaaggggctctgtgtgccccccaggaggaagaggccctgagtcctgggatcagacaccccttcacgtgtatccccacacaaatgcaagctcaccaaggtcccctctcagtccccttccctacaccctgaccggccactgccgcacacccacccagagcacgccacccgccatgggagtgtgctcaggagtcgcgggcagcgtggacatctgtcccagagggggcagaatctccaatagaggactgagcactgcttc

SEQ ID NO: 157059 - DNA, 2821 bp, Homo sapiens
  Payload ID: 10781
  Gene Symbol: MYL9
  Gene Name: myosin, light chain 9, regulatory
  Uniprot ID: P24844
  ENST ID: ENST00000279022
  CDS Start-End: 105-623
gcccccgcctggagtccagacccgacggccggcccagttccacgcacccagcgagcccaagcgccttctccgcaccagggaagccccacccaccagaagccaagatgtccagcaagcgggccaaagccaagaccaccaagaagcggccacagcgggccacatccaatgtcttcgcaatgtttgaccagtcccagatccaggagtttaaggaggctttcaacatgattgaccagaaccgtgatggcttcattgacaaggaggacctgcacgacatgctggcctcgctggggaagaaccccacagacgaatacctggagggcatgatgagcgaggccccggggcccatcaacttcaccatgttcctcaccatgtttggggagaagctgaacggcacggaccccgaggatgtgattcgcaacgcctttgcctgcttcgacgaggaagcctcaggtttcatccatgaggaccacctccgggagctgctcaccaccatgggtgaccgcttcacagatgaggaagtggacgagatgtaccgggaggcacccattgataagaaaggcaacttcaactacgtggagttcacccgcatcctcaaacatggcgccaaggataaagacgactaggccaccccagccccctgacaccccagcccccgccagtcacccctccccgcacacacccgtccataccagctccctgcccatgaccctcgctcagggatccccctttgaggggttagggtcccagttcccagtggaagaaacaggccaggagaagtgcgtgccgagctgaggcagatgttcccacagtgaccccagagccctgggctatagtctctgacccctccaaggaaagaccaccttctggggacatgggctggagggcaggacctagaggcaccaagggaaggccccattccggggctgttccccgaggaggaagggaaggggctctgtgtgccccccaggaggaagaggccctgagtcctgggatcagacaccccttcacgtgtatccccacacaaatgcaagctcaccaaggtcccctctcagtccccttccctacaccctgaccggccactgccgcacacccacccagagcacgccacccgccatgggagtgtgctcaggagtcgcgggcagcgtggacatctgtcccagagggggcagaatctccaatagaggactgagcactgcttctggtctgtgtgtctgtggctggggtgaagtaaggggaccccgggcctgaaaccctctcccaccttctcctgccatctccagttactgccctgctcctcccaccctggcccagggaaggactgggtgtcctccggccatatggtccctgaagcctctagggaccagagtccctagtaagtgggctctgtgctcagctgagaccagcaggggacaggggacggagggaatgggcctcatggccttctcagggcttgtgggaaagggaggaccatgggaatcaccacagccaatcccgtggagggttccaggcctcttggggggcagaggtcaggccacacagccctcaggactaaagctccgggttccagaagaacagggaggctccaacagtgatgaggcaggcgtcccagcagctcagggttggaggtgggaatgaggggtttcccagccccaggcaggtggagggcgagttcagccccaggaccaacagcatgggggccacagctttccatgtccctgtgtacgcagggcaggcagggccgggacccctgctactggtggatgatggggacactgatggcagtgcctggggcctaagaggggcagaaagagcgctgaatgactgagcagagagtccagaggggcatggactgcctgggtcacccaataggcctagggaagagtgagggccggacccaccccacctgaccccagcgagtggacccagcttggtcctgaggccttctccagaggtcacccagcgcaggcagccgcagcactcagcaaaggtcccagatcagggccaagggggagctgagcaccaggggaccctgtgcctgaccaggaggccctaacctcctgcaggcctcaacgccaggccctgctcagagctcggctgaaactcctcatcctggctccaaacagaggcccaaaagtccctggtatcaactccagaaggggcgagacccgaacaagttccaaaccaggcccaaatagtatcccaaactcagtcccaaacacattctcacccccggcagcaggctgcaggcctccagctacacacacggccctgggcaactctcagtctggccacccattcgatgctgccagccccaagggtgtgggaggggggtctcagagtgtcccagggtactggccacacatgcccgacaccagggtcataaggtcctctcagcagagccactgcagcaccaaaggcatttctggaaggaggcaaggacgcgtcatctagatgtcaagccccagcgtgcgattctgtcacagttcaccccaccttcaccccgagacggaagacggaagagcttcgcacacaggcgggaagaggtcaggaccagtccagcctcactggcttcagaactggcctgggggctaccttgacccacaggaagggaagaggaacgtgctctgggcagggcaaggcaggacctgcagcacccacagaccagcagtaaaggacccccggaactttccaagtctagcacaaaacccagaagccacaaaggaaaatactggcagatttaaatgcatgaagtcaacattctttttgtagagctaaagaaaccataagcaaaattaaaagccaaatgcattctgggaggaaa

SEQ ID NO: 157060 - DNA, 2822 bp, Homo sapiens
  Payload ID: 10782
  Gene Symbol: MSTN
  Gene Name: myostatin
  Uniprot ID: O14793
  ENST ID: ENST00000260950
  CDS Start-End: 134-1261
agattcactggtgtggcaagttgtctctcagactgtacatgcattaaaattttgcttggcattactcaaaagcaaaagaaaagtaaaaggaagaaacaagaacaagaaaaaagattatattgattttaaaatcatgcaaaaactgcaactctgtgtttatatttacctgtttatgctgattgttgctggtccagtggatctaaatgagaacagtgagcaaaaagaaaatgtggaaaaagaggggctgtgtaatgcatgtacttggagacaaaacactaaatcttcaagaatagaagccattaagatacaaatcctcagtaaacttcgtctggaaacagctcctaacatcagcaaagatgttataagacaacttttacccaaagctcctccactccgggaactgattgatcagtatgatgtccagagggatgacagcagcgatggctctttggaagatgacgattatcacgctacaacggaaacaatcattaccatgcctacagagtctgattttctaatgcaagtggatggaaaacccaaatgttgcttctttaaatttagctctaaaatacaatacaataaagtagtaaaggcccaactatggatatatttgagacccgtcgagactcctacaacagtgtttgtgcaaatcctgagactcatcaaacctatgaaagacggtacaaggtatactggaatccgatctctgaaacttgacatgaacccaggcactggtatttggcagagcattgatgtgaagacagtgttgcaaaattggctcaaacaacctgaatccaacttaggcattgaaataaaagctttagatgagaatggtcatgatcttgctgtaaccttcccaggaccaggagaagatgggctgaatccgtttttagaggtcaaggtaacagacacaccaaaaagatccagaagggattttggtcttgactgtgatgagcactcaacagaatcacgatgctgtcgttaccctctaactgtggattttgaagcttttggatgggattggattatcgctcctaaaagatataaggccaattactgctctggagagtgtgaatttgtatttttacaaaaatatcctcatactcatctggtacaccaagcaaaccccagaggttcagcaggcccttgctgtactcccacaaagatgtctccaattaatatgctatattttaatggcaaagaacaaataatatatgggaaaattccagcgatggtagtagaccgctgtgggtgctcatgagatttatattaagcgttcataacttcctaaaacatggaaggttttcccctcaacaattttgaagctgtgaaattaagtaccacaggctataggcctagagtatgctacagtcacttaagcataagctacagtatgtaaactaaaagggggaatatatgcaatggttggcatttaaccatccaaacaaatcatacaagaaagttttatgatttccagagtttttgagctagaaggagatcaaattacatttatgttcctatatattacaacatcggcgaggaaatgaaagcgattctccttgagttctgatgaattaaaggagtatgctttaaagtctatttctttaaagttttgtttaatatttacagaaaaatccacatacagtattggtaaaatgcaggattgttatataccatcattcgaatcatccttaaacacttgaatttatattgtatggtagtatacttggtaagataaaattccacaaaaatagggatggtgcagcatatgcaatttccattcctattataattgacacagtacattaacaatccatgccaacggtgctaatacgataggctgaatgtctgaggctaccaggtttatcacataaaaaacattcagtaaaatagtaagtttctcttttcttcaggtgcattttcctacacctccaaatgaggaatggattttctttaatgtaagaagaatcatttttctagaggttggctttcaattctgtagcatacttggagaaactgcattatcttaaaaggcagtcaaatggtgtttgtttttatcaaaatgtcaaaataacatacttggagaagtatgtaattttgtctttggaaaattacaacactgcctttgcaacactgcagtttttatggtaaaataatagaaatgatcgactctatcaatattgtataaaaagactgaaacaatgcatttatataatatgtatacaatattgttttgtaaataagtgtctccttttttatttactttggtatatttttacactaaggacatttcaaattaagtactaaggcacaaagacatgtcatgcatcacagaaaagcaactacttatatttcagagcaaattagcagattaaatagtggtcttaaaactccatatgttaatgattagatggttatattacaatcattttatatttttttacatgattaacattcacttatggattcatgatggctgtataaagtgaatttgaaatttcaatggtttactgtcattgtgtttaaatctcaacgttccattattttaatacttgcaaaaacattactaagtataccaaaataattgactctattatctgaaatgaagaataaactgatgctatctcaacaataactgttacttttattttataatttgataatgaatatatttctgcatttatttacttctgttttgtaaattgggattttgttaatcaaatttattgtactatgactaaatgaaattatttcttacatctaatttgtagaaacagtataagttatattaaagtgttttcacatttttttgaaagacacaa

SEQ ID NO: 157061 - DNA, 2337 bp, Homo sapiens
  Payload ID: 10783
  Gene Symbol: MYOT
  Gene Name: myotilin
  ENST ID: ENST00000239926
  CDS Start-End: 375-1871
ggacaggcaagcacatcagatgtcactgtttggcagctgataaaagtcagtggtgctataatactaagcacagagccactagattagtctgtgagggaaggagatgcctcttccttcccttcaatagtgggttaaacccagctggcaccctctggaactacgggaacaatattcttcaagagaaggtcactctaccaaagccaggagcacagtattctcaggatctcaacaaggaagagcagaccaaggttgcttctgattccttacaaccttccgtaattccaggcttgtggccccaaattcagggccccacccttccaggaacaaatcattatagtaataatttgccttcatcttccatataccaactaagcatgtttaactacgaacgtccaaaacacttcatccagtcccaaaacccatgtggctccagattgcagcctcctggaccagaaacctccagcttctctagccagaccaaacagtcttccattatcatccagccccgccagtgtacagagcaaagattttctgcctcctcaacactgagctctcacatcaccatgtcctcctctgctttccctgcttctccccagcagcatgctggctccaacccaggccaaagggttacaaccacctataaccagtccccagccagcttcctcagctccatattaccatcacagcctgattacaatagcagtaaaatcccttccgctatggattccaactatcaacagtcctcagctggccaacctataaatgcaaagccatcccaaactgcaaatgctaagcccataccaagaactcctgatcatgaaatacaaggatcaaaagaagctttgattcaagatttggaaagaaagctgaaatgcaaggacacccttcttcataatggaaatcaacgtctaacatatgaagagaagatggctcgcagattgctaggaccacagaatgcagctgctgtgtttcaagctcaggatgacagtggtgcacaagactcgcagcaacacaactcagaacatgcgcgactgcaagttcctacatcacaagtaagaagtagatcaacctcaaggggagatgtgaatgatcaggatgcaatccaggagaaattttacccaccacgtttcattcaagtgccagagaacatgtcgattgatgaaggaagattctgcagaatggacttcaaagtgagtggactgccagctcctgatgtgtcatggtatctaaatggaagaacagttcaatcagatgatttgcacaaaatgatagtgtctgagaagggtcttcattcactcatctttgaagtagtcagagcttcagatgcaggggcttatgcatgtgttgccaagaatagagcaggagaagccaccttcactgtgcagctggatgtccttgcaaaagaacataaaagagcaccaatgtttatctacaaaccacagagcaaaaaagttttagagggagattcagtgaaactagaatgccagatctcggctatacctccaccaaagcttttctggaaaagaaataatgaaatggtacaattcaacactgaccgaataagcttatatcaagataacactggaagagttactttactgataaaagatgtaaacaagaaagatgctgggtggtatactgtgtcagcagttaatgaagctggagtgactacatgtaacacaagattagacgttacggcacgtccaaaccaaactcttccagctcctaagcagttacgggttcgaccaacattcagcaaatatttagcacttaatgggaaaggtttgaatgtaaaacaagcttttaacccagaaggagaatttcagcgtttggcagctcaatctggactctatgaaagtgaagaactttaataactttaccaacattggaaaacagccaactacaccattagtaatatatttgattacatttttttgaaattaatccatagctgtattaacagattatggttttaattaggtaatatagttaatatatatttataatattatttatcctttgactcttgcacattctatgtacccctccgatttgtgaagcctacaggaaatctgggtatatggatttgtaactgcagaagactatcttaaaatacaggattttaacatttaagtcatgcacatttaacaattacaggttataaattagtatcaactttttaaacacatctaatgcttgtaataacgtttactggtactgctttctaaatactgttttacccgttttctcttgtaggaatactaacatggtatagattatctgagtgttccacagttgtatgtcaaaagaaaataaaattcaaatatttaaaacgga

SEQ ID NO: 157062 - DNA, 1474 bp, Homo sapiens
  Payload ID: 10783
  Gene Symbol: MYOT
  Gene Name: myotilin
  Uniprot ID: Q9UBF9
  ENST ID: ENST00000421631
  CDS Start-End: 378-1322
gcacagagccactagattagtctgtgagggaaggagatgcctcttccttcccttcaatagtgggttaaacccagctggcaccctctggaactacgggaacaatattcttcaagagaaggtcactctaccaaagccaggagcacagtattctcaggatctcaacaaggaagagcagaccaagctatcaacagtcctcagctggccaacctataaatgcaaagccatcccaaactgcaaatgctaagcccataccaagaactcctgatcatgaaatacaaggatcaaaagaagctttgattcaagatttggaaagaaagctgaaatgcaaggacacccttcttcataatggaaatcaacgtctaacatatgaagagaagatggctcgcagattgctaggaccacagaatgcagctgctgtgtttcaagctcaggatgacagtggtgcacaagactcgcagcaacacaactcagaacatgcgcgactgcaagttcctacatcacaagtaagaagtagatcaacctcaaggggagatgtgaatgatcaggatgcaatccaggagaaattttacccaccacgtttcattcaagtgccagagaacatgtcgattgatgaaggaagattctgcagaatggacttcaaagtgagtggactgccagctcctgatgtgtcatggtatctaaatggaagaacagttcaatcagatgatttgcacaaaatgatagtgtctgagaagggtcttcattcactcatctttgaagtagtcagagcttcagatgcaggggcttatgcatgtgttgccaagaatagagcaggagaagccaccttcactgtgcagctggatgtccttgcaaaagaacataaaagagcaccaatgtttatctacaaaccacagagcaaaaaagttttagagggagattcagtgaaactagaatgccagatctcggctatacctccaccaaagcttttctggaaaagaaataatgaaatggtacaattcaacactgaccgaataagcttatatcaagataacactggaagagttactttactgataaaagatgtaaacaagaaagatgctgggtggtatactgtgtcagcagttaatgaagctggagtgactacatgtaacacaagattagacgttacggcacgtccaaaccaaactcttccagctcctaagcagttacgggttcgaccaacattcagcaaatatttagcacttaatgggaaaggtttgaatgtaaaacaagcttttaacccagaaggagaatttcagcgtttggcagctcaatctggactctatgaaagtgaagaactttaataactttaccaacattggaaaacagccaactacaccattagtaatatatttgattacatttttttgaaattaatccatagctgtattaacagattatggttttaattaggtaatatagttaatatatatttataatattatttatcctttga

SEQ ID NO: 157063 - DNA, 1578 bp, Homo sapiens
  Payload ID: 10783
  Gene Symbol: MYOT
  Gene Name: myotilin
  ENST ID: ENST00000515645
  CDS Start-End: 284-1435
agtctgtgagggaaggagatgcctcttccttcccttcaatagtgggttaaacccagctggcaccctctggaactacgggaacaatattcttcaagagaaggtcactctaccaaagccaggagcacagtattctcaggatctcaacaaggaagagcagaccaagcatgctggctccaacccaggccaaagggttacaaccacctataaccagtccccagccagcttcctcagctccatattaccatcacagcctgattacaatagcagtaaaatcccttccgctatggattccaactatcaacagtcctcagctggccaacctataaatgcaaagccatcccaaactgcaaatgctaagcccataccaagaactcctgatcatgaaatacaaggatcaaaagaagctttgattcaagatttggaaagaaagctgaaatgcaaggacacccttcttcataatggaaatcaacgtctaacatatgaagagaagatggctcgcagattgctaggaccacagaatgcagctgctgtgtttcaagctcaggatgacagtggtgcacaagactcgcagcaacacaactcagaacatgcgcgactgcaagttcctacatcacaagtaagaagtagatcaacctcaaggggagatgtgaatgatcaggatgcaatccaggagaaattttacccaccacgtttcattcaagtgccagagaacatgtcgattgatgaaggaagattctgcagaatggacttcaaagtgagtggactgccagctcctgatgtgtcatggtatctaaatggaagaacagttcaatcagatgatttgcacaaaatgatagtgtctgagaagggtcttcattcactcatctttgaagtagtcagagcttcagatgcaggggcttatgcatgtgttgccaagaatagagcaggagaagccaccttcactgtgcagctggatgtccttgcaaaagaacataaaagagcaccaatgtttatctacaaaccacagagcaaaaaagttttagagggagattcagtgaaactagaatgccagatctcggctatacctccaccaaagcttttctggaaaagaaataatgaaatggtacaattcaacactgaccgaataagcttatatcaagataacactggaagagttactttactgataaaagatgtaaacaagaaagatgctgggtggtatactgtgtcagcagttaatgaagctggagtgactacatgtaacacaagattagacgttacggcacgtccaaaccaaactcttccagctcctaagcagttacgggttcgaccaacattcagcaaatatttagcacttaatgggaaaggtttgaatgtaaaacaagcttttaacccagaaggagaatttcagcgtttggcagctcaatctggactctatgaaagtgaagaactttaataactttaccaacattggaaaacagccaactacaccattagtaatatatttgattacatttttttgaaattaatccatagctgtattaacagattatggttttaattaggtaatatagttaatatatatttataatattattt

SEQ ID NO: 157064 - DNA, 3738 bp, Homo sapiens
  Payload ID: 10784
  Gene Symbol: MTPN
  Gene Name: myotrophin
  Uniprot ID: P58546
  ENST ID: ENST00000393085
  CDS Start-End: 217-573
ctgctgggcccggtggccgcaaaagaactttctttctcccgcccgaacggtcgccgcggccaactgcctcgcccgcctggcagcctaaccctccttctcttcttctcctctccggcttcgcgcggccctgcctccctctcgcccggcggcatccgcttgctgctgccaccgcctcctcatcttctgcccggccaaccggcctgccccgctgcagtgatgtgcgacaaggagttcatgtgggccctgaaaaacggagacttggatgaggtgaaagactatgtggccaagggagaagatgtcaaccggacactagaaggtggaaggaaacctcttcattatgcagcagattgtgggcagcttgaaatcctggaatttctgctgctgaaaggagcagatattaatgctccagataaacatcatattactcctcttctgtctgctgtctatgagggtcatgtttcctgtgtgaaattgcttctgtcaaagggtgctgataagactgtgaaaggcccagatggactgaccgcctttgaagccactgacaaccaggcaatcaaagctcttctccagtgatggatggatggactgataactccggaagaatgactctcctgtggcctcacactgctgcctgtctgtctgtcactctctatctgccagcttcttcagctaaatactttaagaggggtgaggggagagagaaattcataacaaatccgactaccagaaaaaaaaaattgttttggaggaggggcaaaaggaaccatgatcaggcttttactgggattcctgatcaagtaagcctcttccctttctaataaaatatacaccttatacccaagggagagcaaagacaaaatacaccagtaacatttgaccttttcagctccctagctaatttattagattgtgttgaaggtctgattctacaaaggccaactctacatatttggtagccctaactgtctgagcagtagtggctgctgtgatgtaaacttagggtgctgagataagcaattagctctagccttctgccttaagaatgcactctactggggatttcctggcatagttaagagcgctgcctataaggttggtgaccaaatctttcctcggtgactttaagctttatgtgaaagcttagttaaggtgaggaggggcacactcctaaattgctggatgactgaactttggattttctctcccctttcacatggatttcatgtctctttagataaaactgactagttttatttataaaatcttaagttttggaagtctaaaggagaaaccattccagtatgcatatttttttctcctctagattcatacatttatatagcattgaaacactttcaaactcctgctggtagtaaaaggggatttaaaaatagaatcatagccataagcctgttagtatcatatgaagagagaacagttatcttagtacctatggattttctttatttgctgtttgaatggattgaccttggttatgtgttgagaattaaggaacattctttgaaatgcctctctcagacccatcttggaggctgattacttactgcaccaaagctatcactggggtgagatttactgtttggacaaatttagccccatcccttcaaaaatacacttgtaaccaggtttcccagagttgttgataggcttctgctgaacatatgccaacccacctgcataatatatttttgttgcttttataaatcatgcattacataaagtgtgacaacttcaaaatgtattctctgttcttggaatacagtgccctaaaatggtgttcttatgacctgcagaaaatatttacacatatttccaaatatttatttcatgagcagtacagctaattaaaatatataagcttaaattttatatcttacatttaaaatattaagattcctttgacttgccatccatataagcttgctaaaaatattaagaccaagtcatgcaataattgaatgtacctcaaatttttaggggagggtgggttagggactgatactcagattgtggataataattgaattggtttttaaaggcaacatagcattctacagcagggttaatctattatcaagaacagtcaccctggttaataacaagttttactgatcagttgctggttggttggttggttggcatgtgggtgtgtgggtgtataggtgtgtgtgggtgtgtgtgtgtatttttccccatgagtcctttttttaatcctgtggctttttcacttacaactagcctaaccctgtaattttcctacatccaagaaaacaatcacaaagtagtggtttaaatactttgttgtatttggctaattttgctgtcttaatgcagcctattaagagttgggttaaaaatcagtaatcagtactttattacatcactgaactaaaatatggagacatcctcattgaaaatggagggcactctatcagtctataactatcaacgtagtgcaacagggtgttttgatacctttgttttcacctcttgacataatgctatttaaaggcttgaatttttccctttatataattttcacctttactttcaaagtgttttgttgtagttggctattgcagagagtgcattgtcctatcattcctaaacctggtctgctttctacattcatggtatggaaaccatgtgattctttgtacagtttatcctgatgttgcttgtaatgcagtagaggctatttcgccttcgcttttctttctcgacctttttgtaaaccctataattatgaagcgattgcttgagaaaataacatataaacatagaatagaatagactgaccaagatggttcacagtttctttttttaactaggttatttataatgtatttctgaaccacttggcagacaaattcacaacacttaatgttcatattttgagtaaaggaagctaaaaccatgtttgctttctggtactacatgcattagcgaaaggttaagtaagttttgttctccactgaagtaatacttaacatctcagaaaaaattttgcatgttctgtagttttgtattaaatcagtcatttcatatgcactatatcaagtacaaacaggtagtttacctgtttatagtagtgtactaacaaagtctcccttgcagcttcagactgttatctataggcttatcgttcaaatacagcacttgaatatcccaagtagttcttctacgcatagctcacctttctaaacccagttaagcatggaagagaggtagtaggtaggtgcagtgtgtggaagctgcaaacaagtaggccttttattcattgatatcttttcccaagtactggattttaaatctgtatgtatctgtttgatttttttttctaatatttcagttgagctgctgttttcttccatgcaatattgtatactcaattgtgtatagaagaagctggtgagagtgccctcctacataaataagcaattgcagtgttttgcatgcaaaatataaaaaatttaaattgtcctgattctattttgtaaatggagaaacaatcatatctttctaagcggtaatggaggaagactagtgctttgtgcattttgatatatttgagttcattttttccacaatgtcatacttttgacgcagttgggtttctcataagtatcctagttcatgtacatccgaatgctaaataatactgtgttttaagttttgtgttgcaagaacaaatggaataaacttgaattgtgctac

SEQ ID NO: 157065 - DNA, 879 bp, Homo sapiens
  Payload ID: 10784
  Gene Symbol: MTPN
  Gene Name: myotrophin
  ENST ID: ENST00000435723
  CDS Start-End: 254-412
aaaggttcctgcctctcctcggccaggcggaacctctctgctgggcccggtggccgcaaaagaactttctttctcccgcccgaacggtcgccgcggccaactgcctcgcccgcctggcagcctaaccctccttctcttcttctcctctccggcttcgcgcggccctgcctccctctcgcccggcggcatccgcttgctgctgccaccgcctcctcatcttctgcccggccaaccggcctgccccgctgcagtgatgtgcgacaaggagttcatgtgggccctgaaaaacggagacttggatgaggtgaaagactatgtggccaagggtgctgataagactgtgaaaggcccagatggactgaccgcctttgaagccactgacaaccaggcaatcaaagctcttctccagtgatggatggatggactgataactccggaagaatgactctcctgtggcctcacactgctgcctgtctgtctgtcactctctatctgccagcttcttcagctaaatactttaagaggggtgaggggagagagaaattcataacaaatccgactaccagaaaaaaaaaattgttttggaggaggggcaaaaggaaccatgatcaggcttttactgggattcctgatcaagtaagcctcttccctttctaataaaatatacaccttatacccaagggagagcaaagacaaaatacaccagtaacatttgaccttttcagctccctagctaatttattagattgtgttgaaggtctgattctacaaaggccaactctacatatttggtagccctaactgtctgagcagtagtggctgctgtgatgtaaacttagggtgctgagataagcaattagctctagccttctgccttaa

SEQ ID NO: 157066 - DNA, 3593 bp, Homo sapiens
  Payload ID: 10785
  Gene Symbol: MTM1
  Gene Name: myotubularin 1
  Uniprot ID: Q13496
  ENST ID: ENST00000370396
  CDS Start-End: 55-1866
gcagccgagcagcctggcaacggcggtggcgcccggagcccgagagtttccaggatggcttctgcatcaacttctaaatataattcacactccttggagaatgagtctattaagaggacgtctcgagatggagtcaatcgagatctcactgaggctgttcctcgacttccaggagaaacactaatcactgacaaagaagttatttacatatgtcctttcaatggccccattaagggaagagtttacatcacaaattatcgtctttatttaagaagtttggaaacggattcttctctaatacttgatgttcctctgggtgtgatctcgagaattgaaaaaatgggaggcgcgacaagtagaggagaaaattcctatggtctagatattacttgtaaagacatgagaaacctgaggttcgctttgaaacaggaaggccacagcagaagagatatgtttgagatcctcacgagatacgcgtttcccctggctcacagtctgccattatttgcatttttaaatgaagaaaagtttaacgtggatggatggacagtttacaatccagtggaagaatacaggaggcagggcttgcccaatcaccattggagaataacttttattaataagtgctatgagctctgtgacacttaccctgctcttttggtggttccgtatcgtgcctcagatgatgacctccggagagttgcaacttttaggtcccgaaatcgaattccagtgctgtcatggattcatccagaaaataagacggtcattgtgcgttgcagtcagcctcttgtcggtatgagtgggaaacgaaataaagatgatgagaaatatctcgatgttatcagggagactaataaacaaatttctaaactcaccatttatgatgcaagacccagcgtaaatgcagtggccaacaaggcaacaggaggaggatatgaaagtgatgatgcatatcataacgccgaacttttcttcttagacattcataatattcatgttatgcgggaatctttaaaaaaagtgaaggacattgtttatcctaatgtagaagaatctcattggttgtccagtttggagtctactcattggttagaacatatcaagctcgttttgacaggagccattcaagtagcagacaaagtttcttcagggaagagttcagtgcttgtgcattgcagtgacggatgggacaggactgctcagctgacatccttggccatgctgatgttggatagcttctataggagcattgaagggttcgaaatactggtacaaaaagaatggataagttttggacataaatttgcatctcgaataggtcatggtgataaaaaccacaccgatgctgaccgttctcctatttttctccagtttattgattgtgtgtggcaaatgtcaaaacagttccctacagcttttgaattcaatgaacaatttttgattataattttggatcatctgtatagttgccgatttggtactttcttattcaactgtgaatctgctcgagaaagacagaaggttacagaaaggactgtttctttatggtcactgataaacagtaataaagaaaaattcaaaaaccccttctatactaaagaaatcaatcgagttttatatccagttgccagtatgcgtcacttggaactctgggtgaattactacattagatggaaccccaggatcaagcaacaacagccgaatccagtggagcagcgttacatggagctcttagccttacgcgacgaatacataaagcggcttgaggaactgcagctcgccaactctgccaagctttctgatcccccaacttcaccttccagtccttcgcaaatgatgccccatgtgcaaactcacttctgaggggggaccctggcaccgcattagagctcgaaataaaggcgatagctgactttcatttggggcatttgtaaaaagtagattaaaatatttgcctccatgtagaacttgaactaacataatcttaaactcttgaatatgtgccttctagaatacatattacaagaaaactacagggtccacacggcaatcagaagaaaggagctgagatgaggttttggaaaaccctgacacctttaaaaagcagtttttgaaagacaaaatttagatttaatttacgtcttgagaaatactatatatacaatatatattttgtgggcttaattgaaacaacattattttaaaatcaaaggggatatatgtttgtggaatggattttcctgaagctgcttaacagttgctttggattctctaagatgaatccaaatgtgaaagatgcatgttactgccaaaaccaaattgagctcagcttcctaggcattacccaaaagcaaggtgtttaagtaattgccagcttttataccatcatgagtggtgacttaaggagaaatagctgtatagatgagtttttcattatttggaaatttaggggtagaaaatgttttcccctaattttccagagaagcctatttttatatttttaaaaaactgacagggcccagttaaatatgatttgcattttttaaatttgccagttttattttctaaattctttcatgagcttgcctaaaattcggaatggttttcgggttgtggcaaaccccaaagagagcactgtccaaggatgtcgggagcatcctgctgcttaggggaatgttttcgcaaatgttgctctagtcagtccagctcatctgccaaaatgtagggctaccgtcttggatgcatgagctattgctagagcatcatccttagaaatcagtgccccagatgtacatgtgttgagcgtattcttgaaagtattgtgtttatgcatttcaatttcaatggtgttggcttcccctccccaccccacgcgtgcataaaaactggttctacaaatttttacttgaagtaccaggccgtttgctttttcaggttgttttgttttatagtattaagtgaaattttaaatgcacagttctatttgctatctgaactaattcatttattaagtatatttgtaaaagctaaggctcgagttaaaacaatgaagtgttttacaatgatttgtaaaggactatttataactaatatggttttgttttcaatgaattaagaaagattaaatatatctttgtaaattattttatgtcatagtttaattggtctaccaagtaagacatctcaaatacagtagtataatgtatgaattttgtaagtataagaaattttattagacattctcttactttttgtaaatgctgtaaatatttcataaattaacaaagtgtcactccataaaaagaaagctaatactaatagcctaaaagattttgtgaaatttcatgaaaactttttaatggcaataatgactaaagacctgctgtaataaatgtattaactgaaacctaacactgttttcagggctgtgagtgtgcatgtgttggaaatgtgcatggtggccatctgatttctttgcccgggtctgcttcatgtactttttatctcaccggcaaccttgcagggctctcccaaaatttcagcaagattgggcatttaagtgtattaaacagtgcagattttaagagtca

SEQ ID NO: 157067 - DNA, 361 bp, Homo sapiens
  Payload ID: 10785
  Gene Symbol: MTM1
  Gene Name: myotubularin 1
  ENST ID: ENST00000424519
  CDS Start-End: 52-361
gccgagcagcctggcaacggcggtggcgcccggagcccgagagtttccaggatggcttctgcatcaacttctaaatataattcacactccttggagaatgagtctattaagaggacgtctcgagatggagtcaatcgagatctcactgaggctgttcctcgacttccaggagaaacactaatcactgacaaagaagttatttacatatgtcctttcaatggccccattaagggaagagtttacatcacaaattatcgtctttatttaagaagtttggaaacgccattatttgcatttttaaatgaagaaaagtttaacgtggatggatggacagtttacaatccagtggaagaatacagga

SEQ ID NO: 157068 - DNA, 2755 bp, Homo sapiens
  Payload ID: 10786
  Gene Symbol: MTMR1
  Gene Name: myotubularin related protein 1
  Uniprot ID: Q13613
  ENST ID: ENST00000370390
  CDS Start-End: 158-2155
gggtaacgcggggccgccaggtgacagctaatggcggcggccgcctgaggcgggcgggcggtatagagcgggcggcaggaggcaagcagcgaaaccttcccggccgccgctcccgtcccgacggcggcttccccaaggcggcaggactcggcgcgccatggacaggccggcggcggcggcggcggcgggctgcgagggcggcgggggcccgaacccggggccggcgggcggcaggaggcctcctcgggccgcggggggcgccaccgccggctcccggcagcccagcgtggagaccctggacagtcccacaggatcacatgttgaatggtgtaaacagcttatagctgctacaatttctagtcagatttcaggttcagtgacatcagaaaatgtgtccagagattacaaggctctaagggatggaaataagctggcacagatggaagaggctccacttttcccaggagaatcaattaaagccattgtgaaagatgtcatgtatatctgcccatttatgggagcagtgagtggaaccctgacagtgacggactttaagctgtacttcaaaaatgtcgagagggacccgcattttatccttgatgttccccttggagtgatcagcagagtggagaagattggagcacagagccatggagacaattcctgtggtatagagatagtgtgcaaggatatgaggaacttgcggcttgcttataaacaggaagaacagagtaaactagggatatttgaaaacctcaacaaacatgcatttcctctttctaacggacaggcactatttgcattcagctataaagaaaaatttccaattaatggctggaaagtttatgatccagtatctgaatataagagacagggcttgccaaatgagagttggaaaatatccaaaataaacagtaattatgagttctgtgacacctaccctgccatcattgttgtgccaactagtgtaaaagatgatgacctttcaaaagtggcagcttttcgagcaaaaggcagagtccctgtgttgtcatggattcatccggaaagtcaagcaacgattacccgttgcagccagccacttgtgggtcccaatgataagcgctgcaaagaggatgaaaaatacttgcaaacaataatggatgctaacgcacagtcacacaagcttatcatctttgatgctcgacaaaacagtgtcgctgataccaacaagacaaagggtggaggatatgaaagtgaaagtgcttacccaaatgcagaacttgtgttcttggagatccacaacattcatgtcatgcgagagtcactacgcaaattaaaagagattgtgtacccttcgatcgatgaggcgcggtggctctccaatgtggatgggacgcattggctggaatatataaggatgctgcttgctggggcagtaagaattgctgataaaatagaatctgggaaaacatctgtggtggtgcattgcagcgacggttgggaccgaacagcccagctcacatctctggctatgctaatgttggacagttactacaggaccattaaaggatttgaaactctcgtagaaaaggagtggataagctttggacacaggtttgcactgcgagtgggccatggtaatgacaaccatgcggatgctgaccgatctcccatatttctgcagtttgttgattgtgtttggcaaatgacaaggcagtttccttcagcattcgagtttaatgagctattcttgattacaattttggatcacctttatagctgtctttttgggacctttttgtgcaactgtgaacagcagcgattcaaagaggatgtatatacaaagacgatatctttatggtcgtatatcaatagccagctagacgagttttctaatcccttctttgtgaattatgaaaaccacgtgttatatcctgttgctagtctgagtcatttggaattgtgggtaaattattatgtacgatggaatccacggatgagacctcagatgcccattcaccagaatctcaaggagctgctggccgtcagggcggagctgcagaagcgtgtggagggcctacagcgggaggtggccacgcgcgccgtctcatcctcatctgagcggggctcctcgccctcccactccgccacctccgtccacacctcggtctgatgggcgagaaatatgtaatcccctggctgactaggactgttaaacatagtgtggactggatgatgccttcgacaaaccagagaagccaagttggggggagctggtgcctggagtgggccctgtgcacctcacctggcggaggctggggggggctctgtcagcaggaccctagaggagactctcattcgattttaaagaagcacaacgggtcattttcctttgtatgttcctagcgcagaactgtttctaaaacaacttgaagtatagttttgttatctaagcaatttttgttttaagtaagtaagtgtactagaatgcgaagccgttatggttcaggtttttaaaaactggtacagtattgtatttgtctcatctgttgcactgtatttcaatcatctgtaattaaaatgatcatatgtttgctccctggtcttttttaagtaagtaagtaagtatcttagtagatttttcctttgaggaaaatcggtaataaaataacatggattgaatgtttactgtgcgtcaagcacagttaatatatgatgatgtaaagtaactaactttatgtgatttaattcattcagtaaattgtaaatgtat

SEQ ID NO: 157069 - DNA, 397 bp, Homo sapiens
  Payload ID: 10786
  Gene Symbol: MTMR1
  Gene Name: myotubularin related protein 1
  ENST ID: ENST00000438018
  CDS Start-End: 1-397
catgttgaatggtgtaaacagcttatagctgctacaatttctagtcagatttcaggttcagtgacatcagaaaatgtgtccagagattacaaggttttcaggaggcctgatctaaggaacattcataaagcaagacaaagattggctctaagggatggaaataagctggcacagatggaagaggctccacttttcccaggagaatcaattaaagccattgtgaaagatgtcatgtatatctgcccatttatgggagcagtgagtggaaccctgacagtgacggactttaagctgtacttcaaaaatgtcgagagggacccgcattttatccttgatgttccccttggagtgatcagcagagtggagaagattggagcacagagccatggagacaatt

SEQ ID NO: 157070 - DNA, 564 bp, Homo sapiens
  Payload ID: 10786
  Gene Symbol: MTMR1
  Gene Name: myotubularin related protein 1
  ENST ID: ENST00000429965
  CDS Start-End: 302-564
aaaatgcacggaattgctcctgcttcaagatgtcaagaccgagggagcttgagctgttctataccttttccgggaaggacaactgagtcccacaggatcacatgttgaatggtgtaaacagcttatagctgctacaatttctagtcagatttcaggttcagtgacatcagaaaatgtgtccagagattacaaggttttcaggaggcctgatctaagggagattcaggaagaacacaatggctacccttctgaagctgaagctgatcaggtggctctaagggatggaaataagctggcacagatggaagaggctccacttttcccaggagaatcaattaaagccattgtgaaagatgtcatgtatatctgcccatttatgggagcagtgagtggaaccctgacagtgacggactttaagctgtacttcaaaaatgtcgagagggacccgcattttatccttgatgttccccttggagtgatcagcagagtggagaagattggagcacagagccatggagacaattcctgtggtatagagatagtgtgcaaggatatgaggaactt

SEQ ID NO: 157071 - DNA, 573 bp, Homo sapiens
  Payload ID: 10786
  Gene Symbol: MTMR1
  Gene Name: myotubularin related protein 1
  ENST ID: ENST00000439546
  CDS Start-End: 304-573
ttgctaaaatgcacggaattgctcctgcttcaagatgtcaagaccgagggagcttgagctgttctataccttttccgggaaggacaactgagtcccacaggatcacatgttgaatggtgtaaacagcttatagctgctacaatttctagtcagatttcaggttcagtgacatcagaaaatgtgtccagagattacaaggttttcaggaggcctgatctaagggagattcaggaagaacacaatggctacccttctgaagctgaagctgatcaggctctaagggatggaaataagctggcacagatggaagaggctccacttttcccaggagaatcaattaaagccattgtgaaagatgtcatgtatatctgcccatttatgggagcagtgagtggaaccctgacagtgacggactttaagctgtacttcaaaaatgtcgagagggacccgcattttatccttgatgttccccttggagtgatcagcagagtggagaagattggagcacagagccatggagacaattcctgtggtatagagatagtgtgcaaggatatgaggaacttgcggctt

SEQ ID NO: 157072 - DNA, 549 bp, Homo sapiens
  Payload ID: 10786
  Gene Symbol: MTMR1
  Gene Name: myotubularin related protein 1
  ENST ID: ENST00000434699
  CDS Start-End: 289-549
aagatgtcaagaccgagggagcttgagctgttctataccttttccgggaaggacaactgaggatcacatgttgaatggtgtaaacagcttatagctgctacaatttctagtcagatttcaggttcagtgacatcagaaaatgtgtccagagattacaaggttttcaggaggcctgatctaaggaatttagcaactaaaaaaaaaaaggagattcaggaagaacacaatggctacccttctgaagctgaagctgatcaggctctaagggatggaaataagctggcacagatggaagaggctccacttttcccaggagaatcaattaaagccattgtgaaagatgtcatgtatatctgcccatttatgggagcagtgagtggaaccctgacagtgacggactttaagctgtacttcaaaaatgtcgagagggacccgcattttatccttgatgttccccttggagtgatcagcagagtggagaagattggagcacagagccatggagacaattcctgtggtatagagatagtgtgcaaggatatgaggaac

SEQ ID NO: 157073 - DNA, 4516 bp, Homo sapiens
  Payload ID: 10786
  Gene Symbol: MTMR1
  Gene Name: myotubularin related protein 1
  ENST ID: ENST00000445323
  CDS Start-End: 122-2143
gcggccgcctgaggcgggcgggcggtatagagcgggcggcaggaggcaagcagcgaaaccttcccggccgccgctcccgtcccgacggcggcttccccaaggcggcaggactcggcgcgccatggacaggccggcggcggcggcggcggcgggctgcgagggcggcgggggcccgaacccggggccggcgggcggcaggaggcctcctcgggccgcggggggcgccaccgccggctcccggcagcccagcgtggagaccctggacagtcccacaggatcacatgttgaatggtgtaaacagcttatagctgctacaatttctagtcagatttcaggttcagtgacatcagaaaatgtgtccagagattacaaggttttcaggaggcctgatctaagggctctaagggatggaaataagctggcacagatggaagaggctccacttttcccaggagaatcaattaaagccattgtgaaagatgtcatgtatatctgcccatttatgggagcagtgagtggaaccctgacagtgacggactttaagctgtacttcaaaaatgtcgagagggacccgcattttatccttgatgttccccttggagtgatcagcagagtggagaagattggagcacagagccatggagacaattcctgtggtatagagatagtgtgcaaggatatgaggaacttgcggcttgcttataaacaggaagaacagagtaaactagggatatttgaaaacctcaacaaacatgcatttcctctttctaacggacaggcactatttgcattcagctataaagaaaaatttccaattaatggctggaaagtttatgatccagtatctgaatataagagacagggcttgccaaatgagagttggaaaatatccaaaataaacagtaattatgagttctgtgacacctaccctgccatcattgttgtgccaactagtgtaaaagatgatgacctttcaaaagtggcagcttttcgagcaaaaggcagagtccctgtgttgtcatggattcatccggaaagtcaagcaacgattacccgttgcagccagccacttgtgggtcccaatgataagcgctgcaaagaggatgaaaaatacttgcaaacaataatggatgctaacgcacagtcacacaagcttatcatctttgatgctcgacaaaacagtgtcgctgataccaacaagacaaagggtggaggatatgaaagtgaaagtgcttacccaaatgcagaacttgtgttcttggagatccacaacattcatgtcatgcgagagtcactacgcaaattaaaagagattgtgtacccttcgatcgatgaggcgcggtggctctccaatgtggatgggacgcattggctggaatatataaggatgctgcttgctggggcagtaagaattgctgataaaatagaatctgggaaaacatctgtggtggtgcattgcagcgacggttgggaccgaacagcccagctcacatctctggctatgctaatgttggacagttactacaggaccattaaaggatttgaaactctcgtagaaaaggagtggataagctttggacacaggtttgcactgcgagtgggccatggtaatgacaaccatgcggatgctgaccgatctcccatatttctgcagtttgttgattgtgtttggcaaatgacaaggcagtttccttcagcattcgagtttaatgagctattcttgattacaattttggatcacctttatagctgtctttttgggacctttttgtgcaactgtgaacagcagcgattcaaagaggatgtatatacaaagacgatatctttatggtcgtatatcaatagccagctagacgagttttctaatcccttctttgtgaattatgaaaaccacgtgttatatcctgttgctagtctgagtcatttggaattgtgggtaaattattatgtacgatggaatccacggatgagacctcagatgcccattcaccagaatctcaaggagctgctggccgtcagggcggagctgcagaagcgtgtggagggcctacagcgggaggtggccacgcgcgccgtctcatcctcatctgagcggggctcctcgccctcccactccgccacctccgtccacacctcggtctgatgggcgaggtcagcctgctgctccactgtctcccggtggctcaggaaagggacctggcgatcactgttatggctgtagcttgtgatcttgtcttttaggattaggcccagggaccatttgtgtggctaggtgacagctcccactgttggcaaccgttaccctcctgtcagcggtttcacaggggagccgtctgtcacgcccaccctgtgaagcaacttctggcattcaggcagcttgggagaaactaagtgaacggaatgcagtactgaggttcaagaaagctgtacgccatttctttccaacttaaatccttcagtaacaacaaacaccactcacttcaagatgcattgccagccccgtggcttccctcagctcttggccacaacttgaaaactgtcttgaatgaagtacttggggagaagacaggccactgccctctgttccacagttttcttcatgcacggggtcctcctgttaacaattactgttgtgtacatataaggtatttttagagaagagaaacaggcctttattttcctatgtccttttttacgtttagaatagtcacccgaggggggatcagctcaactgtactgtgggagaaattcttttccaacaaacctcatgctcgtttttctgtggtgcaatttcaagggcaacgtgttctgtcctcacctcactctggtactcgcctcttggggcggctcagcccattcatggggatggcaccaagcggccatgctcagtcttccagccccgctgagggtaaaccgaggcctctggcagctgtgcacaggtgctggcctctggctccttcaaggagcactgcctgtcactcgctcctgggctgtctagccatgtctcccacccccactttaccgcagccagctgctgggatcaaagcaagtctgttcttatgttatttgcctgtatgaaatcatttctcattttatcacaattccttcaactcagcttactcgcgtggctgcctgttcatatttgaaagcagccaccgtgctgtggctttggtttggaaaagcatagcacgcacttcccttggttttcccttcccagagccgaccgcagctggtcagccctctcttcccgctcctgaacctttacttactgactttgagctctgtgactccgtcggttctcgcaggaattaactaacttaccaattggttcaatccacttgagcgccatagctctgagctcctctgtgtgacatgccacagatgactattgcacacctgggtcctgccccagcaggccatgcccctcccatgtgccgtgcctgttgctgcagctgcccccccaccccgccactggctgcaggaattcagcctttagaggcagaggcagctgcagcggcccctgaggtcaaaccccagtgtgactgcatagcagtgttagctggttggtttcaaactactggattccaggcaaaggcctacagattgaccttattatttttgaaaatatgttaagggttttttcgtagagagagaaagaatggatttttttttaactgggaacctcctgattcttacggaaaattatccttctataagaagataccagagagatttattcaaggtaatttgataacctaaaatcaattctccattttttatcatatgtgggatttgttgctaagtcgtgttcaacaatagcttttatgttcctaacatatctgaaagcttatttatgaatggatatactggattattgatatactgattttttttttaatggggacatttgccattttcttcccagaaatatgtaatcccctggctgactaggactgttaaacatagtgtggactggatgatgccttcgacaaaccagagaagccaagttggggggagctggtgcctggagtgggccctgtgcacctcacctggcggaggctggggggggctctgtcagcaggaccctagaggagactctcattcgattttaaagaagcacaacgggtcattttcctttgtatgttcctagcgcagaactgtttctaaaacaacttgaagtatagttttgttatctaagcaatttttgttttaagtaagtaagtgtactagaatgcgaagccgttatggttcaggtttttaaaaactggtacagtattgtatttgtctcatctgttgcactgtatttcaatcatctgtaattaaaatgatcatatgtttgctccctggtcttttttaagtaagtaagtaagtatcttagtagatttttcctttgaggaaaatcggtaataaaataacatggattgaatgtttactgtgcgtcaagcacagttaatatatgatgatgtaaagtaactaactttatgtgatttaattcattcagtaaattgtaaatgta

SEQ ID NO: 157074 - DNA, 448 bp, Homo sapiens
  Payload ID: 10786
  Gene Symbol: MTMR1
  Gene Name: myotubularin related protein 1
  ENST ID: ENST00000436701
  CDS Start-End: 1-448
catgttgaatggtgtaaacagcttatagctgctacaatttctagtcagatttcaggttcagtgacatcagaaaatgtgtccagagattacaaggttttcaggaggcctgatctaaggaacattcataaagcaagacaaagattggagattcaggaagaacacaatggctacccttctgaagctgaagctgatcaggctctaagggatggaaataagctggcacagatggaagaggctccacttttcccaggagaatcaattaaagccattgtgaaagatgtcatgtatatctgcccatttatgggagcagtgagtggaaccctgacagtgacggactttaagctgtacttcaaaaatgtcgagagggacccgcattttatccttgatgttccccttggagtgatcagcagagtggagaagattggagcacagagccatggagacaatt

SEQ ID NO: 157075 - DNA, 700 bp, Homo sapiens
  Payload ID: 10786
  Gene Symbol: MTMR1
  Gene Name: myotubularin related protein 1
  ENST ID: ENST00000493995
  CDS Start-End: 260-700
ggaggaattgctaaaatgcacggaattgctcctgcttcaagatgtcaagaccgagggagcttgagctgttctataccttttccgggaaggacaactgagtcccacaggatcacatgttgaatggtgtaaacagcttatagctgctacaatttctagtcagatttcaggttcagtgacatcagaaaatgtgtccagagattacaaggttttcaggaggcctgatctaagggctctaagggatggaaataagctggcacagatggaagaggctccacttttcccaggagaatcaattaaagccattgtgaaagatgtcatgtatatctgcccatttatgggagcagtgagtggaaccctgacagtgacggactttaagctgtacttcaaaaatgtcgagagggacccgcattttatccttgatgttccccttggagtgatcagcagagtggagaagattggagcacagagccatggagacaattcctgtggtatagagatagtgtgcaaggatatgaggaacttgcggcttgcttataaacaggaagaacagagtaaactagggatatttgaaaacctcaacaaacatgcatttcctctttctaacggacaggcactatttgcattcagctataaagaaaaatttccaattaatggctggaaagtttatgatccagtatctgaatataagagacagggcttg

SEQ ID NO: 157076 - DNA, 2973 bp, Homo sapiens
  Payload ID: 10786
  Gene Symbol: MTMR1
  Gene Name: myotubularin related protein 1
  Uniprot ID: Q13613
  ENST ID: ENST00000485376
  CDS Start-End: 166-1872
ggccttgtgggtaacgcggggccgccaggtgacagctaatggcggcggccgcctgaggcgggcgggcggtatagagcgggcggcaggaggcaagcagcgaaaccttcccggccgccgctcccgtcccgacggcggcttccccaaggcggcaggactcggcgcgccatggacaggccggcggcggcggcggcggcgggctgcgagggcggcgggggcccgaacccggggccggcgggcggcaggaggcctcctcgggccgcggggggcgccaccgccggctcccggcagcccagcgtggagaccctggacagtcccacaggatcacatgttgaatggtgtaaacagcttatagctgctacaatttctagtcagatttcaggttcagtgacatcagaaaatgtgtccagagattacaaggctctaagggatggaaataagctggcacagatggaagaggctccacttttcccaggagaatcaattaaagccattgtgaaagatgtcatgtatatctgcccatttatgggagcagtgagtggaaccctgacagtgacggactttaagctgtacttcaaaaatgtcgagagggacccgcattttatccttgatgttccccttggagtgatcagcagagtggagaagattggagcacagagccatggagacaattcctgtggtatagagatagtgtgcaaggatatgaggaacttgcggcttgcttataaacaggaagaacagagtaaactagggatatttgaaaacctcaacaaacatgcatttcctctttctaacggacaggcactatttgcattcagctataaagaaaaatttccaattaatggctggaaagtttatgatccagtatctgaatataagagacagggcttgccaaatgagagttggaaaatatccaaaataaacagtaattatgagttctgtgacacctaccctgccatcattgttgtgccaactagtgtaaaagatgatgacctttcaaaagtggcagcttttcgagcaaaaggcagagtccctgtgttgtcatggattcatccggaaagtcaagcaacgattacccgttgcagccagccacttgtgggtcccaatgataagcgctgcaaagaggatgaaaaatacttgcaaacaataatggatgctaacgcacagtcacacaagcttatcatctttgatgctcgacaaaacagtgtcgctgataccaacaagacaaagggtggaggatatgaaagtgaaagtgcttacccaaatgcagaacttgtgttcttggagatccacaacattcatgtcatgcgagagtcactacgcaaattaaaagagattgtgtacccttcgatcgatgaggcgcggtggctctccaatgtggatgggacgcattggctggaatatataaggatgctgcttgctggggcagtaagaattgctgataaaatagaatctgggaaaacatctgtggtggtgcattgcagcgacggttgggaccgaacagcccagctcacatctctggctatgctaatgttggacagttactacaggaccattaaaggatttgaaactctcgtagaaaaggagtggataagctttggacacaggtttgcactgcgagtgggccatggtaatgacaaccatgcggatgctgaccgatctcccatatttctgcagtttgttgattgtgtttggcaaatgacaaggcagtttccttcagcattcgagtttaatgagctattcttgattacaattttggatcacctttatagctgtctttttgggacctttttgtgcaactgtgaacagcagcgattcaaagaggcatggggggctgggacccagcgagcccgtggctctctcaggagtagatgagtgctagaccctggacctcctgactccgagttcatgtagtctccgctgcaccaactccaaaaccgtgggattctgcttttcatcctctgtggtgttggccagatcatacttgaaggccttggaaatggagtctgctgattagccaaaaagcccactttaggatgtatatacaaagacgatatctttatggtcgtatatcaatagccagctagacgagttttctaatcccttctttgtgaattatgaaaaccacgtgttatatcctgttgctagtctgagtcatttggaattgtgggtaaattattatgtacgatggaatccacggatgagacctcagatgcccattcaccagaatctcaaggagctgctggccgtcagggcggagctgcagaagcgtgtggagggcctacagcgggaggtggccacgcgcgccgtctcatcctcatctgagcggggctcctcgccctcccactccgccacctccgtccacacctcggtctgatgggcgagaaatatgtaatcccctggctgactaggactgttaaacatagtgtggactggatgatgccttcgacaaaccagagaagccaagttggggggagctggtgcctggagtgggccctgtgcacctcacctggcggaggctggggggggctctgtcagcaggaccctagaggagactctcattcgattttaaagaagcacaacgggtcattttcctttgtatgttcctagcgcagaactgtttctaaaacaacttgaagtatagttttgttatctaagcaatttttgttttaagtaagtaagtgtactagaatgcgaagccgttatggttcaggtttttaaaaactggtacagtattgtatttgtctcatctgttgcactgtatttcaatcatctgtaattaaaatgatcatatgtttgctccctggtcttttttaagtaagtaagtaagtatcttagtagatttttcctttgaggaaaatcggtaataaaataacatggattgaatgtttactgtgcgtcaagcacagttaatatatgatgatgtaaagtaactaactttatgtgatttaattcattcagtaaattgtaaatgta

SEQ ID NO: 157077 - DNA, 1967 bp, Homo sapiens
  Payload ID: 10786
  Gene Symbol: MTMR1
  Gene Name: myotubularin related protein 1
  ENST ID: ENST00000488357
  CDS Start-End: 1-1217
caggagaatcaattaaagccattgtgaaagatgtcatgtatatctgcccatttatgggagcagtgagtggaaccctgacagtgacggactttaagctgtacttcaaaaatgtcgagagggacccgcattttatccttgatgttccccttggagtgatcagcagagtggagaagattggagcacagagccatggagacaattcctgtggtatagagatagtgtgcaaggatatgaggaacttgcggcttgcttataaacaggaagaacagagtaaactagggatatttgaaaacctcaacaaacatgcatttcctctttctaacggacaggcactatttgcattcagctataaagaaaaatttccaattaatggctggaaagtttatgatccagtatctgaatataagagacagggcttgccaaatgagagttggaaaatatccaaaataaacagtaattatgagttctgtgacacctaccctgccatcattgttgtgccaactagtgtaaaagatgatgacctttcaaaagtggcagcttttcgagcaaaaggcagagtccctgtgttgtcatggattcatccggaaagtcaagcaacgattacccgttgcagccagccacttgtgggtcccaatgataagcgctgcaaagaggatgaaaaatacttgcaaacaataatggatgctaacgcacagtcacacaagcttatcatctttgatgctcgacaaaacagtgtcgctgataccaacaagatgctgcttgctggggcagtaagaattgctgataaaatagaatctgggaaaacatctgtggtggtgcattgcagcgacggttgggaccgaacagcccagctcacatctctggctatgctaatgttggacagttactacaggaccattaaaggatttgaaactctcgtagaaaaggagtggataagctttggacacaggtttgcactgcgagtgggccatggtaatgacaaccatgcggatgctgaccgatctcccatatttctgcagtttgttgattgtgtttggcaaatgacaaggcagtttccttcagcattcgagtttaatgagctattcttgattacaattttggatcacctttatagctgtctttttgggacctttttgtgcaactgtgaacagcagcgattcaaagaggcatggggggctgggacccagcgagcccgtggctctctcaggagtagatgagtgctagaccctggacctcctgactccgagttcatgtagtctccgctgcaccaactccaaaaccgtgggattctgcttttcatcctctgtggtgttggccagatcatacttgaaggccttggaaatggagtctgctgattagccaaaaagcccactttaggatgtatatacaaagacgatatctttatggtcgtatatcaatagccagctagacgagttttctaatcccttctttgtgaattatgaaaaccacgtgttatatcctgttgctagtctgagtcatttggaattgtgggtaaattattatgtacgatggaatccacggatgagacctcagaaatatgtaatcccctggctgactaggactgttaaacatagtgtggactggatgatgccttcgacaaaccagagaagccaagttggggggagctggtgcctggagtgggccctgtgcacctcacctggcggaggctggggggggctctgtcagcaggaccctagaggagactctcattcgattttaaagaagcacaacgggtcattttcctttgtatgttcctagcgcagaactgtttctaaaacaacttgaagtatagttttgttatctaagcaatttttgttttaagtaagtaagtgtactagaatgcgaagccgttatggttcaggtttttaaaaactggtacagtattgtatttgtctcatctgttgcactgtatttcaatcatctgtaattaaaatgatcatatgttt

SEQ ID NO: 157078 - DNA, 713 bp, Homo sapiens
  Payload ID: 10786
  Gene Symbol: MTMR1
  Gene Name: myotubularin related protein 1
  ENST ID: ENST00000490316
  CDS Start-End: 153-708
acgcggggccgccaggtgacagctaatggcggcggccgcctgaggcgggcgggcggtatagagcgggcggcaggaggcaagcagcgaaaccttcccggccgccgctcccgtcccgacggcggcttccccaaggcggcaggactcggcgcgccatggacaggccggcggcggcggcggcggcgggctgcgagggcggcgggggcccgaacccggggccggcgggcggcaggaggcctcctcgggccgcggggggcgccaccgccggctcccggcagcccagcgtggagaccctggacagtcccacaggatcacatgttgaatggtgtaaacagcttatagctgctacaatttctagtcagatttcaggttcagtgacatcagaaaatgtgtccagagattacaaggagattcaggaagaacacaatggctacccttctgaagctgaagctgatcaggctctaagggatggaaataagctggcacagatggaagaggctccacttttcccaggagaatcaattaaagccattgtgaaagatgtcatgtatatctgcccatttatgggagcagtgagtggaaccctgacagtgacggactttaagctgtacttcaaaaatgtcgagagggacccgcattttatccttgatgttccccttggagtgatcagcagagtggagaagattggagcacagagccatggagacaattcctgt

SEQ ID NO: 157079 - DNA, 1227 bp, Homo sapiens
  Payload ID: 10786
  Gene Symbol: MTMR1
  Gene Name: myotubularin related protein 1
  ENST ID: ENST00000542156
  CDS Start-End: 136-1227
gacagctaatggcggcggccgcctgaggcgggcgggcggtatagagcgggcggcaggaggcaagcagcgaaaccttcccggccgccgctcccgtcccgacggcggcttccccaaggcggcaggactcggcgcgccatggacaggccggcggcggcggcggcggcgggctgcgagggcggcgggggcccgaacccggggccggcgggcggcaggaggcctcctcgggccgcggggggcgccaccgccggctcccggcagcccagcgtggagaccctggacagtcccacaggatcacatgttgaatggtgtaaacagcttatagctgctacaatttctagtcagatttcaggttcagtgacatcagaaaatgtgtccagagattacaaggctctaagggatggaaataagctggcacagatggaagaggctccacttttcccaggagaatcaattaaagccattgtgaaagatgtcatgtatatctgcccatttatgggagcagtgagtggaaccctgacagtgacggactttaagctgtacttcaaaaatgtcgagagggacccgcattttatccttgatgttccccttggagtgatcagcagagtggagaagattggagcacagagccatggagacaattcctgtggtatagagatagtgtgcaaggatatgaggaacttgcggcttgcttataaacaggaagaacagagtaaactagggatatttgaaaacctcaacaaacatgcatttcctctttctaacggacaggcactatttgcattcagctataaagaaaaatttccaattaatggctggaaagtttatgatccagtatctgaatataagagacagggcttgccaaatgagagttggaaaatatccaaaataaacagtaattatgagttctgtgacacctaccctgccatcattgttgtgccaactagtgtaaaagatgatgacctttcaaaagtggcagcttttcgagcaaaaggcagagtccctgtgttgtcatggattcatccggaaagtcaagcaacgattacccgttgcagccagccacttgtgggtcccaatgataagcgctgcaaagaggatgaaaaatacttgcaaacaataatggatgctaacgcacagtcacacaagcttatcatctttgatgctcgacaaaacagtgtcgctgataccaacaagctttggtatcaggatacagctagcctcatggaatga

SEQ ID NO: 157080 - DNA, 4961 bp, Homo sapiens
  Payload ID: 10787
  Gene Symbol: MTMR10
  Gene Name: myotubularin related protein 10
  Uniprot ID: Q9NXD2
  ENST ID: ENST00000435680
  CDS Start-End: 99-2432
agaaagggcctgggcggccgcactgagagctttacgcccggaggcgtcggcgctgccactggcccgcgacgggaacggggcgaaaaggcggcggcaccatgttctccctcaagccgcccaaacccaccttcaggtcctacctcctgccaccgccccagactgacgataagatcaattcggaaccgaagattaaaaaactggagccagtccttttgccaggagaaattgtcgtaaatgaagtcaattttgtgagaaaatgcattgcaacagacacaagccagtacgatttgtggggaaagctgatatgcagtaacttcaaaatctcctttattacagatgacccaatgccattacagaaattccattacagaaaccttcttcttggtgaacacgatgtccctttaacatgtattgagcaaattgtcacagtaaacgaccacaagaggaagcagaaagtcctaggccccaaccagaaactgaaatttaatccaacagagttaattatttattgtaaagatttcagaattgtcagatttcgctttgatgaatcaggtcccgaaagtgctaaaaaggtatgccttgcaatagctcattattcccagccaacagacctccagctactctttgcatttgaatatgttgggaaaaaataccacaattcagcaaacaaaattaatggaattccctcaggagatggaggaggaggaggaggaggaggtaatggagctggtggtggcagcagccagaaaactccactctttgaaacttactcggattgggacagagaaatcaagaggacaggtgcttccgggtggagagtttgttctattaacgagggttacatgatatccacttgccttccagaatacattgtagtgccaagttctttagcagaccaagatctaaagatcttttcccattcttttgttgggagaaggatgccactctggtgctggagccactctaacggcagtgctcttgtgcgaatggccctcatcaaagacgtgctgcagcagaggaagattgaccagaggatttgtaatgcaataactaaaagtcacccacagagaagtgatgtttacaaatcagatttggataagaccttgcctaatattcaagaagtacaggcagcatttgtaaaactgaagcagctatgcgttaatgagccttttgaagaaactgaagagaaatggttatcttcactggaaaatactcgatggttagaatatgtaagggcattccttaagcattcagcagaacttgtatacatgctagaaagcaaacatctctctgtagtcctacaagaggaggaaggaagagacttgagctgttgtgtagcttctcttgttcaagtgatgctggatccctattttaggacaattactggatttcagagtctgatacagaaggagtgggtcatggcaggatatcagtttctagacagatgcaaccatctaaagagatcagagaaagagtctcctttatttttgctattcttggatgccacctggcagctgttagaacaatatcctgcagcttttgagttctccgaaacctacctggcagtgttgtatgacagcacccggatctcactgtttggcaccttcctgttcaactcccctcaccagcgagtgaagcaaagcacggaatttgctataagcaaaaacatccaattgggtgatgagaagggcttaaaattcccctctgtttgggactggtctctccagtttacagcaaaggatcgcacccttttccataaccccttctacattggaaagagcacaccttgtatacagaatggctccgtgaagtcttttaaacggacaaagaaaagctacagctccacactaagaggaatgccgtctgccttaaagaatggaatcatcagtgaccaagaattacttccaaggagaaattcattgatattaaaaccaaagccagatccagctcagcaaaccgacagccagaacagtgatacggagcagtattttagagaatggttttccaaacccgccaacctgcacggtgttattctgccacgtgtctctggaacacacataaaactgtggaaactgtgctacttccgctgggttcccgaggcccagatcagcctgggtggctccatcacagcctttcacaagctctccctcctggctgatgaagtcgacgtactgagcaggatgctgcggcaacagcgcagtggccccctggaggcctgctatggggagctgggccagagcaggatgtacttcaacgccagcggccctcaccacaccgacacctcggggacaccggagtttctctcctcctcatttccattttctcctgtagggaatctgtgcagacgaagcattttaggaacaccattaagcaaatttttaagtggggccaaaatatggttgtctactgagacattagcaaatgaagactaaaatagggtgttttctgaacattttgagggaagctgtcaacttttttcctctgaattaacattgctaacctaggcgtttgaatctctaataactttatatgtaagaataatagttggaatttgcactaatatttaaaaacatgttgaatcatgcttctttcacacttattttaagagagatgtaaattttgttcctgtcctctttctgtcattacaggtctggctcttgtaaccgtgatcaaactgttcatgttgtctgctacatttttgtctccatccatttttcctaccacctcctgaaggctatctgatagtcagtcacattagcagccccaggcagcagacaacaggaaagttaggaaatttgtgtttcgtgtcatttttaggagcatctgataaaacctccagcaggttttaggaagtattcatgtatttttctggttactttctgtcgtctctaattgaactcacctgatgaaggttcagtgttctggggccagaatttatgattttagatcaccttctttggaaccttagatcactgtgttttgaaatcatgagtttgcttttaacttcatagggtcaactttaaaatgatatgcactgttaattttaaagcatttgctgcagataattaaacttagaagtgcctttgactttaggatacaaatattacagaagaaaatataatttcactttttaaaattggggtgggaaaatcccattgcatatttgaaataggcttttcatactaagcttcatagccaggagtccccagagtcttgttcctctgaaagccactggggagtggcctctggggtgctgattccacagaggtgtatgctgtagacaggagagtgccatctatgccaaaactcgccctcaaaaacaaacaaggcttgctgggaggcgtgctgggcttggccatcagtatttccagtgtggtaaactattgctggcacttccccctggaaataactaatgaggttacgagttgggcacctgcacagatgtccttctctcatagttcctaatgcttaggaatagaggagaaataaaaaaatggattctctcaaaacactgccatttgaatagcgacagaagtgctcccccagcccccaactttggacagcaaagttgaggagaatgagcagacacagttgtttgcttgatctgaatctctctaaagtaaagtatttccaaactgtgtgacaagagcctacctaccactgtagcggtcaaagctgaagcttcttacagcagtgaaacggggcaccacctcccccacactcctcattccccgcttaaaacatggatactttcaaatttgactgtttcttaaactgccatcctaagatatggaaaatttttatagtaaagtgtctagttagcttatttccttttctaaaacaagtgttttcaagataactgtattttacctttatatgtactgaatagctgtttctttttgaattatttgccttttaaaatttgataatgtctctggatataacaggacaggagttcttaaaaaatatcttaagaaattcactttatgggtaaacccaaggtttttgccaacttgttgcctagaaaataagggctagtttcagtttatacaaatagaattattaaacattttacagtccttgattagaaaccagacccaatctccttataacaccacagcgtatcctgccattgacagtgtaatcacaattctccctttttcatttagctgcttttttattattactaaatgttttggattgagcatttttccctctgtaattttcttccttcacgtttattttaactcttgtagtattttattgttgttaatttacaagtttaaaaatattaggtactattaataatggttaaaaatagaaaaatgcatatttttgtatgataatcaaatgtaaaatacttttatttttgctggacagttgttatatcatgattattgtgctacagtttattgtgcataatatgaaaaacaactatgacagccttcagtcgggccagggtgaagctgcttataccacctctgccgtcagagggacatgtggtgacagcagtggtgtggctgcacagggcgcactagagagagctcagcacccctgctgcccgccagcagagcccgtgctgagggaatgccgcacagatgctgatgcactgggtgaaatttctagtattgaacgtaaaggtgtacagtgtcttgctgttattttatgatggaaactgattttgaaaccaaaaatagctaactaactttatttaaggaaaggatattaatttgtactaacagagggtgaaagctgttcacatttgtcaacaaaatctgcttgctgcagtagtaacctcaagtggttaaaacttgatttcccgagaaaactaaaacctttgtgcctaaaattgatgacttgagttcaagtgggatgagcaagaagatgtgttatcttgttgttcaacagtattgaatgtgaaggaaattttgatggcttaataaaattccacagcgactgtt

SEQ ID NO: 157081 - DNA, 1106 bp, Homo sapiens
  Payload ID: 10787
  Gene Symbol: MTMR10
  Gene Name: myotubularin related protein 10
  ENST ID: ENST00000568547
  CDS Start-End: 1-259
gttaattatttattgtaaagatttcagaattgtcagatttcgctttgatgaatcaggtcccgaaagtgctaaaaagcaaacaaaattaatggaattccctcaggagatggaggaggaggaggaggaggaggtaatggagctggtggtggcagcagccagaaaactccactctttgaaacttactcggattgggacagagaaatcaagaggacaggtgcttccgggtggagagtttgttctattaacgagggttacatgatatccacttgccttccagaatacattgtagtgccaagttctttagcagaccaagatctaaagatcttttcccattcttttgttgggagaaggatgccactctggtgctggagccactctaacggcagtgctcttgtgcgaatggccctcatcaaagacgtgctgcagcagaggaagattgaccagaggatttgtaatgcaataactaaaagtcacccacagagaagtgatgtttacaaatcagatttggataagaccttgcctaatattcaagaagtacaggcagcatttgtaaaactgaagcagctatgcgttaatgagccttttgaagaaactgaagagaaatggttatcttcactggaaaatactcgatggttagaatatgtaagggcattccttaagcattcagcagaacttgtatacatgctagaaagcaaacatctctctgtagtcctacaagaggaggaaggaagagacttgagctgttgtgtagcttctcttgttcaagtgatgctggatccctattttaggacaattactggatttcagagtctgatacagaaggagtgggtcatggcaggatatcagtttctagacagatgcaaccatctaaagagatcagagaaagagtctcctttatttttgctattcttggatgccacctggcagctgttagaacaatatcctgcagcttttgagttctccgaaacctacctggcagtgttgtatgacagcacccggatctcactgtttggcaccttcctgttcaactcccctcaccagcgagtgaagcaaagcacggtctggctcttgtaaccgtgatcaaactgttcatgttgtctgctaca

SEQ ID NO: 157082 - DNA, 631 bp, Homo sapiens
  Payload ID: 10787
  Gene Symbol: MTMR10
  Gene Name: myotubularin related protein 10
  ENST ID: ENST00000564787
  CDS Start-End: 102-254
cgcagaaagggcctgggcggccgcactgagagctttacgcccggaggcgtcggcgctgccactggcccgcgacgggaacggggcgaaaaggcggcggcaccatgttctccctcaagccgcccaaacccaccttcaggtcctacctcctgccaccgccccagactgacgataagatcaattcggaaccgaagattaaaaaactggagccagtccttttgccagaaattccattacagaaaccttcttcttggtgaacacgatgtccctttaacatgtattgagcaaattgtcacagtaaacgaccacaagaggaagcagaaagtcctaggccccaaccagaaactgaaatttaatccaacagagttaattatttattgtaaagatttcagaattgtcagatttcgctttgatgaatcaggtcccgaaagtgctaaaaagcaaacaaaattaatggaattccctcaggagatggaggaggaggaggaggaggaggtaatggagctggtggtggcagcagccagaaaactccactctttgaaacttactcggattgggacagagaaatcaagaggacaggtgcttccgggtggagagtttgttctattaacgagggttacatgatatccacttg

SEQ ID NO: 157083 - DNA, 2216 bp, Homo sapiens
  Payload ID: 10787
  Gene Symbol: MTMR10
  Gene Name: myotubularin related protein 10
  Uniprot ID: Q9NXD2
  ENST ID: ENST00000563714
  CDS Start-End: 345-1700
ctcctctgcgcttccgtggagcctccaggccgacccccgggaactggaggaccccaggaggctgcgcgcgtctccctgcccacagcagcgcggctgcctgattcccggcgccgcgaaatgcgccttctcgggagcccccactggctcggcgaaaacttactgacgataagatcaattcggaaccgaagattaaaaaactggagccagtccttttgccaggagaaattgtcgtaaatgaagtcaattttgtgagaaaatgcattgcaacagacacaagccagtacgatttgtggggaaagctgatatgcagtaacttcaaaatctcctttattacagatgacccaatgccattacagaaattccattacagaaaccttcttcttggtgaacacgatgtccctttaacatgtattgagcaaattgtcacagtaaacgaccacaagaggaagcagaaagtcctaggccccaaccagaaactgaaatttaatccaacagagttaattatttattgtaaagatttcagaattgtcagatttcgctttgatgaatcaggtcccgaaagtgctaaaaaggtatgccttgcaatagctcattattcccagccaacagacctccagctactctttgcatttgaatatgttgggaaaaaataccacaattcagcaaacaaaattaatggaattccctcaggagatggaggaggaggaggaggaggaggtaatggagctggtggtggcagcagccagaaaactccactctttgaaacttactcggattgggacagagaaatcaagaggacaggtgcttccgggtggagagtttgttctattaacgagggttacatgatatccacttgccttccagaatacattgtagtgccaagttctttagcagaccaagatctaaagatcttttcccattcttttgttgggagaaggatgccactctggtgctggagccactctaacggcagtgctcttgtgcgaatggccctcatcaaagacgtgctgcagcagaggaagattgaccagaggatttgtaatgcaataactaaaagtcacccacagagaagtgatgtttacaaatcagatttggataagaccttgcctaatattcaagaagtacaggcagcatttgtaaaactgaagcagctatgcgttaatgagccttttgaagaaactgaagagaaatggttatcttcactggaaaatactcgatggttagaatatgtaagggcattccttaagcattcagcagaacttgtatacatgctagaaagcaaacatctctctgtagtcctacaagaggaggaaggaagagacttgagctgttgtgtagcttctcttgttcaagtgatgctggatccctattttaggacaattactggatttcagagtctgatacagaaggagtgggtcatggcaggatatcagtttctagacagatgcaaccatctaaagagatcagagaaagagtctcctttatttttgctattcttggatgccacctggcagctgttagaacaatatcctgcagcttttgagttctccgaaacctacctggcagtgttgtatgacagcacccggatctcactgtttggcaccttcctgttcaactcccctcaccagcgagtgaagcaaagcacggtcagtaggataaaaagttgtacaaaacaagattattttccttcacgagtttgaagtttctggtcacaattcattgatgtagaggatttatgactaagcagggtctcaagccaaacttgaaaccattctgaaccaaagtgccatttcacccacctcgaaccaacaacagaagctgacaaatgccgtggagaccattgagagaaacagaaaggggcagctcttgtggaccttcaggaagcctttctaggaagaggattgccctcatagtgagctccggggtcttcagcctcagccgtaaggccctgggctaggcagtgtgacctagggagcgggaaacctgagttctggccctggtctgggaaaagtgctaggcccatgttccactcaggcttcagcctgagagtccaggttgctaacctgtaaaatggatctgtcaaactaacacttatgcctttagtctcattgtatgaggtgaaacattttgtaaactgtgaatcattatgcaaattttcctaaagacatatgaattattctggatttgttggtataaaagacaaaacacactggtca

SEQ ID NO: 157084 - DNA, 2833 bp, Homo sapiens
  Payload ID: 10787
  Gene Symbol: MTMR10
  Gene Name: myotubularin related protein 10
  ENST ID: ENST00000567567
  CDS Start-End: 73-645
gagctttacgcccggaggcgtcggcgctgccactggcccgcgacgggaacggggcgaaaaggcggcggcaccatgttctccctcaagccgcccaaacccaccttcaggtcctacctcctgccaccgccccagactgacgataagatcaattcggaaccgaagattaaaaaactggagccagtccttttgccaggagaaattgtcgtaaatgaagtcaattttgtgagaaaatgcattgcaacagacacaagccagtacgatttgtggggaaagctgatatgcagtaacttcaaaatctcctttattacagatgacccaatgccattacagaaattccattacagaaaccttcttcttggtgaacacgatgtccctttaacatgtattgagcaaattgtcacagtaaacgaccacaagaggaagcagaaagtcctaggccccaaccagaaactgaaatttaatccaacagagttaattatttattgtaaagatttcagaattgtcagatttcgctttgatgaatcaggtcccgaaagtgctaaaaaggtatgccttgcaatagctcattattcccagccaacagacctccagctactctttgcatttgaatatgttgggaaaaaataccacaattcagaagcataaatactgcatctttaagatcaaaaggagcctgaaatttccacacactgcagtcagaattcattaatttgtgagtgaaagatgcccactcatccactcttgaacttctggatgacaccttgattcattggctggattaaagaagtcctttttgcaggcagcaaacaaaattaatggaattccctcaggagatggaggaggaggaggaggaggaggtaatggagctggtggtggcagcagccagaaaactccactctttgaaacttactcggattgggacagagaaatcaagaggacaggtgcttccgggtggagagtttgttctattaacgagggttacatgatatccacttgccttccagaatacattgtagtgccaagttctttagcagaccaagatctaaagatcttttcccattcttttgttgggagaaggatgccactctggtgctggagccactctaacggcagtgctcttgtgcgaatggccctcatcaaagacgtgctgcagcagaggaagattgaccagaggatttgtaatgcaataactaaaagtcacccacagagaagtgatgtttacaaatcagatttggataagaccttgcctaatattcaagaagtacaggcagcatttgtaaaactgaagcagctatgcgttaatgagccttttgaagaaactgaagagaaatggttatcttcactggaaaatactcgatggttagaatatgtaagggcattccttaagcattcagcagaacttgtatacatgctagaaagcaaacatctctctgtagtcctacaagaggaggaaggaagagacttgagctgttgtgtagcttctcttgttcaagtgatgctggatccctattttaggacaattactggatttcagagtctgatacagaaggagtgggtcatggcaggatatcagtttctagacagatgcaaccatctaaagagatcagagaaagagtctcctttatttttgctattcttggatgccacctggcagctgttagaacaatatcctgcagcttttgagttctccgaaacctacctggcagtgttgtatgacagcacccggatctcactgtttggcaccttcctgttcaactcccctcaccagcgagtgaagcaaagcacggaatttgctataagcaaaaacatccaattgggtgatgagaagggcttaaaattcccctctgtttgggactggtctctccagtttacagcaaaggatcgcacccttttccataaccccttctacattggaaagagcacaccttgtatacagaatggctccgtgaagtcttttaaacggacaaagaaaagctacagctccacactaagaggaatgccgtctgccttaaagaatggaatcatcagtgaccaagaattacttccaaggagaaattcattgatattaaaaccaaagccagatccagctcagcaaaccgacagccagaacagtgatacggagcagtattttagagaatggttttccaaacccgccaacctgcacggtgttattctgccacgtgtctctggaacacacataaaactgtggaaactgtgctacttccgctgggttcccgaggcccagatcagcctgggtggctccatcacagcctttcacaagctctccctcctggctgatgaagtcgacgtactgagcaggatgctgcggcaacagcgcagtggccccctggaggcctgctatggggagctgggccagagcaggatgtacttcaacgccagcggccctcaccacaccgacacctcggggacaccggagtttctctcctcctcatttccattttctcctgtagggaatctgtgcagacgaagcattttaggaacaccattaagcaaatttttaagtggggccaaaatatggttgtctactgagacattagcaaatgaagactaaaatagggtgttttctgaacattttgagggaagctgtcaacttttttcctctgaattaacattgctaacctaggcgtttgaatctctaataactttatatgtaagaataatagttggaatttgcactaatatttaaaaacatgttgaatcatgcttctttcacacttattttaagagagatgtaaattttgttcctgtcctctttctgtcattacaggtctggctcttgtaaccgtgatcaaactgttcatgttgtctgcta

SEQ ID NO: 157085 - DNA, 1211 bp, Homo sapiens
  Payload ID: 10787
  Gene Symbol: MTMR10
  Gene Name: myotubularin related protein 10
  ENST ID: ENST00000566981
  CDS Start-End: 1-912
gcttccgggtggagagtttgttctattaacgagggttacatgatatccacttgccttccagaatacattgtagtgccaagttctttagcagaccaagatctaaagatcttttcccattcttttgttgggagaaggatgccactctggtgctggagccactctaacggcagtgctcttgtgcgaatggccctcatcaaagacgtgctgcagcagaggaagattgaccagaggatttgtaatgcaataactaaaagtcacccacagagaagtgatgtttacaaatcagatttggataagaccttgcctaatattcaagaagtacaggcagcatttgtaaaactgaagcagctatgcgttaatgagccttttgaagaaactgaagagaaatggttatcttcactggaaaatactcgatggttagaatatgtaagggcattccttaagcattcagcagaacttgtatacatgctagaaagcaaacatctctctgtagtcctacaagaggaggaaggaagagacttgagctgttgtgtagcttctcttgttcaagtgatgctggatccctattttaggacaattactggatttcagagtctgatacagaaggagtgggtcatggcaggatatcagtttctagacagatgcaaccatctaaagagatcagagaaagagtctcctttatttttgctattcttggatgccacctggcagctgttagaacaatatcctgcagcttttgagttctccgaaacctacctggcagtgttgtatgacagcacccggatctcactgtttggcaccttcctgttcaactcccctcaccagcgagtgaagcaaagcacggataaaaagttgtacaaaacaagattattttccttcacgagtttgaagtttctggtcacaattcattgatgtagaggatttatgactaagcagggtctcaagccaaacttgaaaccattctgaaccaaagtgccatttcacccacctcgaaccaacaacagaagctgacaaatgccgtggagaccattgagagaaacagaaaggggcagctcttgtggaccttcaggaagcctttctaggaagaggattgccctcatagtgagctccggggtcttcagcctcagccgtaaggccctgggctaggcagtgtgacctagggagcgggaaacctgagttctggccctggtctgggaaaagtgctaggccca

SEQ ID NO: 157086 - DNA, 5679 bp, Homo sapiens
  Payload ID: 10787
  Gene Symbol: MTMR10
  Gene Name: myotubularin related protein 10
  Uniprot ID: Q9NXD2
  ENST ID: ENST00000568604
  CDS Start-End: 98-754
gaaagggcctgggcggccgcactgagagctttacgcccggaggcgtcggcgctgccactggcccgcgacgggaacggggcgaaaaggcggcggcaccatgttctccctcaagccgcccaaacccaccttcaggtcctacctcctgccaccgccccagactgacgataagatcaattcggaaccgaagattaaaaaactggagccagtccttttgccaggagaaattgtcgtaaatgaagtcaattttgtgagaaaatgcattgcaacagacacaagccagtacgatttgtggggaaagctgatatgcagtaacttcaaaatctcctttattacagatgacccaatgccattacagaaattccattacagaaaccttcttcttggtgaacacgatgtccctttaacatgtattgagcaaattgtcacagtaaacgaccacaagaggaagcagaaagtcctaggccccaaccagaaactgaaatttaatccaacagagttaattatttattgtaaagatttcagaattgtcagatttcgctttgatgaatcaggtcccgaaagtgctaaaaagcaaacaaaattaatggaattccctcaggagatggaggaggaggaggaggaggaggtaatggagctggtggtggcagcagccagaaaactccactctttgaaacttactcggattgggacagagaaatcaagaggacaggtgcttccgggtggagagtttgttctattaacgagggttacatgatatccacttgccttccagaatacattgtagtgccaagttctttagcagaccaagatctaaagatcttttcccattcttttgttgggagaaggatgccactctggtgctggagccactctaacggcagtgctcttgtgcgaatggccctcatcaaagacgtgctgcagcagaggaagattgaccagaggatttgtaatgcaataactaaaagtcacccacagagaagtgatgtttacaaatcagatttggataagaccttgcctaatattcaagaagtacaggcagcatttgtaaaactgaagcagctatgcgttaatgagccttttgaagaaactgaagagaaatggttatcttcactggaaaatactcgatggttagaatatgtaagggcattccttaagcattcagcagaacttgtatacatgctagaaagcaaacatctctctgtagtcctacaagaggaggaaggaagagacttgagctgttgtgtagcttctcttgttcaagtgatgctggatccctattttaggacaattactggatttcagagtctgatacagaaggagtgggtcatggcaggatatcagtttctagacagatgcaaccatctaaagagatcagagaaagagtctcctttatttttgctattcttggatgccacctggcagctgttagaacaatatcctgcagcttttgagttctccgaaacctacctggcagtgttgtatgacagcacccggatctcactgtttggcaccttcctgttcaactcccctcaccagcgagtgaagcaaagcacggaatttgctataagcaaaaacatccaattgggtgatgagaagggcttaaaattcccctctgtttgggactggtctctccagtttacagcaaaggatcgcacccttttccataaccccttctacattggaaagagcacaccttgtatacagaatggctccgtgaagtcttttaaacggacaaaggtaaatcacagctaacaaaacgtgatgttggctcacacgtaaccaaacacctctttttcagaacagagagcgttaaaagtaaaggcacttccaagagtaacactgctaatgcgggtttctgaggggtcattccctttttaactcaaatgactgtatcccagctttcttcctggtgtctgaggcccacaaagtctcagtacctgagagtgggcagattgcagctttgagcctgcaagcctgatttactaaagccccatttatccatttcttgatgattcaagccgccactgtggcagggaatgccgcctggctgtgatgtagtcatggcctcctgactgctatattcttgtcctaataacattcattgtttgcctttttaataattcccaaataaattcttgggattttttttggtagaaaatttgcagactactgaaaggtacagaacaaagaatcagacatttggcctcctgactgcctctgttcagtttgccattgttcttgatagaatcggccaggtctagtgttttttctagcccgtcttagaacttatccttaagcaaattagtggataggaggtactctcatcccgcccccattcaggctgatagtaacagcctaggtagagtcaacacataaaaaagtgtaattccaggggaggaggattagaataaggacacaaaggaagggaggaaaatgttctttgaggctgaaattccattaatttttcatagtattgagtttatatttgccattgcatccttcaatctttctaaaaagggaatccccggaacataataaaatctcttctgtatagaaaagctacagctccacactaagaggaatgccgtctgccttaaagaatggaatcatcagtgaccaagaattacttccaaggagaaattcattgatattaaaaccaaagccagatccagctcagcaaaccgacagccagaacagtgatacggagcagtattttagagaatggttttccaaacccgccaacctgcacggtgttattctgccacgtgtctctggaacacacataaaactgtggaaactgtgctacttccgctgggttcccgaggcccagatcagcctgggtggctccatcacagcctttcacaagctctccctcctggctgatgaagtcgacgtactgagcaggatgctgcggcaacagcgcagtggccccctggaggcctgctatggggagctgggccagagcaggatgtacttcaacgccagcggccctcaccacaccgacacctcggggacaccggagtttctctcctcctcatttccattttctcctgtagggaatctgtgcagacgaagcattttaggaacaccattaagcaaatttttaagtggggccaaaatatggttgtctactgagacattagcaaatgaagactaaaatagggtgttttctgaacattttgagggaagctgtcaacttttttcctctgaattaacattgctaacctaggcgtttgaatctctaataactttatatgtaagaataatagttggaatttgcactaatatttaaaaacatgttgaatcatgcttctttcacacttattttaagagagatgtaaattttgttcctgtcctctttctgtcattacaggtctggctcttgtaaccgtgatcaaactgttcatgttgtctgctacatttttgtctccatccatttttcctaccacctcctgaaggctatctgatagtcagtcacattagcagccccaggcagcagacaacaggaaagttaggaaatttgtgtttcgtgtcatttttaggagcatctgataaaacctccagcaggttttaggaagtattcatgtatttttctggttactttctgtcgtctctaattgaactcacctgatgaaggttcagtgttctggggccagaatttatgattttagatcaccttctttggaaccttagatcactgtgttttgaaatcatgagtttgcttttaacttcatagggtcaactttaaaatgatatgcactgttaattttaaagcatttgctgcagataattaaacttagaagtgcctttgactttaggatacaaatattacagaagaaaatataatttcactttttaaaattggggtgggaaaatcccattgcatatttgaaataggcttttcatactaagcttcatagccaggagtccccagagtcttgttcctctgaaagccactggggagtggcctctggggtgctgattccacagaggtgtatgctgtagacaggagagtgccatctatgccaaaactcgccctcaaaaacaaacaaggcttgctgggaggcgtgctgggcttggccatcagtatttccagtgtggtaaactattgctggcacttccccctggaaataactaatgaggttacgagttgggcacctgcacagatgtccttctctcatagttcctaatgcttaggaatagaggagaaataaaaaaatggattctctcaaaacactgccatttgaatagcgacagaagtgctcccccagcccccaactttggacagcaaagttgaggagaatgagcagacacagttgtttgcttgatctgaatctctctaaagtaaagtatttccaaactgtgtgacaagagcctacctaccactgtagcggtcaaagctgaagcttcttacagcagtgaaacggggcaccacctcccccacactcctcattccccgcttaaaacatggatactttcaaatttgactgtttcttaaactgccatcctaagatatggaaaatttttatagtaaagtgtctagttagcttatttccttttctaaaacaagtgttttcaagataactgtattttacctttatatgtactgaatagctgtttctttttgaattatttgccttttaaaatttgataatgtctctggatataacaggacaggagttcttaaaaaatatcttaagaaattcactttatgggtaaacccaaggtttttgccaacttgttgcctagaaaataagggctagtttcagtttatacaaatagaattattaaacattttacagtccttgattagaaaccagacccaatctccttataacaccacagcgtatcctgccattgacagtgtaatcacaattctccctttttcatttagctgcttttttattattactaaatgttttggattgagcatttttccctctgtaattttcttccttcacgtttattttaactcttgtagtattttattgttgttaatttacaagtttaaaaatattaggtactattaataatggttaaaaatagaaaaatgcatatttttgtatgataatcaaatgtaaaatacttttatttttgctggacagttgttatatcatgattattgtgctacagtttattgtgcataatatgaaaaacaactatgacagccttcagtcgggccagggtgaagctgcttataccacctctgccgtcagagggacatgtggtgacagcagtggtgtggctgcacagggcgcactagagagagctcagcacccctgctgcccgccagcagagcccgtgctgagggaatgccgcacagatgctgatgcactgggtgaaatttctagtattgaacgtaaaggtgtacagtgtcttgctgttattttatgatggaaactgattttgaaaccaaaaatagctaactaactttatttaaggaaaggatattaatttgtactaacagagggtgaaagctgttcacatttgtcaacaaaatctgcttgctgcagtagtaacctcaagtggttaaaacttgatttcccgagaaaactaaaacctttgtgcctaaaattgatgacttgagttcaagtgggatgagcaagaagatgtgttatcttgttgttcaacagtattgaatgtgaaggaaattttgatggcttaataaaattccacagc

SEQ ID NO: 157087 - DNA, 2334 bp, Homo sapiens
  Payload ID: 10787
  Gene Symbol: MTMR10
  Gene Name: myotubularin related protein 10
  Uniprot ID: Q9NXD2
  ENST ID: ENST00000621195
  CDS Start-End: 1-2334
atgttctccctcaagccgcccaaacccaccttcaggtcctacctcctgccaccgccccagactgacgataagatcaattcggaaccgaagattaaaaaactggagccagtccttttgccaggagaaattgtcgtaaatgaagtcaattttgtgagaaaatgcattgcaacagacacaagccagtacgatttgtggggaaagctgatatgcagtaacttcaaaatctcctttattacagatgacccaatgccattacagaaattccattacagaaaccttcttcttggtgaacacgatgtccctttaacatgtattgagcaaattgtcacagtaaacgaccacaagaggaagcagaaagtcctaggccccaaccagaaactgaaatttaatccaacagagttaattatttattgtaaagatttcagaattgtcagatttcgctttgatgaatcaggtcccgaaagtgctaaaaaggtatgccttgcaatagctcattattcccagccaacagacctccagctactctttgcatttgaatatgttgggaaaaaataccacaattcagcaaacaaaattaatggaattccctcaggagatggaggaggaggaggaggaggaggtaatggagctggtggtggcagcagccagaaaactccactctttgaaacttactcggattgggacagagaaatcaagaggacaggtgcttccgggtggagagtttgttctattaacgagggttacatgatatccacttgccttccagaatacattgtagtgccaagttctttagcagaccaagatctaaagatcttttcccattcttttgttgggagaaggatgccactctggtgctggagccactctaacggcagtgctcttgtgcgaatggccctcatcaaagacgtgctgcagcagaggaagattgaccagaggatttgtaatgcaataactaaaagtcacccacagagaagtgatgtttacaaatcagatttggataagaccttgcctaatattcaagaagtacaggcagcatttgtaaaactgaagcagctatgcgttaatgagccttttgaagaaactgaagagaaatggttatcttcactggaaaatactcgatggttagaatatgtaagggcattccttaagcattcagcagaacttgtatacatgctagaaagcaaacatctctctgtagtcctacaagaggaggaaggaagagacttgagctgttgtgtagcttctcttgttcaagtgatgctggatccctattttaggacaattactggatttcagagtctgatacagaaggagtgggtcatggcaggatatcagtttctagacagatgcaaccatctaaagagatcagagaaagagtctcctttatttttgctattcttggatgccacctggcagctgttagaacaatatcctgcagcttttgagttctccgaaacctacctggcagtgttgtatgacagcacccggatctcactgtttggcaccttcctgttcaactcccctcaccagcgagtgaagcaaagcacggaatttgctataagcaaaaacatccaattgggtgatgagaagggcttaaaattcccctctgtttgggactggtctctccagtttacagcaaaggatcgcacccttttccataaccccttctacattggaaagagcacaccttgtatacagaatggctccgtgaagtcttttaaacggacaaagaaaagctacagctccacactaagaggaatgccgtctgccttaaagaatggaatcatcagtgaccaagaattacttccaaggagaaattcattgatattaaaaccaaagccagatccagctcagcaaaccgacagccagaacagtgatacggagcagtattttagagaatggttttccaaacccgccaacctgcacggtgttattctgccacgtgtctctggaacacacataaaactgtggaaactgtgctacttccgctgggttcccgaggcccagatcagcctgggtggctccatcacagcctttcacaagctctccctcctggctgatgaagtcgacgtactgagcaggatgctgcggcaacagcgcagtggccccctggaggcctgctatggggagctgggccagagcaggatgtacttcaacgccagcggccctcaccacaccgacacctcggggacaccggagtttctctcctcctcatttccattttctcctgtagggaatctgtgcagacgaagcattttaggaacaccattaagcaaatttttaagtggggccaaaatatggttgtctactgagacattagcaaatgaagactaa

SEQ ID NO: 157088 - DNA, 150 bp, Homo sapiens
  Payload ID: 10787
  Gene Symbol: MTMR10
  Gene Name: myotubularin related protein 10
  ENST ID: ENST00000628420
  CDS Start-End: 1-150
atgttctccctcaagccgcccaaacccaccttcaggtcctacctcctgccaccgccccagactgacgataagatcaattcggaaccgaagattaaaaaactggagccagtccttttgccagaaattccattacagaaaccttcttcttgg

SEQ ID NO: 157089 - DNA, 2324 bp, Homo sapiens
  Payload ID: 10788
  Gene Symbol: MTMR11
  Gene Name: myotubularin related protein 11
  Uniprot ID: A4FU01
  ENST ID: ENST00000369140
  CDS Start-End: 187-2109
acagacactgatctcagtttcccccgagagtgtgagtgtaggcctctacaggcagctgcctctggggagttggggagcctaggggttaactctagacccccctcaaccctctggaccaaagtctgtccaggaaaataggatgccggagcccaggagtcgtcagcctagcagttgcctggcctccagatgcctcccagggtcaccttccagccctgtggatggcagtggaatcaggacactcccttgaacagtgaatacgattttgccctggtcaacattggacgattagaggctgtgagcggcttgtcccgagtccagctcctccgtccagggtccctgcataaatttatccctgaggagattctgattcatggccgagacttccggctgctcagagttggttttgaggctggaggcctagagcctcaggcttttcaggtgaccatggccattgtccaagccagagctcagagcaatcaagcccaacagtattcggggataaccctgagcaaggctggccagggttctggctccagaaaaccaccaattcctctcatggagacagcggaagactgggagactgagcggaagaagcaggcagccagaggctggagggtcagcacggtcaacgagaggttcgacgtagccaccagcctcccccgttacttctgggtccctaaccgaattctggacagtgaggtcaggagagcatttggccactttcatcagggccgtggaccgcgcttgtcctggcatcaccctgggggcagtgatcttctccgctgtggaggcttctatacagccagtgaccctaacaaggaggatatcagagcagtggagttgatgctccaggctgggcattcagatgttgtcctggtagacactatggatgagctgcccagccttgcagatgtccaacttgcccacctgaggctgagggccctctgcctgcctgattcatctgtagctgaggataaatggctttcagccctggaaggaacacgatggctggactatgtcagggcttgtcttcgaaaggccagtgacatttcagtattagtgacatccagggttcgttctgtaatacttcaagagcgcggtgatcgtgatctcaatggcctcctctcttcactcgtccagctgctttcagcccccgaagcccgaacactgtttggcttccaatcactagtacagcgagagtgggtggcagctggacatcccttcctgactcggcttgggggaactggggccagtgaagaggctccggtgtttctcctcttccttgattgtgtctggcagctcctccagcagtttccagctgattttgaattctctgagtttttccttcttgctcttcatgacagtgtcagggttcctgacacccttaccttcctgagaaataccccctgggagcgcggaaagcagagcggacagttaaactcctatacacaagtctacaccccaggatactcccagcctccagctgggaactcttttaacctgcagctgtctgtctgggactgggatttacgttatagcaatgcacagatactacaattccagaatcctggctatgacccagaacactgtccagattcctggctccctagaccacagccaagcttcatggttcctggaccccccagttctgtgtggctcttctctagaggagcattgacccccctgaatcagctctgtccttggcgggacagtccttccctgctggcagtctcttctcgttggctccctcgacctgctatctcctctgaaagcctggctgaccaggaatggggtctcccctcacattggggagcttgccctttacctccagggctgctgctgcctgggtatctgggaccccagatcaggctctggagacgctgctacctgaggggaaggcctgaggtccagatgggcctctcagctcccacaatctctggcctccaggatgagctatcccatcttcaggagttattacggaaatggacaccaagaatatctcctgaggatcactccaagaaaagagatccacataccattctcaatcccactgaaattgctggcattctcaaaggccaatcccatcccttctggataaccagatgttaaatcatgagatcagagatgctgttcatcagtcccaacaagatggcctagaaatcgcattctcacctcgccttgctgctgctttaattccaagttctatttcttcccttatagttttctatgggaatgaggcggatacaggaaacaccctatctcctctgtatttttgtagtggaatttctatttaaggggctcattaaagcatagtatttatacac

SEQ ID NO: 157090 - DNA, 2856 bp, Homo sapiens
  Payload ID: 10788
  Gene Symbol: MTMR11
  Gene Name: myotubularin related protein 11
  Uniprot ID: A4FU01
  ENST ID: ENST00000439741
  CDS Start-End: 252-2381
catctctcccgccctctccagagtcgactgaagtttccgaggagacttctcaggctgggctggacacacctttccaaggacccccaaactctgctccgtgcacgtcaaatgctcctttcccttgtgtccaaccccctacccctctccctaacacccctcttctcaacaagactcagcctctccccgaggtgggtgagcatccttgaggtttcccacccttaactgctgtgtccccggatggagccagagaaatgtggtgggggggccggggccagagtttcaacattgccccccagaaggaggagccagagatggggtctgtccaggaaaataggatgccggagcccaggagtcgtcagcctagcagttgcctggcctccagatgcctcccaggggagcagatcctagcatgggccccaggggtgaggaagggcctggaaccagaattgtctggaaccctgatctgtaccaactttagggtcaccttccagccctgtggatggcagtggaatcaggacactcccttgaacagtgaatacgattttgccctggtcaacattggacgattagaggctgtgagcggcttgtcccgagtccagctcctccgtccagggtccctgcataaatttatccctgaggagattctgattcatggccgagacttccggctgctcagagttggttttgaggctggaggcctagagcctcaggcttttcaggtgaccatggccattgtccaagccagagctcagagcaatcaagcccaacagtattcggggataaccctgagcaaggctggccagggttctggctccagaaaaccaccaattcctctcatggagacagcggaagactgggagactgagcggaagaagcaggcagccagaggctggagggtcagcacggtcaacgagaggttcgacgtagccaccagcctcccccgttacttctgggtccctaaccgaattctggacagtgaggtcaggagagcatttggccactttcatcagggccgtggaccgcgcttgtcctggcatcaccctgggggcagtgatcttctccgctgtggaggcttctatacagccagtgaccctaacaaggaggatatcagagcagtggagttgatgctccaggctgggcattcagatgttgtcctggtagacactatggatgagctgcccagccttgcagatgtccaacttgcccacctgaggctgagggccctctgcctgcctgattcatctgtagctgaggataaatggctttcagccctggaaggaacacgatggctggactatgtcagggcttgtcttcgaaaggccagtgacatttcagtattagtgacatccagggttcgttctgtaatacttcaagagcgcggtgatcgtgatctcaatggcctcctctcttcactcgtccagctgctttcagcccccgaagcccgaacactgtttggcttccaatcactagtacagcgagagtgggtggcagctggacatcccttcctgactcggcttgggggaactggggccagtgaagaggctccggtgtttctcctcttccttgattgtgtctggcagctcctccagcagtttccagctgattttgaattctctgagtttttccttcttgctcttcatgacagtgtcagggttcctgacacccttaccttcctgagaaataccccctgggagcgcggaaagcagagcggacagttaaactcctatacacaagtctacaccccaggatactcccagcctccagctgggaactcttttaacctgcagctgtctgtctgggactgggatttacgttatagcaatgcacagatactacaattccagaatcctggctatgacccagaacactgtccagattcctggctccctagaccacagccaagcttcatggttcctggaccccccagttctgtgtggctcttctctagaggagcattgacccccctgaatcagctctgtccttggcgggacagtccttccctgctggcagtctcttctcgttggctccctcgacctgctatctcctctgaaagcctggctgaccaggaatggggtctcccctcacattggggagcttgccctttacctccagggctgctgctgcctgggtatctgggaccccagatcaggctctggagacgctgctacctgaggggaaggcctgaggtccagatgggcctctcagctcccacaatctctggcctccaggatgagctatcccatcttcaggagttattacggaaatggacaccaagaatatctcctgaggatcactccaagaaaagagatccacataccattctcaatcccactgaaattgctggcattctcaaaggcagggcagagggggatctggggtagaggagggttctgtctaatcttttttttttttttttgtatctgcacttgcagcctcagctttcacacttcagcccttaagttcactaagaaggtctgagtttctgctgcagatagtggtgttaactgctccaactcttgtcttgcttagtttctacaaatatttttgcttcttgtcatttgaaggattaagaaacaaaaacaatccagaaattgatcggtttttttaggccaatcccatcccttctggataaccagatgttaaatcatgagatcagagatgctgttcatcagtcccaacaagatggcctagaaatcgcattctcacctcgccttgctgctgctttaattccaagttctatttcttcccttatagttttctatgggaatgaggcggatacaggaaacaccctatctcctctgtatttttgtagtggaatttctatttaaggggctcattaaagcatagtatttatac

SEQ ID NO: 157091 - DNA, 2215 bp, Homo sapiens
  Payload ID: 10789
  Gene Symbol: MTMR12
  Gene Name: myotubularin related protein 12
  Uniprot ID: Q9C0I1
  ENST ID: ENST00000264934
  CDS Start-End: 132-2045
atcgcggcggtcgcggccttggggatgggcggagccccagccgctagtgctggtggccgccgctgctgccccagctggagcccgagccgccgcctctgcgtccgcgcgtcgctgcttcccagggcggcggtatgctggggaaaggagtagtcggcggtggcggcggcaccaaggcccccaagccctccttcgtgtcgtacgtacgccctgaggaaattcacacaaacgaaaaggaagtaacagagaaggaagtaactcttcacttgttgccaggtgaacagctgctttgtgaagccagcacagtactgaagtatgtccaggaagattcctgtcagcatggggtctatgggaggcttgtctgcacagacttcaagattgccttcttgggtgatgatgaatctgcattggataatgatgaaactcaatttaagaataaggttataggagaaaatgacattacactccactgtgttgatcagatttatggagtgtttgatgagaaaaagaaaactctctttggacaactgaagaaataccctgagaagctcatcatccactgcaaagaccttcgagtgttccagttttgtctgaggtacacaaaggaagaggaagtcaaaaggattgtcagtggcataattcatcatacccaggctcctaaactgcttaaacgattatttctgttttcctatgcgactgctgcacaaaacaatacagtcactgatcccaagaaccataccgtaatgtttgacacacttaaggactggtgttgggaactggaacggaccaaaggcaacatgaagtacaaagcagtgagtgtcaacgaaggctataaagtctgtgagagattgccagcatactttgttgtccccacccctcttcctgaagagaatgtgcagcgctttcagggtcatggcataccaatatggtgttggtcctgccacaatggaagtgcccttttgaaaatgtcagcactgcccaaagaacaggatgacggcattttacaaatccaaaagagcttcttagatggaatttacaagaccatccacaggccaccctatgaaattgttaaaacggaagacctgtcaagcaacttcctgtccctgcaggaaatccagactgcatactctaaatttaaacagctatttctgatagataacagtactgaattttgggacacagatataaaatggttttctctgttggaaagtagcagctggcttgacataatcagacgttgcctgaaaaaagcaatagagattacagaatgtatggaagcacaaaacatgaatgttcttcttttagaggagaatgcatccgacctctgctgtctcatttcctctctggtgcaactgatgatggacccccactgcagaaccagaattggtttccagagcctcatccaaaaggagtgggtcatgggtggccactgtttcttggatcgctgcaaccatctccgccagaacgacaaagaggagcatcaacgacaactttctttgccacttacacaatctaagtcatctcccaaaagaggatttttcagggaagaaacagatcatttaattaaaaaccttctgggcaagagaattagcaaacttattaattcttctgatgagctccaagacaactttcgagagttctatgacagctggcatagcaagtccactgactaccatggtttgttgttaccgcatatcgaggggcccgaaatcaaagtctgggcccagcgctacctacgttggattccagaagcccaaatcctaggtggtggccaagtggccactctgagcaaactcttggaaatgatggaggaagtccagagtttacaagagaagatcgacgagagacaccacagccagcaggccccccaggctgaggccccctgcctgctgaggaactctgcccgcctctcgtctttgtttcctttcgctctgctccagcgacattcctctaagcccgtcttacccaccagtggctggaaagctttgggagatgaagacgatttggccaaacgagaagatgagttcgtggacctaggggatgtgtgacctgtttgttgagtgattgtgaaagaggaatgtgggagattgggacagctgatccctggatttgtgtcacgctacagctcatgctggctgggtccttagcccggcactccgttagaataaacctgggccttcgggaaaagaggtggctctcattatttttcatgattcta

SEQ ID NO: 157092 - DNA, 4966 bp, Homo sapiens
  Payload ID: 10789
  Gene Symbol: MTMR12
  Gene Name: myotubularin related protein 12
  Uniprot ID: Q9C0I1
  ENST ID: ENST00000280285
  CDS Start-End: 101-2182
gagccccagccgctagtgctggtggccgccgctgctgccccagctggagcccgagccgccgcctctgcgtccgcgcgtcgctgcttcccagggcggcggtatgctggggaaaggagtagtcggcggtggcggcggcaccaaggcccccaagccctccttcgtgtcgtacgtacgccctgaggaaattcacacaaacgaaaaggaagtaacagagaaggaagtaactcttcacttgttgccaggtgaacagctgctttgtgaagccagcacagtactgaagtatgtccaggaagattcctgtcagcatggggtctatgggaggcttgtctgcacagacttcaagattgccttcttgggtgatgatgaatctgcattggataatgatgaaactcaatttaagaataaggttataggagaaaatgacattacactccactgtgttgatcagatttatggagtgtttgatgagaaaaagaaaactctctttggacaactgaagaaataccctgagaagctcatcatccactgcaaagaccttcgagtgttccagttttgtctgaggtacacaaaggaagaggaagtcaaaaggattgtcagtggcataattcatcatacccaggctcctaaactgcttaaacgattatttctgttttcctatgcgactgctgcacaaaacaatacagtcactgatcccaagaaccataccgtaatgtttgacacacttaaggactggtgttgggaactggaacggaccaaaggcaacatgaagtacaaagcagtgagtgtcaacgaaggctataaagtctgtgagagattgccagcatactttgttgtccccacccctcttcctgaagagaatgtgcagcgctttcagggtcatggcataccaatatggtgttggtcctgccacaatggaagtgcccttttgaaaatgtcagcactgcccaaagaacaggatgacggcattttacaaatccaaaagagcttcttagatggaatttacaagaccatccacaggccaccctatgaaattgttaaaacggaagacctgtcaagcaacttcctgtccctgcaggaaatccagactgcatactctaaatttaaacagctatttctgatagataacagtactgaattttgggacacagatataaaatggttttctctgttggaaagtagcagctggcttgacataatcagacgttgcctgaaaaaagcaatagagattacagaatgtatggaagcacaaaacatgaatgttcttcttttagaggagaatgcatccgacctctgctgtctcatttcctctctggtgcaactgatgatggacccccactgcagaaccagaattggtttccagagcctcatccaaaaggagtgggtcatgggtggccactgtttcttggatcgctgcaaccatctccgccagaacgacaaagaggaggttcctgtgttcctgcttttcctagattgtgtctggcagctggtgcaccagcatcccccggcatttgaattcacagagacttacctgactgttttgtcagatagcctgtatatacctatttttagcaccttcttcttcaattcacctcatcaaaaagatactaacatgcatcaacgacaactttctttgccacttacacaatctaagtcatctcccaaaagaggatttttcagggaagaaacagatcatttaattaaaaaccttctgggcaagagaattagcaaacttattaattcttctgatgagctccaagacaactttcgagagttctatgacagctggcatagcaagtccactgactaccatggtttgttgttaccgcatatcgaggggcccgaaatcaaagtctgggcccagcgctacctacgttggattccagaagcccaaatcctaggtggtggccaagtggccactctgagcaaactcttggaaatgatggaggaagtccagagtttacaagagaagatcgacgagagacaccacagccagcaggccccccaggctgaggccccctgcctgctgaggaactctgcccgcctctcgtctttgtttcctttcgctctgctccagcgacattcctctaagcccgtcttacccaccagtggctggaaagctttgggagatgaagacgatttggccaaacgagaagatgagttcgtggacctaggggatgtgtgacctgtttgttgagtgattgtgaaagaggaatgtgggagattgggacagctgatccctggatttgtgtcacgctacagctcatgctggctgggtccttagcccggcactccgttagaataaacctgggccttcgggaaaagaggtggctctcattatttttcatgattctaaaagactatgcaattaaaaccgcatctgtagtattactaattggaaggaattattacttgacccgtaatagggttgtggccgttttctgatgcctaagtattatacagagcccacaatggccagtttactaccagaaagggcttcagtaagatattcttggacttgatactttcttcagatcctctttgtgccaagataatttatccagtcattgggaatagtaagtttctgtgtaacccatctcaattatagaagcaagttcagctttatgtatttgtatggggagttgaagattcagatagaggtattaagatgtgtggcatttacttaaaccatcacatttttttctttctacgcccccttgcctgtaaaacacctgggaagttccactggtgtcatccatcctgatgcttcagaccaccctcccttcttcacagaccgtgtcactttgcctgtgggtgggggctagccagccaccaccctcttttctgtgctgccagccccaggtcttcctccgcctgctccacaccactcgccgctgtccctctgcactccctgccttggtgcgtgtagtcccagtgtctcactgccaaacctcttggttacgctgcggggatctgtttctttgcctgagatccttcctgaggagcgtccattcctctggagtctctccttgtttggaacaaatcgcttcgcctttttctacttgcctgctgaagctttggagcacttgtgattgcagttttctgccgcaacccctgagccgagttcctcacattcttttacctttatggactgatgggattgggtcacttttgaatgtggctttcataggaaagcagcttaaacataaatatcagaagtgatgattatcatatgatacctcagtgattttaaaagccatagaagaaacttgactatgcctggtcaccttcttggatctgctgtctaaatgatatatatatgatatatatgtgatatatatatatcatatatatgatatatatatatatatcacatatatatgatatatatatgatatatatatatcacatatatatgatatatatatcatatatatgatatatattttttttaatgcaggaaagtatactttgtaaggagcagatttttttgttctcagtggaaccctgtcaaatcgcataaaagaggaaaaaaacaaaactcattagaatgttttaaattgaatgttcgccttttacatatatttgctcttcagtatggatcccaatttgaatgttacatgttcggaaaaactttcagttgctcaagggcaataagaaaatttgaggccgggtgtggtggctcacgcctgtaatcccagcactttgggaggctcaggtgggcgaattgcttgagcccaggagttcgagaccagccggggcaacatggcaaaaccctgtctctactaaaaatacaaaaattagctgggtgtggtggtgcatgcctgtagtcccagctactcgggaggctgaggtgggaggatcccgtgagcctgggaggtggagtttgcagtgagctaagatcgtgccactgcactccggcctgggtgatggagcaagacctcgtctcagaaaattggaaactattgactaagagaagtttctaggtttgcactgaattgtcttttgtacatacagtgaattgttttgctgttctccccactccatattaatgcaggagccaggttggtctgttaggatgaacaaaggttgaggggagggcaggattcgtgcatctgggggccaaacacatgttccgtcttgattgccttaagagttactagcgaggtcagtgttaggcttgcaatagggattttaaaatacactaactagttccttagctaccttcacatacattctataggccttcttaaattagcactaacctccacttccttctctgccccattgcctcccaaatatgctatggagctatttttgttaccacgttataacgtgaatatttatacagtagcctcttcaggctttgtaattttcattccaaaaatgcccggtgtgatgctttacactctacaaagtatggtttaaaggcacaaggtcatggcctttgtcatagcagttgaatgtgcattgacatatttttctatgattttttaaaattacaatagaaaaataagctgttgtaacgtgtaaggtcatgacaatttttgtatttatatttgaaatcagatttctataactcgtatttgtgtacagaattctcaatggatttatatattgtgaaatttttatctgagattgggatgtggattatgcttaacagtgagagctgaaatgagaccatttactttgtttaaaatgctgtactgtgcaagtttggaaatgtaaattaatttactgtatataatatcttgagtttgtttatacctccaagtttttacactgaagataaactagctttaattcaaaactttttttttctttataagggaataagctgttgagctaaacctgtatacttgtgctttttattttctggatgcacaatgaaagtttatacttgtatctcactgcatcatatctgattgcagaaattaaagcacaatttacaagcaatactgtacttggt

SEQ ID NO: 157093 - DNA, 5187 bp, Homo sapiens
  Payload ID: 10789
  Gene Symbol: MTMR12
  Gene Name: myotubularin related protein 12
  Uniprot ID: Q9C0I1
  ENST ID: ENST00000382142
  CDS Start-End: 172-2415
ggggcgagcggtgtcagcggcggagccggatgcgggcggcatcgcggcggtcgcggccttggggatgggcggagccccagccgctagtgctggtggccgccgctgctgccccagctggagcccgagccgccgcctctgcgtccgcgcgtcgctgcttcccagggcggcggtatgctggggaaaggagtagtcggcggtggcggcggcaccaaggcccccaagccctccttcgtgtcgtacgtacgccctgaggaaattcacacaaacgaaaaggaagtaacagagaaggaagtaactcttcacttgttgccaggtgaacagctgctttgtgaagccagcacagtactgaagtatgtccaggaagattcctgtcagcatggggtctatgggaggcttgtctgcacagacttcaagattgccttcttgggtgatgatgaatctgcattggataatgatgaaactcaatttaagaataaggttataggagaaaatgacattacactccactgtgttgatcagatttatggagtgtttgatgagaaaaagaaaactctctttggacaactgaagaaataccctgagaagctcatcatccactgcaaagaccttcgagtgttccagttttgtctgaggtacacaaaggaagaggaagtcaaaaggattgtcagtggcataattcatcatacccaggctcctaaactgcttaaacgattatttctgttttcctatgcgactgctgcacaaaacaatacagtcactgatcccaagaaccataccgtaatgtttgacacacttaaggactggtgttgggaactggaacggaccaaaggcaacatgaagtacaaagcagtgagtgtcaacgaaggctataaagtctgtgagagattgccagcatactttgttgtccccacccctcttcctgaagagaatgtgcagcgctttcagggtcatggcataccaatatggtgttggtcctgccacaatggaagtgcccttttgaaaatgtcagcactgcccaaagaacaggatgacggcattttacaaatccaaaagagcttcttagatggaatttacaagaccatccacaggccaccctatgaaattgttaaaacggaagacctgtcaagcaacttcctgtccctgcaggaaatccagactgcatactctaaatttaaacagctatttctgatagataacagtactgaattttgggacacagatataaaatggttttctctgttggaaagtagcagctggcttgacataatcagacgttgcctgaaaaaagcaatagagattacagaatgtatggaagcacaaaacatgaatgttcttcttttagaggagaatgcatccgacctctgctgtctcatttcctctctggtgcaactgatgatggacccccactgcagaaccagaattggtttccagagcctcatccaaaaggagtgggtcatgggtggccactgtttcttggatcgctgcaaccatctccgccagaacgacaaagaggaggttcctgtgttcctgcttttcctagattgtgtctggcagctggtgcaccagcatcccccggcatttgaattcacagagacttacctgactgttttgtcagatagcctgtatatacctatttttagcaccttcttcttcaattcacctcatcaaaaagatactaacatgggtagagaaggccaggatacacaaagcaagcctttgaatctgctcaccgtgtgggattggtcggtgcagtttgaacccaaagcccagacattgctcaaaaaccctctttatgtggaaaagccaaaactggacaaaggccaacggaaaggaatgcgcttcaaacatcaacgacaactttctttgccacttacacaatctaagtcatctcccaaaagaggatttttcagggaagaaacagatcatttaattaaaaaccttctgggcaagagaattagcaaacttattaattcttctgatgagctccaagacaactttcgagagttctatgacagctggcatagcaagtccactgactaccatggtttgttgttaccgcatatcgaggggcccgaaatcaaagtctgggcccagcgctacctacgttggattccagaagcccaaatcctaggtggtggccaagtggccactctgagcaaactcttggaaatgatggaggaagtccagagtttacaagagaagatcgacgagagacaccacagccagcaggccccccaggctgaggccccctgcctgctgaggaactctgcccgcctctcgtctttgtttcctttcgctctgctccagcgacattcctctaagcccgtcttacccaccagtggctggaaagctttgggagatgaagacgatttggccaaacgagaagatgagttcgtggacctaggggatgtgtgacctgtttgttgagtgattgtgaaagaggaatgtgggagattgggacagctgatccctggatttgtgtcacgctacagctcatgctggctgggtccttagcccggcactccgttagaataaacctgggccttcgggaaaagaggtggctctcattatttttcatgattctaaaagactatgcaattaaaaccgcatctgtagtattactaattggaaggaattattacttgacccgtaatagggttgtggccgttttctgatgcctaagtattatacagagcccacaatggccagtttactaccagaaagggcttcagtaagatattcttggacttgatactttcttcagatcctctttgtgccaagataatttatccagtcattgggaatagtaagtttctgtgtaacccatctcaattatagaagcaagttcagctttatgtatttgtatggggagttgaagattcagatagaggtattaagatgtgtggcatttacttaaaccatcacatttttttctttctacgcccccttgcctgtaaaacacctgggaagttccactggtgtcatccatcctgatgcttcagaccaccctcccttcttcacagaccgtgtcactttgcctgtgggtgggggctagccagccaccaccctcttttctgtgctgccagccccaggtcttcctccgcctgctccacaccactcgccgctgtccctctgcactccctgccttggtgcgtgtagtcccagtgtctcactgccaaacctcttggttacgctgcggggatctgtttctttgcctgagatccttcctgaggagcgtccattcctctggagtctctccttgtttggaacaaatcgcttcgcctttttctacttgcctgctgaagctttggagcacttgtgattgcagttttctgccgcaacccctgagccgagttcctcacattcttttacctttatggactgatgggattgggtcacttttgaatgtggctttcataggaaagcagcttaaacataaatatcagaagtgatgattatcatatgatacctcagtgattttaaaagccatagaagaaacttgactatgcctggtcaccttcttggatctgctgtctaaatgatatatatatgatatatatgtgatatatatatatcatatatatgatatatatatatatatcacatatatatgatatatatatgatatatatatatcacatatatatgatatatatatcatatatatgatatatattttttttaatgcaggaaagtatactttgtaaggagcagatttttttgttctcagtggaaccctgtcaaatcgcataaaagaggaaaaaaacaaaactcattagaatgttttaaattgaatgttcgccttttacatatatttgctcttcagtatggatcccaatttgaatgttacatgttcggaaaaactttcagttgctcaagggcaataagaaaatttgaggccgggtgtggtggctcacgcctgtaatcccagcactttgggaggctcaggtgggcgaattgcttgagcccaggagttcgagaccagccggggcaacatggcaaaaccctgtctctactaaaaatacaaaaattagctgggtgtggtggtgcatgcctgtagtcccagctactcgggaggctgaggtgggaggatcccgtgagcctgggaggtggagtttgcagtgagctaagatcgtgccactgcactccggcctgggtgatggagcaagacctcgtctcagaaaattggaaactattgactaagagaagtttctaggtttgcactgaattgtcttttgtacatacagtgaattgttttgctgttctccccactccatattaatgcaggagccaggttggtctgttaggatgaacaaaggttgaggggagggcaggattcgtgcatctgggggccaaacacatgttccgtcttgattgccttaagagttactagcgaggtcagtgttaggcttgcaatagggattttaaaatacactaactagttccttagctaccttcacatacattctataggccttcttaaattagcactaacctccacttccttctctgccccattgcctcccaaatatgctatggagctatttttgttaccacgttataacgtgaatatttatacagtagcctcttcaggctttgtaattttcattccaaaaatgcccggtgtgatgctttacactctacaaagtatggtttaaaggcacaaggtcatggcctttgtcatagcagttgaatgtgcattgacatatttttctatgattttttaaaattacaatagaaaaataagctgttgtaacgtgtaaggtcatgacaatttttgtatttatatttgaaatcagatttctataactcgtatttgtgtacagaattctcaatggatttatatattgtgaaatttttatctgagattgggatgtggattatgcttaacagtgagagctgaaatgagaccatttactttgtttaaaatgctgtactgtgcaagtttggaaatgtaaattaatttactgtatataatatcttgagtttgtttatacctccaagtttttacactgaagataaactagctttaattcaaaactttttttttctttataagggaataagctgttgagctaaacctgtatacttgtgctttttattttctggatgcacaatgaaagtttatacttgtatctcactgcatcatatctgattgcagaaattaaagcacaatttacaagcaat

SEQ ID NO: 157094 - DNA, 671 bp, Homo sapiens
  Payload ID: 10789
  Gene Symbol: MTMR12
  Gene Name: myotubularin related protein 12
  ENST ID: ENST00000505419
  CDS Start-End: 150-266
gagccggatgcgggcggcatcgcggcggtcgcggccttggggatgggcggagccccagccgctagtgctggtggccgccgctgctgccccagctggagcccgagccgccgcctctgcgtccgcgcgtcgctgcttcccagggcggcggtatgctggggaaaggagtagtcggcggtggcggcggcaccaaggcccccaagccctccttcgtgtcgtacgtacgccctgaggtgaacagctgctttgtgaagccagcacagtactgaagtatgtccaggaagattcctgtcagcatggggtctatgggaggcttgtctgcacagacttcaagattgccttcttgggtgatgatgaatctgcattggataatgatgaaactcaatttaagaataaggttataggagaaaatgacattacactccactgtgttgatcagatttatggagtgtttgatgagaaaaagaaaactctctttggacaactgaagaaataccctgagaagctcatcatccactgcaaagaccttcgagtgttccagttttgtctgaggtacacaaaggaagaggaagtcaaaaggattgtcagtggcataattcatcatacccaggctcctaaactgcttaaacgattatttctgttttcctatgcgactgctgcacaaaacaatacag

SEQ ID NO: 157095 - DNA, 561 bp, Homo sapiens
  Payload ID: 10789
  Gene Symbol: MTMR12
  Gene Name: myotubularin related protein 12
  ENST ID: ENST00000513622
  CDS Start-End: 87-206
agtgctggtggccgccgctgctgccccagctggagcccgagccgccgcctctgcgtccgcgcgtcgctgcttcccagggcggcggtatgctggggaaaggagtagtcggcggtggcggcggcaccaaggcccccaagccctccttcgtgtcgtacgtacgccctgaggtcttgctctgttgcccagactggaatgcagtggtgtgatctcagctcactccagcctcaacctcctgggctgaagcaatcttcctgccttagcctcccaagtagctgggactacaggaaattcacacaaacgaaaaggaagtaacagagaaggaagtaactcttcacttgttgccaggtgaacagctgctttgtgaagccagcacagtactgaagtatgtccaggaagattcctgtcagcatggggtctatgggaggcttgtctgcacagacttcaagattgccttcttgggtgatgatgaatctgcattggataatgatgaaactcaatttaagaataaggttataggagaaaatgacattacactccactgtgttgatcagatttatggag

SEQ ID NO: 157096 - DNA, 2494 bp, Homo sapiens
  Payload ID: 10790
  Gene Symbol: MTMR14
  Gene Name: myotubularin related protein 14
  Uniprot ID: Q8NCE2
  ENST ID: ENST00000296003
  CDS Start-End: 123-2075
aagtggaagtggaagtagaaggcggtggctgaggcggttccggaggttctagtgtcggagttgggtgcaggcaggtgccatgggcccgcttgaggcacactgaggggacgcggggctgggccatggccggcgctcgggccgccgccgccgctgcctcggcggggtcctcggcctcttcaggcaaccagccgcctcaggagctggggcttggggagctgctggaggagttctcccggactcagtaccgggccaaggatggcagcgggaccggcggctctaaggttgagcgcattgagaagagatgtctggagctgtttggccgagactactgtttcagcgtgattccaaacacgaatggggatatctgtggccactatccccggcacatcgtgttcctggagtatgagagttctgagaaggagaaagacacgtttgagagtaccgtacaggtgagcaagttgcaagacctcatccaccgcagcaagatggcccggtgcagaggacggtttgtctgcccagtaatcctgttcaagggcaagcacatttgcaggtcggccacactggctggatggggagagctgtatggacgctcaggctacaactattttttctcagggggtgcagatgatgcctgggcagatgtggaggacgtcacggaggaggactgtgctcttcgaagtggtgacacgcatctttttgataaggtcagaggctatgacatcaagctgcttcgatacctgtcagtcaaatacatctgtgacctgatggtggagaacaagaaggtgaagtttggcatgaatgtaacctcctctgagaaggtggacaaagcccagcgctatgccgacttcactctcctctccatcccgtatccaggctgtgaatttttcaaggaatataaagatcgggattacatggcagaagggctcatatttaactggaagcaggactacgttgatgccccattgagcatccccgacttcctgactcactctctgaacattgactggagccagtatcagtgttgggatctggtgcaacaaacacaaaactacctgaagctgctgctttccttagttaacagtgatgatgacagcgggctgctggtacactgtatctcaggctgggatcggacccccctcttcatctccctcctgcgcctttccttgtgggctgatgggctcatccacacgtccctgaagcccactgagatcctctacctcactgtggcctatgactggttcctcttcgggcacatgttggtagatcggctcagcaaaggggaggagattttcttcttctgcttcaattttttgaagcatattacctccgaggagttctctgctctgaagacccagaggaggaagagtttgccagcccgggatggaggcttcaccctggaagacatctgcatgctgagacgaaaggaccgtggcagcaccaccagccttggcagcgacttctccctggtcatggagagttccccaggagccactgggagcttcacctatgaggccgtggagctggtcccagcaggagcgccaactcaggcagcttggaggaagagccactcatcctctccacagagtgtcctctggaaccggccacaaccctcagaggaccgcttgccttcccagcaggggctggcggaagccaggtcttccagctcctcttcctcaaaccattctgataactttttcaggatgggtagcagtcccctggaggtccccaaacccagatcagtggaccatcccctgcccggatcctctctctccacagactatggcagctggcagatggtaacgggctgtggcagtattcaggagcgggctgtcctgcacacagactcctctctccctttcagcttcccggatgagctccctaacagttgtctgcttgcagccctgagtgatcgagagactcggctgcaggaggtgcgctcagccttcttggctgcgtacagcagcacagtggggcttcgggcagtagcccccagtccttccggtgccatcgggggcctgctggagcaatttgcccgtggtgttggactccggagcatcagcagcaatgccttgtgaagaagccagcccatgacattttcctgctcctctctcagctgagcccttagcagagaatcaaagccatgcctggccgaaggggtacttccaggtcaggggaaatttcagtcccccatctccatcatgaacatggcagccccaaagctgagcaaggccaaagacagggttttccaacccccagcctcttgactggtgaccaccaccccttcttgtcactgtctcccacccaccccatctttgctgggattcccatcaactctcagaactgtgtggggtttccctggggccttgtggaagccatgacttcacaaagaccctacctgtcagttcttgtttctggggaggagggatcacctgcactgagaatgaggcagtttgacacagatcacaaaataaaatcaaagtctttttgaatagcc

SEQ ID NO: 157097 - DNA, 2368 bp, Homo sapiens
  Payload ID: 10790
  Gene Symbol: MTMR14
  Gene Name: myotubularin related protein 14
  Uniprot ID: Q8NCE2
  ENST ID: ENST00000353332
  CDS Start-End: 152-1948
aaacatccggcgggacggggcggggccggaagtggaagtggaagtagaaggcggtggctgaggcggttccggaggttctagtgtcggagttgggtgcaggcaggtgccatgggcccgcttgaggcacactgaggggacgcggggctgggccatggccggcgctcgggccgccgccgccgctgcctcggcggggtcctcggcctcttcaggcaaccagccgcctcaggagctggggcttggggagctgctggaggagttctcccggactcagtaccgggccaaggatggcagcgggaccggcggctctaaggttgagcgcattgagaagagatgtctggagctgtttggccgagactactgtttcagcgtgattccaaacacgaatggggatatctgtggccactatccccggcacatcgtgttcctggagtatgagagttctgagaaggagaaagacacgtttgagagtaccgtacaggtgagcaagttgcaagacctcatccaccgcagcaagatggcccggtgcagaggacggtttgtctgcccagtaatcctgttcaagggcaagcacatttgcaggtcggccacactggctggatggggagagctgtatggacgctcaggctacaactattttttctcagggggtgcagatgatgcctgggcagatgtggaggacgtcacggaggaggactgtgctcttcgaagtggtgacacgcatctttttgataaggtcagaggctatgacatcaagctgcttcgatacctgtcagtcaaatacatctgtgacctgatggtggagaacaagaaggtgaagtttggcatgaatgtaacctcctctgagaaggtggacaaagcccagcgctatgccgacttcactctcctctccatcccgtatccaggctgtgaatttttcaaggaatataaagatcgggattacatggcagaagggctcatatttaactggaagcaggactacgttgatgccccattgagcatccccgacttcctgactcactctctgaacattgactggagccagtatcagtgttgggatctggtgcaacaaacacaaaactacctgaagctgctgctttccttagttaacagtgatgatgacagcgggctgctggtacactgtatctcaggctgggatcggacccccctcttcatctccctcctgcgcctttccttgtgggctgatgggctcatccacacgtccctgaagcccactgagatcctctacctcactgtggcctatgactggttcctcttcgggcacatgttggtagatcggctcagcaaaggggaggagattttcttcttctgcttcaattttttgaagcatattacctccgaggagttctctgctctgaagacccagaggaggaagagtttgccagcccgggatggaggcttcaccctggaagacatctgcatgctgagacgaaaggaccgtggcagcaccaccagccttggcagcgacttctccctggtcatggagagttccccaggagccactgggagcttcacctatgaggccgtggagctggtcccagcaggagcgccaactcaggcagcttggaggaagagccactcatcctctccacagagtgtcctctggaaccggccacaaccctcagaggaccgcttgccttcccagcaggggctggcggaagccaggtcttccagctcctcttcctcaaaccattctgataactttttcaggatgggtagcagtcccctggaggtccccaaacccaggcttgcagccctgagtgatcgagagactcggctgcaggaggtgcgctcagccttcttggctgcgtacagcagcacagtggggcttcgggcagtagcccccagtccttccggtgccatcgggggcctgctggagcaatttgcccgtggtgttggactccggagcatcagcagcaatgccttgtgaagaagccagcccatgacattttcctgctcctctctcagctgagcccttagcagagaatcaaagccatgcctggccgaaggggtacttccaggtcaggggaaatttcagtcccccatctccatcatgaacatggcagccccaaagctgagcaaggccaaagacagggttttccaacccccagcctcttgactggtgaccaccaccccttcttgtcactgtctcccacccaccccatctttgctgggattcccatcaactctcagaactgtgtggggtttccctggggccttgtggaagccatgacttcacaaagaccctacctgtcagttcttgtttctggggaggagggatcacctgcactgagaatgaggcagtttgacacagatcacaaaataaaatcaaagtctttttgaatagcca

SEQ ID NO: 157098 - DNA, 2105 bp, Homo sapiens
  Payload ID: 10790
  Gene Symbol: MTMR14
  Gene Name: myotubularin related protein 14
  Uniprot ID: Q8NCE2
  ENST ID: ENST00000351233
  CDS Start-End: 73-1689
agtgtcggagttgggtgcaggcaggtgccatgggcccgcttgaggcacactgaggggacgcggggctgggccatggccggcgctcgggccgccgccgccgctgcctcggcggggtcctcggcctcttcaggcaaccagccgcctcaggagctggggcttggggagctgctggaggagttctcccggactcagtaccgggccaaggatggcagcgggaccggcggctctaaggttgagcgcattgagaagagatgtctggagctgtttggccgagactactgtttcagcgtgattccaaacacgaatggggatatctgtggccactatccccggcacatcgtgttcctggagtatgagagttctgagaaggagaaagacacgtttgagagtaccgtacaggtgagcaagttgcaagacctcatccaccgcagcaagatggcccggtgcagaggacggtttgtctgcccagtaatcctgttcaagggcaagcacatttgcaggtcggccacactggctggatggggagagctgtatggacgctcaggctacaactattttttctcagggggtgcagatgatgcctgggcagatgtggaggacgtcacggaggaggactgtgctcttcgaagtggtgacacgcatctttttgataaggtcagaggctatgacatcaagctgcttcgatacctgtcagtcaaatacatctgtgacctgatggtggagaacaagaaggtgaagtttggcatgaatgtaacctcctctgagaaggtggacaaagcccagcgctatgccgacttcactctcctctccatcccgtatccaggctgtgaatttttcaaggaatataaagatcgggattacatggcagaagggctcatatttaactggaagcaggactacgttgatgccccattgagcatccccgacttcctgactcactctctgaacattgactggagccagtatcagtgttgggatctggtgcaacaaacacaaaactacctgaagctgctgctttccttagttaacagtgatgatgacagcgggctgctggtacactgtatctcaggctgggatcggacccccctcttcatctccctcctgcgcctttccttgtgggctgatgggctcatccacacgtccctgaagcccactgagatcctctacctcactgtggcctatgactggttcctcttcgggcacatgttggtagatcggctcagcaaaggggaggagattttcttcttctgcttcaattttttgaagcatattacctccgaggagttctctgctctgaagacccagaggaggaagagtttgccagcccgggatggaggcttcaccctggaagacatctgcatgctgagacgaaaggaccgtggcagcaccaccagccttggcagcgacttctccctggtcatggagagttccccaggagccactgggagcttcacctatgaggccgtggagctggtcccagcaggagcgccaactcaggcagcttggcttgcagccctgagtgatcgagagactcggctgcaggaggtgcgctcagccttcttggctgcgtacagcagcacagtggggcttcgggcagtagcccccagtccttccggtgccatcgggggcctgctggagcaatttgcccgtggtgttggactccggagcatcagcagcaatgccttgtgaagaagccagcccatgacattttcctgctcctctctcagctgagcccttagcagagaatcaaagccatgcctggccgaaggggtacttccaggtcaggggaaatttcagtcccccatctccatcatgaacatggcagccccaaagctgagcaaggccaaagacagggttttccaacccccagcctcttgactggtgaccaccaccccttcttgtcactgtctcccacccaccccatctttgctgggattcccatcaactctcagaactgtgtggggtttccctggggccttgtggaagccatgacttcacaaagaccctacctgtcagttcttgtttctggggaggagggatcacctgcactgagaatgaggcagtttgacacagatcacaaaataaaatcaaagtctttttgaata

SEQ ID NO: 157099 - DNA, 553 bp, Homo sapiens
  Payload ID: 10790
  Gene Symbol: MTMR14
  Gene Name: myotubularin related protein 14
  ENST ID: ENST00000431250
  CDS Start-End: 92-553
agaagtattctgggatcgtttctttcagcacaccaaaatagatggtcccaaattctgcagcacaaatctaatttgtttcctccttgagtgaatggcacttctcatcctgcttttggtccctctcctcttgcctgacagtggttccgaagcctattcaggctgtgaatttttcaaggaatataaagatcgggattacatggcagaagggctcatatttaactggaagcaggactacgttgatgccccattgagcatccccgacttcctgactcactctctgaacattgactggagccagtatcagtgttgggatctggtgcaacaaacacaaaactacctgaagctgctgctttccttagttaacagtgatgatgacagcgggctgctggtacactgtatctcaggctgggatcggacccccctcttcatctccctcctgcgcctttccttgtgggctgatgggctcatccacacgtccctgaagcccactgagatcctctacctcactgtggcctatgactggttcctcttcgggcacatgttggtagatcgg

SEQ ID NO: 157100 - DNA, 1451 bp, Homo sapiens
  Payload ID: 10790
  Gene Symbol: MTMR14
  Gene Name: myotubularin related protein 14
  ENST ID: ENST00000430020
  CDS Start-End: 80-646
aggttctagtgtcggagttgggtgcaggcaggtgccatgggcccgcttgaggcacactgaggggacgcggggctgggccatggccggcgctcgggccgccgccgccgctgcctcggcggggtcctcggcctcttcaggcaaccagccgcctcaggagctggggcttggggagctgctggaggagttctcccggactcagtaccgggccaaggatggcagcgggaccggcggctctaaggttgagcgcattgagaagagatgtctggagctgtttggccgagactactgtttcagcgtgattccaaacacgaatggggatatctgtggccactatccccggcacatcgtgttcctggagtatgagagttctgagaaggagaaagacacgtttgagagtaccgtacaggtgagcaagttgcaagacctcatccaccgcagcaagatggcccggtgcagaggacggtttgtctgcccagtaatcctgttcaagggcaagggggtgcagatgatgcctgggcagatgtggaggacgtcacggaggaggactgtgctcttcgaagtggtgacacgcatctttttgataaggtcagaggctatgacatcaagctgcttcgatacctgtcagtcaaatacatctgtgacctgatggtggagaacaagaaggtgaagtttggcatgaatgtaacctcctctgagaaggtggacaaagcccagcgctatgccgacttcactctcctctccatcccgtatccaggctgtgaatttttcaaggaatataaagatcgggattacatggcagaagggctcatatttaactggaagcaggactacgttgatgccccattgagcatccccgacttcctgactcactctctgaacattgactggagccagtatcagtgttgggatctggtgcaacaaacacaaaactacctgaagctgctgctttccttagttaacagtgatggtgagtctgtctcctccagagccctcgagccactgcacccttggggagttcccagttcattctgcctcaactgtatgtttgttggagttgcacaccttacttttgtgctgtgggagaggaatttggggagttcctagaatcccagaggctgggtgggatttgtccattggtggctttattccatgtcctcaaaatcctagaaaacaaaattaagaactccttaccatctatgccgtgcacagggtattttcacactgtctcagcattgcacaacagcattgtgtgtggggccaggatgggcctctcattcagaaagatgaggcatgagatgagagaatcaatccgggctgctcagtggatgcacacagcctgtagaggccctgttctccagagtcctccacccagtttggctgttttgattggatgggcctggcttgctcaatgtctctagggcagacggactctaaatccctggtagcaatca

SEQ ID NO: 157101 - DNA, 1746 bp, Homo sapiens
  Payload ID: 10790
  Gene Symbol: MTMR14
  Gene Name: myotubularin related protein 14
  ENST ID: ENST00000414996
  CDS Start-End: 20-202
gctggatggggagagctgtatggacgctcaggctacaactattttttctcagggggtgcagatgatgcctgggcagatgtggaggacgtcacggaggaggactgtgctcttcgaagtggtgacacgcatctttttgataaggtcagaggctatgacatcaagctgcttcgatacctgtcagtcaaatacatctgtgacctgatggtggagaacaagaaggtgaagtttggcatgaatgtaacctcctctgagaaggtggacaaagcccagcgctatgccgacttcactctcctctccatcccgtatccaggctgtgaatttttcaaggaatataaagatcgggattacatggcagaagggctcatatttaactggaagcaggactacgttgatgccccattgagcatccccgacttcctgactcactctctgaacattgactggagccagtatcagtgttgggatctggtgcaacaaacacaaaactacctgaagctgctgctttccttagttaacagtgatgatgacagcgggctgctggtacactgtatctcaggctgggatcggacccccctcttcatctccctcctgcgcctttccttgtgggctgatgggctcatccacacgtccctgaagcccactgagatcctctacctcactgtggcctatgactggttcctcttcgggcacatgttggtagatcggctcagcaaaggggaggagattttcttcttctgcttcaattttttgaagcatattacctccgaggagttctctgctctgaagacccagaggaggaagagtttgccagcccgggatggaggcttcaccctggaagacatctgcatgctgagacgaaaggaccgtggcagcaccaccagccttggcagcgacttctccctggtcatggagagttccccaggagccactgggagcttcacctatgaggccgtggagctggtcccagcaggagcgccaactcaggcagcttgatcagtggaccatcccctgcccggatcctctctctccacagactatggcagctggcagatggtaacgggctgtggcagtattcaggagcgggctgtcctgcacacagactcctctctccctttcagcttcccggatgagctccctaacagttgtctgcttgcagccctgagtgatcgagagactcggctgcaggaggtgcgctcagccttcttggctgcgtacagcagcacagtggggcttcgggcagtagcccccagtccttccggtgccatcgggggcctgctggagcaatttgcccgtggtgttggactccggagcatcagcagcaatgccttgtgaagaagccagcccatgacattttcctgctcctctctcagctgagcccttagcagagaatcaaagccatgcctggccgaaggggtacttccaggtcaggggaaatttcagtcccccatctccatcatgaacatggcagccccaaagctgagcaaggccaaagacagggttttccaacccccagcctcttgactggtgaccaccaccccttcttgtcactgtctcccacccaccccatctttgctgggattcccatcaactctcagaactgtgtggggtttccctggggccttgtggaagccatgacttcacaaagaccctacctgtcagttcttgtttctggggaggagggatcacctgcactgagaatgaggcagtttgacacagatcacaaaataaaatcaaagtctttttgaa

SEQ ID NO: 157102 - DNA, 1427 bp, Homo sapiens
  Payload ID: 10790
  Gene Symbol: MTMR14
  Gene Name: myotubularin related protein 14
  ENST ID: ENST00000420925
  CDS Start-End: 135-1013
gggcggggccggaagtggaagtggaagtagaaggcggtggctgaggcggttccggaggttctagtgtcggagttgggtgcaggcaggtgccatgggcccgcttgaggcacactgaggggacgcggggctgggccatggccggcgctcgggccgccgccgccgctgcctcggcggggtcctcggcctcttcaggcaaccagccgcctcaggagctggggcttggggagctgctggaggagttctcccggactcagtaccgggccaaggatggcagcgggaccggcggctctaagtgttgggatctggtgcaacaaacacaaaactacctgaagctgctgctttccttagttaacagtgatgatgacagcgggctgctggtacactgtatctcaggctgggatcggacccccctcttcatctccctcctgcgcctttccttgtgggctgatgggctcatccacacgtccctgaagcccactgagatcctctacctcactgtggcctatgactggttcctcttcgggcacatgttggtagatcggctcagcaaaggggaggagattttcttcttctgcttcaattttttgaagcatattacctccgaggagttctctgctctgaagacccagaggaggaagagtttgccagcccgggatggaggcttcaccctggaagacatctgcatgctgagacgaaaggaccgtggcagcaccaccagccttggcagcgacttctccctggtcatggagagttccccaggagccactgggagcttcacctatgaggccgtggagctggtcccagcaggagcgccaactcaggcagcttggcttgcagccctgagtgatcgagagactcggctgcaggaggtgcgctcagccttcttggctgcgtacagcagcacagtggggcttcgggcagtagcccccagtccttccggtgccatcgggggcctgctggagcaatttgcccgtggtgttggactccggagcatcagcagcaatgccttgtgaagaagccagcccatgacattttcctgctcctctctcagctgagcccttagcagagaatcaaagccatgcctggccgaaggggtacttccaggtcaggggaaatttcagtcccccatctccatcatgaacatggcagccccaaagctgagcaaggccaaagacagggttttccaacccccagcctcttgactggtgaccaccaccccttcttgtcactgtctcccacccaccccatctttgctgggattcccatcaactctcagaactgtgtggggtttccctggggccttgtggaagccatgacttcacaaagaccctacctgtcagttcttgtttctggggaggagggatcacctgcactgagaatgaggcagtttgacacagatcacaaaataaaatcaaagtctttttgaa

SEQ ID NO: 157103 - DNA, 718 bp, Homo sapiens
  Payload ID: 10790
  Gene Symbol: MTMR14
  Gene Name: myotubularin related protein 14
  ENST ID: ENST00000437997
  CDS Start-End: 66-281
gagttgggtgcaggcaggtgccatgggcccgcttgaggcacactgaggggacgcggggctgggccatggccggcgctcgggccgccgccgccgctgcctcggcggggtcctcggcctcttcaggcaaccagccgcctcaggagctggggcttggggagctgctggaggagttctcccggactcagtaccgggccaaggatggcagcgggaccggcggctctaagtcgtcttatcgccagacctggagggcttcctgtcagctcaggccatccccaccctaagcactggctggcagtgcggtgggaatcttgccgaccctgccatctcattcccccacgtggttttggcagctttagcaccaagttttccagtggaattctgttccatcctgcaccacagaactctgatttgacctcagagattaccgttgagcgcattgagaagagatgtctggagctgtttggccgagactactgtttcagcgtgattccaaacacgaatggggatatctgtggccactatccccggcacatcgtgttcctggagtatgagagttctgagaaggagaaagacacgtttgagagtaccgtacaggtgagcaagttgcaagacctcatccaccgcagcaagatggcccggtgcagaggacggtttgtctgcccagtaatcctgttcaagggcaagcacatttgcaggtcggccacactggctggatggg

SEQ ID NO: 157104 - DNA, 1664 bp, Homo sapiens
  Payload ID: 10790
  Gene Symbol: MTMR14
  Gene Name: myotubularin related protein 14
  ENST ID: ENST00000447144
  CDS Start-End: 112-675
gaagtagaaggcggtggctgaggcggttccggaggttctagtgtcggagttgggtgcaggcaggtgccatgggcccgcttgaggcacactgaggggacgcggggctgggccatggccggcgctcgggccgccgccgccgctgcctcggcggggtcctcggcctcttcaggcaaccagccgcctcaggagctggggcttggggagctgctggaggagttctcccggactcagtaccgggccaaggatggcagcgggaccggcggctctaaggttgagcgcattgagaagagatgtctggagctgtttggccgagactactgtttcagcgtgattccaaacacgaatggggatatctgtggccactatccccggcacatcgtgttcctggagtatgagagttctgagaaggagaaagacacaagtggtgacacgcatctttttgataaggtcagaggctatgacatcaagctgcttcgatacctgtcagtcaaatacatctgtgacctgatggtggagaacaagaaggtgaagtttggcatgaatgtaacctcctctgagaaggtggacaaagcccagcgctatgccgacttcactctcctctccatcccgtatccagtgttgggatctggtgcaacaaacacaaaactacctgaagctgctgctttccttagttaacagtgatgatgacagcgggctgctggtacactgtatctcaggctgggatcggacccccctcttcatctccctcctgcgcctttccttgtgggctgatgggctcatccacacgtccctgaagcccactgagatcctctacctcactgtggcctatgactggttcctcttcgggcacatgttggtagatcggctcagcaaaggggaggaggaggaagagtttgccagcccgggatggaggcttcaccctggaagacatctgcatgctgagacgaaaggaccgtggcagcaccaccagccttggcagcgacttctccctggtcatggagagttccccaggagccactgggagcttcacctatgaggccgtggagctggtcccagcaggagcgccaactcaggcagcttgatcagtggaccatcccctgcccggatcctctctctccacagactatggcagctggcagatggtaacgggctgtggcagtattcaggagcgggctgtcctgcacacagactcctctctccctttcagcttcccggatgagctccctaacagttgtctgcttgcagccctgagtgatcgagagactcggctgcaggaggtgcgctcagccttcttggctgcgtacagcagcacagtggggcttcgggcagtagcccccagtccttccggtgccatcgggggcctgctggagcaatttgcccgtggtgttggactccggagcatcagcagcaatgccttgtgaagaagccagcccatgacattttcctgctcctctctcagctgagcccttagcagagaatcaaagccatgcctggccgaaggggtacttccaggtcaggggaaatttcagtcccccatctccatcatgaacatggcagccccaaagctgagcaaggccaaagacagggttttccaacccccagcctcttgactggtgaccaccaccccttcttgtcactgtctcccacccaccccatctttgctg

SEQ ID NO: 157105 - DNA, 773 bp, Homo sapiens
  Payload ID: 10790
  Gene Symbol: MTMR14
  Gene Name: myotubularin related protein 14
  ENST ID: ENST00000449543
  CDS Start-End: 97-207
tatagacggggtttcaccatgttggccaggctggtctttacctcctgacctcaggtgatctgccgcctgagcctccccaagtgtgggattacaggcatgagccactgtgcctggccagaaactgaattggagcttgatgtaggggaaccggtaaaggaaccactggccgacctaacaagaaaaggtttgagagtaccgtacaggtgagcaagttgcaagacctcatccaccgcagcaagatggcccggtgcagaggacggtttgtctgcccagtaatcctgttcaagggcaagcacatttgcaggtcggccacactggctggatggggagagctgtatggacgctcaggctacaactattttttctcagggggtgcagatgatgcctgggcagatgtggaggacgtcacggaggaggactgtgctcttcgaagtggtgacacgcatctttttgataaggtcagaggctatgacatcaagctgcttcgatacctgtcagtcaaatacatctgtgacctgatggtggagaacaagaaggtgaagtttggcatgaatgtaacctcctctgagaaggtggacaaagcccagcgctatgccgacttcactctcctctccatcccgtatccaggctgtgaatttttcaaggaatataaagatcgggattacatggcagaagggctcatatttaactggaagcaggactacgttgatgccccattgagcatccccgacttcctgactcactctctgaacattgactggagccagtatcag

SEQ ID NO: 157106 - DNA, 840 bp, Homo sapiens
  Payload ID: 10790
  Gene Symbol: MTMR14
  Gene Name: myotubularin related protein 14
  ENST ID: ENST00000416864
  CDS Start-End: 70-546
gtcggagttgggtgcaggcaggtgccatgggcccgcttgaggcacactgaggggacgcggggctgggccatggccggcgctcgggccgccgccgccgctgcctcggcggggtcctcggcctcttcaggcaaccagccgcctcaggagctggggcttggggagctgctggaggagttctcccggactcagtaccgggccaaggatggcagcgggaccggcggctctaaggttgagcgcattgagaagagatgtctggagctgtttggccgagactactgtttcagcgtgattccaaacacgaatggggatatctgtggccactatccccggcacatcgtgttcctggagtatgagagttctgagaaggagaaagacacgtttgagagtaccgtacagggggtgcagatgatgcctgggcagatgtggaggacgtcacggaggaggactgtgctcttcgaagtggtgacacgcatctttttgataaggtcagaggctatgacatcaagctgcttcgatacctgtcagtcaaatacatctgtgacctgatggtggagaacaagaaggtgaagtttggcatgaatgtaacctcctctgagaaggtggacaaagcccagcgctatgccgacttcactctcctctccatcccgtatccaggctgtgaatttttcaaggaatataaagatcgggattacatggcagaagggctcatatttaactggaagcaggactacgttgatgccccattgagcatccccgacttcctgactcactctctgaacattgactggagccagtatcagtgttgggatctggtgcaacaaacacaaaactacctgaagc

SEQ ID NO: 157107 - DNA, 2523 bp, Homo sapiens
  Payload ID: 10790
  Gene Symbol: MTMR14
  Gene Name: myotubularin related protein 14
  ENST ID: ENST00000617504
  CDS Start-End: 152-1714
aaacatccggcgggacggggcggggccggaagtggaagtggaagtagaaggcggtggctgaggcggttccggaggttctagtgtcggagttgggtgcaggcaggtgccatgggcccgcttgaggcacactgaggggacgcggggctgggccatggccggcgctcgggccgccgccgccgctgcctcggcggggtcctcggcctcttcaggcaaccagccgcctcaggagctggggcttggggagctgctggaggagttctcccggactcagtaccgggccaaggatggcagcgggaccggcggctctaaggttgagcgcattgagaagagatgtctggagctgtttggccgagactactgtttcagcgtgattccaaacacgaatggggatatctgtggccactatccccggcacatcgtgttcctggagtatgagagttctgagaaggagaaagacacgtttgagagtaccgtacaggtgagcaagttgcaagacctcatccaccgcagcaagatggcccggtgcagaggacggtttgtctgcccagtaatcctgttcaagggcaagcacatttgcaggtcggccacactggctggatggggagagctgtatggacgctcaggctacaactattttttctcagggggtgcagatgatgcctgggcagatgtggaggacgtcacggaggaggactgtgctcttcgaagtggtgacacgcatctttttgataaggtcagaggctatgacatcaagctgcttcgatacctgtcagtcaaatacatctgtgacctgatggtggagaacaagaaggtgaagtttggcatgaatgtaacctcctctgagaaggtggacaaagcccagcgctatgccgacttcactctcctctccatcccgtatccaggctgtgaatttttcaaggaatataaagatcgggattacatggcagaagggctcatatttaactggaagcaggactacgttgatgccccattgagcatccccgacttcctgactcactctctgaacattgactggagccagtatcagtgttgggatctggtgcaacaaacacaaaactacctgaagctgctgctttccttagttaacagtgatgatgacagcgggctgctggtacactgtatctcaggctgggatcggacccccctcttcatctccctcctgcgcctttccttgtgggctgatgggctcatccacacgtccctgaagcccactgagatcctctacctcactgtggcctatgactggttcctcttcgggcacatgttggtagatcggctcagcaaaggggaggagattttcttcttctgcttcaattttttgaagcatattacctccgaggagttctctgctctgaagacccagaggaggaagagtttgccagcccgggatggaggcttcaccctggaagacatctgcatgctgagacgaaaggaccgtggcagcaccaccagccttggcagcgacttctccctggtcatggagagttccccaggagccactgggagcttcacctatggccgtggagctggtcccagcaggagcgccaactcaggcagcttggaggaagagccactcatcctctccacagagtgtcctctggaaccggccacaaccctcagaggaccgcttgccttcccagcaggggctggcggaagccaggtcttccagctcctcttcctcaaaccattctgataactttttcaggatgggtagcagtcccctggaggtccccaaacccagatcagtggaccatcccctgcccggatcctctctctccacagactatggcagctggcagatggtaacgggctgtggcagtattcaggagcgggctgtcctgcacacagactcctctctccctttcagcttcccggatgagctccctaacagttgtctgcttgcagccctgagtgatcgagagactcggctgcaggaggtgcgctcagccttcttggctgcgtacagcagcacagtggggcttcgggcagtagcccccagtccttccggtgccatcgggggcctgctggagcaatttgcccgtggtgttggactccggagcatcagcagcaatgccttgtgaagaagccagcccatgacattttcctgctcctctctcagctgagcccttagcagagaatcaaagccatgcctggccgaaggggtacttccaggtcaggggaaatttcagtcccccatctccatcatgaacatggcagccccaaagctgagcaaggccaaagacagggttttccaacccccagcctcttgactggtgaccaccaccccttcttgtcactgtctcccacccaccccatctttgctgggattcccatcaactctcagaactgtgtggggtttccctggggccttgtggaagccatgacttcacaaagaccctacctgtcagttcttgtttctggggaggagggatcacctgcactgagaatgaggcagtttgacacagatcacaaaataaaatcaaagtctttttgaatagccac

SEQ ID NO: 157108 - DNA, 3350 bp, Homo sapiens
  Payload ID: 10791
  Gene Symbol: MTMR2
  Gene Name: myotubularin related protein 2
  Uniprot ID: Q13614
  ENST ID: ENST00000352297
  CDS Start-End: 434-2149
gggggaacatggccgcttccggtctccctcccgggccggcgctggcctgactgcggccccggtccgtagcactccgccctccgcttctcccgccctgtagccgcgaagactgcttcagcctttccctgtgctgcccctgccgcgcgatggagaagagctcgagctgcgagagtcttggctcccagccggcggcggctcggccgcccagcgtggactccttgtccagttaatgtgttaagagccattgacatttgaagatcatcagaagtgaagataaaacatctcaaaaattataattgcctccacttctcattcagagaattcagtgcatacaaaatcagcttctgttgtatcatcagattccatttcaacttctgccgacaacttttctcctgatttgagggtcctgagggagtctaacaagttagcagaaatggaagaaccacccttgcttccaggagaaaatattaaagacatggccaaagatgtaacttatatatgtccattcactggcgctgtacgaggaactctgactgtcacgaattataggttatatttcaaaagcatggaacgggatcccccatttgttttagatgcttcccttggtgtgataaatagagtagaaaaaattggtggtgcttctagtcgaggtgaaaattcttatggactagaaactgtgtgtaaggatattaggaatttacgatttgctcataaacctgaggggcggacaagaagatccatatttgagaatctaatgaaatatgcatttcctgtctctaataacctgcctctttttgcttttgaatacaaagaagtattccctgaaaatgggtggaagctatatgaccctcttttagagtatagaaggcagggaattccaaatgaaagctggagaataacaaagataaatgaacgatatgaactttgtgatacataccctgccctcctggttgtgccagcaaatattcctgatgaagaattaaagagagtggcatccttcagatcaagaggccgtatcccagttttatcatggattcatcctgaaagtcaagccacaatcactcggtgtagccagcccatggttggagtgagtggaaagcgaagcaaagaagatgaaaaataccttcaagctatcatggattccaatgcccagtctcacaaaatctttatatttgatgcccggccaagtgttaatgctgttgccaacaaggcaaagggtggaggttatgaaagtgaagatgcctatcaaaatgctgaactagttttcctggatatccacaatattcatgttatgagagaatcattacgaaaacttaaggagattgtgtaccccaacattgaggaaacccactggttgtctaacttggaatctactcattggctagaacatattaagcttattcttgcaggggctcttaggattgctgacaaggtagagtcagggaagacgtctgtggtagtgcattgcagtgatggttgggatcgcacagctcagctcacttcccttgccatgctcatgttggatggatactatcgaaccatccgaggatttgaagtccttgtggagaaagaatggctaagttttggacatcgatttcaactaagagttggccatggagataagaaccatgcagatgcagacagatcgcctgtttttcttcaatttattgactgtgtctggcagatgacaagacagtttcctaccgcatttgaattcaatgagtattttctcattaccattttggaccacctatacagctgcttattcggaacattcctctgtaatagtgaacaacagagaggaaaagagaatcttcctaaaaggactgtgtcactgtggtcttacataaacagccagctggaagacttcactaatcctctctatgggagctattccaatcatgtcctttatccagtagccagcatgcgccacctagagctctgggtgggatattacataaggtggaatccacggatgaaaccacaggaacctattcacaacagatacaaagaacttcttgctaaacgagcagagcttcagaaaaaagtagaggaactacagagagagatttctaaccgatcaacctcatcctcagagagagccagctctcctgcacagtgtgtcactcctgtccaaactgttgtataaaggactgtaagatcaggggcatcattgctatacactcttgattacactggcagctctatgagtagaaagtcttcggaatttagaacccatctatgagagaaagttcagtcactttatttattttaaatctctctaggatgagtttagaactgtagcagtgcaggtggcttaagtgaagtaactccatatgtaattacatgattatgatactaatcttttaagtatccaaagaatattaaaatacttcaatcctggattcacagtgggaacaagtttctattaaaaggcaaatgctgttacaaatttttggcatctggtaatattaaaaccattttagaaatacactctgtgctcactgtgcagaggaacatcagttttcaaaccaacactgaaattctgtggcatcacatatattgggccttgatgtcatgacagatcaaaatcatttgatatccctttctccattctaggtttttctttttttcagtaactgatttaccttgatcacttttcaacttccatattcttcatatagtaaaaggcaaagtgttgaagatactacggtgtggtagtagttgaaaattattgccgtcattatttacatacttaagacatattagcaagttgatccaaaatgggaggccttatagatgtgcttgggggaaaatgaaggggagaaagtagccatacaggagttcaaagaattccatgcccttcagattagcccaattaccagaaacatcatgaaagatattttaaaaactaattatttactacagtgtatttcacttgtcttgtgtgtctgaacacacagaagctaattagcaagtttttaagaagtatttaaaaatcttactaggattgacattttttctgaattctgtataaatagcttatagtgagaagtactgtgctcaaattttacatttttttcctttgcaaattctgtaatttcactcaacgattaagtctaccaaagaacacactgcatgtaaaagatgtattacaatctcaaagccagtaaaagaaatcttgcttcactgttcacctgctacaagtaagagtttggtgctggtagaaacatttgactctgatgtctattttattctacataagagccatatgtaatgtactgtaacaaaggagcttcttgtccccttggtcttttaattaaaagaaattccaactgacttttaaactt

SEQ ID NO: 157109 - DNA, 4681 bp, Homo sapiens
  Payload ID: 10791
  Gene Symbol: MTMR2
  Gene Name: myotubularin related protein 2
  Uniprot ID: Q13614
  ENST ID: ENST00000346299
  CDS Start-End: 342-2273
ctccttccataagggtctggtccttcatccctcccgcttcaccagaccccctcaccctgggagccgccacctccctttccccaagaccagatgtcgcgcggccggacacagccagcacggagagtcgatgccggcgtctgagctgcgcagtggggtcttcccgctgcccagcagcctacaggcgcggtgcactctgggggaacatggccgcttccggtctccctcccgggccggcgctggcctgactgcggccccggtccgtagcactccgccctccgcttctcccgccctgtagccgcgaagactgcttcagcctttccctgtgctgcccctgccgcgcgatggagaagagctcgagctgcgagagtcttggctcccagccggcggcggctcggccgcccagcgtggactccttgtccagtgcctccacttctcattcagagaattcagtgcatacaaaatcagcttctgttgtatcatcagattccatttcaacttctgccgacaacttttctcctgatttgagggtcctgagggagtctaacaagttagcagaaatggaagaaccacccttgcttccaggagaaaatattaaagacatggccaaagatgtaacttatatatgtccattcactggcgctgtacgaggaactctgactgtcacgaattataggttatatttcaaaagcatggaacgggatcccccatttgttttagatgcttcccttggtgtgataaatagagtagaaaaaattggtggtgcttctagtcgaggtgaaaattcttatggactagaaactgtgtgtaaggatattaggaatttacgatttgctcataaacctgaggggcggacaagaagatccatatttgagaatctaatgaaatatgcatttcctgtctctaataacctgcctctttttgcttttgaatacaaagaagtattccctgaaaatgggtggaagctatatgaccctcttttagagtatagaaggcagggaattccaaatgaaagctggagaataacaaagataaatgaacgatatgaactttgtgatacataccctgccctcctggttgtgccagcaaatattcctgatgaagaattaaagagagtggcatccttcagatcaagaggccgtatcccagttttatcatggattcatcctgaaagtcaagccacaatcactcggtgtagccagcccatggttggagtgagtggaaagcgaagcaaagaagatgaaaaataccttcaagctatcatggattccaatgcccagtctcacaaaatctttatatttgatgcccggccaagtgttaatgctgttgccaacaaggcaaagggtggaggttatgaaagtgaagatgcctatcaaaatgctgaactagttttcctggatatccacaatattcatgttatgagagaatcattacgaaaacttaaggagattgtgtaccccaacattgaggaaacccactggttgtctaacttggaatctactcattggctagaacatattaagcttattcttgcaggggctcttaggattgctgacaaggtagagtcagggaagacgtctgtggtagtgcattgcagtgatggttgggatcgcacagctcagctcacttcccttgccatgctcatgttggatggatactatcgaaccatccgaggatttgaagtccttgtggagaaagaatggctaagttttggacatcgatttcaactaagagttggccatggagataagaaccatgcagatgcagacagatcgcctgtttttcttcaatttattgactgtgtctggcagatgacaagacagtttcctaccgcatttgaattcaatgagtattttctcattaccattttggaccacctatacagctgcttattcggaacattcctctgtaatagtgaacaacagagaggaaaagagaatcttcctaaaaggactgtgtcactgtggtcttacataaacagccagctggaagacttcactaatcctctctatgggagctattccaatcatgtcctttatccagtagccagcatgcgccacctagagctctgggtgggatattacataaggtggaatccacggatgaaaccacaggaacctattcacaacagatacaaagaacttcttgctaaacgagcagagcttcagaaaaaagtagaggaactacagagagagatttctaaccgatcaacctcatcctcagagagagccagctctcctgcacagtgtgtcactcctgtccaaactgttgtataaaggactgtaagatcaggggcatcattgctatacactcttgattacactggcagctctatgagtagaaagtcttcggaatttagaacccatctatgagagaaagttcagtcactttatttattttaaatctctctaggatgagtttagaactgtagcagtgcaggtggcttaagtgaagtaactccatatgtaattacatgattatgatactaatcttttaagtatccaaagaatattaaaatacttcaatcctggattcacagtgggaacaagtttctattaaaaggcaaatgctgttacaaatttttggcatctggtaatattaaaaccattttagaaatacactctgtgctcactgtgcagaggaacatcagttttcaaaccaacactgaaattctgtggcatcacatatattgggccttgatgtcatgacagatcaaaatcatttgatatccctttctccattctaggtttttctttttttcagtaactgatttaccttgatcacttttcaacttccatattcttcatatagtaaaaggcaaagtgttgaagatactacggtgtggtagtagttgaaaattattgccgtcattatttacatacttaagacatattagcaagttgatccaaaatgggaggccttatagatgtgcttgggggaaaatgaaggggagaaagtagccatacaggagttcaaagaattccatgcccttcagattagcccaattaccagaaacatcatgaaagatattttaaaaactaattatttactacagtgtatttcacttgtcttgtgtgtctgaacacacagaagctaattagcaagtttttaagaagtatttaaaaatcttactaggattgacattttttctgaattctgtataaatagcttatagtgagaagtactgtgctcaaattttacatttttttcctttgcaaattctgtaatttcactcaacgattaagtctaccaaagaacacactgcatgtaaaagatgtattacaatctcaaagccagtaaaagaaatcttgcttcactgttcacctgctacaagtaagagtttggtgctggtagaaacatttgactctgatgtctattttattctacataagagccatatgtaatgtactgtaacaaaggagcttcttgtccccttggtcttttaattaaaagaaattccaactgacttttaaactttgttcttgtccaaagttgccatttcttttttttccccagaaatatttggaaattattggaggaatatgcaccccagatgaaaatgttcagtttgtacccatttttccttaaccaacacccaaatcaaacaattaaaatatacagtgtttttccactcactaattcactatacagagagtctgaaccttagcctccctcttggtcttgcagtgaggaagtttctattagtatatccaatttagcaaaattggtaccaaaatgatttctttggtaattgtgtgaaatataagctttttaacagggcatttaagtggctagcaaatcagtaattaaaaattaagctttctactccaagtatttcacaaacgcatctgccattttcctcatttaaaccttggttatcttggcctgataccacataaaagaatgtagaatggctgaagagatcaagaatttaaagcttctagtcttaacatacttgcatccacttcaaattcaaatcaaaagccagggaaatctaagtgcaaccctaccacttctctgctgagaaccttccagtggttcccctcaccttctgcagaagtctccaatatggagtacatgcacttgggcatttaatatataccactggtgtgtgtgggagggagggaggaggaatactagccctttttatatatttacacaagcaaaacttttaaatatttgaattgacagttacatgtttcataactttgtatgtctattggttgtgcaggtgtaattttttccctttttgattagggttacaaaatttagagaccagtatgattaagttgaagctccttagcctccttcgacctagtctctgcatacctcaacttttacgtaccaatgctactctgctgttcacaattgcctcatgtaatctgcagattcctgcctccccactttggttcagtctgtcttgtgcacctggaacaactgttctcccttgtgactaattcctattttctagagtttaggcatcatctcttcctttgggaagttatctgattcacgactgccttctctgacatccccaccttcctctgtgcccccatagcactgtgtataccgctactaccactgcaattcacattatattggaatgaacaattcacatgtctaccacaagtctgtaaacataaccttatttgaaatgaattgcaataaagctctgttacaacgt

SEQ ID NO: 157110 - DNA, 4681 bp, Homo sapiens; identical to SEQ ID NO: 157109
  Payload ID: 10791
  Gene Symbol: MTMR2
  Gene Name: myotubularin related protein 2
  Uniprot ID: Q13614
  ENST ID: ENST00000393223
  CDS Start-End: 558-2273

SEQ ID NO: 157111 - DNA, 3420 bp, Homo sapiens
  Payload ID: 10791
  Gene Symbol: MTMR2
  Gene Name: myotubularin related protein 2
  Uniprot ID: Q13614
  ENST ID: ENST00000409459
  CDS Start-End: 503-2218
gaacatggccgcttccggtctccctcccgggccggcgctggcctgactgcggccccggtccgtagcactccgccctccgcttctcccgccctgtagccgcgaagactgcttcagcctttccctgtgctgcccctgccgcgcgatggagaagagctcgagctgcgagagtcttggctcccagccggcggcggctcggccgcccagcgtggactccttgtccagttaatgtgttaagagccattgacatttgaagatcatcagaagtgaagataaaacatctcaaaaattataattgcctccacttctcattcagagaattcagtgcatacaaaatcagcttctgttgtatcatcagattccatttcaacttctgccgacaacttttctcctgatttgaggcccatgcagtccagttcgggagctaagtcacttaaacactgtgtgatagttcctacacatctcattatagtttgtcctgagggagtctaacaagttagcagaaatggaagaaccacccttgcttccaggagaaaatattaaagacatggccaaagatgtaacttatatatgtccattcactggcgctgtacgaggaactctgactgtcacgaattataggttatatttcaaaagcatggaacgggatcccccatttgttttagatgcttcccttggtgtgataaatagagtagaaaaaattggtggtgcttctagtcgaggtgaaaattcttatggactagaaactgtgtgtaaggatattaggaatttacgatttgctcataaacctgaggggcggacaagaagatccatatttgagaatctaatgaaatatgcatttcctgtctctaataacctgcctctttttgcttttgaatacaaagaagtattccctgaaaatgggtggaagctatatgaccctcttttagagtatagaaggcagggaattccaaatgaaagctggagaataacaaagataaatgaacgatatgaactttgtgatacataccctgccctcctggttgtgccagcaaatattcctgatgaagaattaaagagagtggcatccttcagatcaagaggccgtatcccagttttatcatggattcatcctgaaagtcaagccacaatcactcggtgtagccagcccatggttggagtgagtggaaagcgaagcaaagaagatgaaaaataccttcaagctatcatggattccaatgcccagtctcacaaaatctttatatttgatgcccggccaagtgttaatgctgttgccaacaaggcaaagggtggaggttatgaaagtgaagatgcctatcaaaatgctgaactagttttcctggatatccacaatattcatgttatgagagaatcattacgaaaacttaaggagattgtgtaccccaacattgaggaaacccactggttgtctaacttggaatctactcattggctagaacatattaagcttattcttgcaggggctcttaggattgctgacaaggtagagtcagggaagacgtctgtggtagtgcattgcagtgatggttgggatcgcacagctcagctcacttcccttgccatgctcatgttggatggatactatcgaaccatccgaggatttgaagtccttgtggagaaagaatggctaagttttggacatcgatttcaactaagagttggccatggagataagaaccatgcagatgcagacagatcgcctgtttttcttcaatttattgactgtgtctggcagatgacaagacagtttcctaccgcatttgaattcaatgagtattttctcattaccattttggaccacctatacagctgcttattcggaacattcctctgtaatagtgaacaacagagaggaaaagagaatcttcctaaaaggactgtgtcactgtggtcttacataaacagccagctggaagacttcactaatcctctctatgggagctattccaatcatgtcctttatccagtagccagcatgcgccacctagagctctgggtgggatattacataaggtggaatccacggatgaaaccacaggaacctattcacaacagatacaaagaacttcttgctaaacgagcagagcttcagaaaaaagtagaggaactacagagagagatttctaaccgatcaacctcatcctcagagagagccagctctcctgcacagtgtgtcactcctgtccaaactgttgtataaaggactgtaagatcaggggcatcattgctatacactcttgattacactggcagctctatgagtagaaagtcttcggaatttagaacccatctatgagagaaagttcagtcactttatttattttaaatctctctaggatgagtttagaactgtagcagtgcaggtggcttaagtgaagtaactccatatgtaattacatgattatgatactaatcttttaagtatccaaagaatattaaaatacttcaatcctggattcacagtgggaacaagtttctattaaaaggcaaatgctgttacaaatttttggcatctggtaatattaaaaccattttagaaatacactctgtgctcactgtgcagaggaacatcagttttcaaaccaacactgaaattctgtggcatcacatatattgggccttgatgtcatgacagatcaaaatcatttgatatccctttctccattctaggtttttctttttttcagtaactgatttaccttgatcacttttcaacttccatattcttcatatagtaaaaggcaaagtgttgaagatactacggtgtggtagtagttgaaaattattgccgtcattatttacatacttaagacatattagcaagttgatccaaaatgggaggccttatagatgtgcttgggggaaaatgaaggggagaaagtagccatacaggagttcaaagaattccatgcccttcagattagcccaattaccagaaacatcatgaaagatattttaaaaactaattatttactacagtgtatttcacttgtcttgtgtgtctgaacacacagaagctaattagcaagtttttaagaagtatttaaaaatcttactaggattgacattttttctgaattctgtataaatagcttatagtgagaagtactgtgctcaaattttacatttttttcctttgcaaattctgtaatttcactcaacgattaagtctaccaaagaacacactgcatgtaaaagatgtattacaatctcaaagccagtaaaagaaatcttgcttcactgttcacctgctacaagtaagagtttggtgctggtagaaacatttgactctgatgtctattttattctacataagagccatatgtaatgtactgtaacaaaggagcttcttgtccccttggtcttttaattaaaagaaattccaactgacttttaaacttt

SEQ ID NO: 157112 - DNA, 2018 bp, Homo sapiens
  Payload ID: 10791
  Gene Symbol: MTMR2
  Gene Name: myotubularin related protein 2
  ENST ID: ENST00000444541
  CDS Start-End: 349-2018
attctggttttgaaatcattggatagacttggtgaaggaaagaaaaaacttttttttgtatccatgatattatttctacctggatttaagtttcatgcttacgaaaatgaggatctgatttcattttttgagtgaaatatgcctccacttctcattcagagaattcagtgcatacaaaatcagcttctgttgtatcatcagattccatttcaacttctgccgacaacttttctcctgatttgaggcccatgcagtccagttcgggagctaagtcacttaaacactgtgtgatagttcctacacatctcattatagtttgtcctgagggagtctaacaagttagcagaaatggaagaaccacccttgcttccaggagaaaatattaaagacatggccaaagatgtaacttatatatgtccattcactggcgctgtacgaggaactctgactgtcacgaattataggttatatttcaaaagcatggaacgggatcccccatttgttttagatgcttcccttggtgtgataaatagagtagaaaaaattggtggtgcttctagtcgaggtgaaaattcttatggactagaaactgtgtgtaaggatattaggaatttacgatttgctcataaacctgaggggcggacaagaagatccatatttgagaatctaatgaaatatgcatttcctgtctctaataacctgcctctttttgcttttgaatacaaagaagtattccctgaaaatgggtggaagctatatgaccctcttttagagtatagaaggcagggaattccaaatgaaagctggagaataacaaagataaatgaacgatatgaactttgtgatacataccctgccctcctggttgtgccagcaaatattcctgatgaagaattaaagagagtggcatccttcagatcaagaggccgtatcccagttttatcatggattcatcctgaaagtcaagccacaatcactcggtgtagccagcccatggttggagtgagtggaaagcgaagcaaagaagatgaaaaataccttcaagctatcatggattccaatgcccagtctcacaaaatctttatatttgatgcccggccaagtgttaatgctgttgccaacaaggcaaagggtggaggttatgaaagtgaagatgcctatcaaaatgctgaactagttttcctggatatccacaatattcatgttatgagagaatcattacgaaaacttaaggagattgtgtaccccaacattgaggaaacccactggttgtctaacttggaatctactcattggctagaacatattaagcttattcttgcaggggctcttaggattgctgacaaggtagagtcagggaagacgtctgtggtagtgcattgcagtgatggttgggatcgcacagctcagctcacttcccttgccatgctcatgttggatggatactatcgaaccatccgaggatttgaagtccttgtggagaaagaatggctaagttttggacatcgatttcaactaagagttggccatggagataagaaccatgcagatgcagacagatcgcctgtttttcttcaatttattgactgtgtctggcagatgacaagacagtttcctaccgcatttgaattcaatgagtattttctcattaccattttggaccacctatacagctgcttattcggaacattcctctgtaatagtgaacaacagagaggaaaagagaatcttcctaaaaggactgtgtcactgtggtcttacataaacagccagctggaagacttcactaatcctctctatgggagctattccaatcatgtcctttatccagtagccagcatgcgccacctagagctctgggtgggatattacataaggtggaatccacggatgaaaccacaggaacctattcacaacagatacaaagaacttcttgctaaacgagcagagcttcagaaaaaagtagaggaactacagagagagatttctaaccgatcaacctcatcctcagagagagc

SEQ ID NO: 157113 - DNA, 4464 bp, Homo sapiens
  Payload ID: 10792
  Gene Symbol: MTMR3
  Gene Name: myotubularin related protein 3
  Uniprot ID: Q13615
  ENST ID: ENST00000351488
  CDS Start-End: 285-3770
agaaggcggcggcggcggcggagtagcagccggacgagacgtcccagcggctcaggcgctgcccagcgccggccctggcagggagcctggtggggtggcggagggggagactgtgccgtggagggcctcgccatgtcctgctgcccgacttccttgtgaaacctcctagtagaaaaagttcttgggacaaacttcatttgacttcaccataagggaaagaagagagccttgttggacactgaagaagggacggggatttctcctcctaatctgggcctcttgtcatggatgaagagactcggcacagccttgagtgcatccaggccaatcagatctttcccaggaagcagctgatccgggaggatgagaatcttcaggttcctttccttgaacttcatggagagagcacagagtttgtgggccgtgccgaggatgccatcattgccctttccaattacagacttcacatcaagttcaaggagtctcttgttaatgttccattacagcttatagaaagtgttgaatgccgagatatatttcagcttcatttgacttgcaaagactgcaaagttatcaggtgtcagttttcaacctttgagcagtgtcaagagtggctgaagagactgaacaacgcaatccgaccacctgctaaaatagaagatctcttctcatttgcataccatgcttggtgcatggaggtctatgccagtgaaaaagagcaacatggagacctgtgcagaccaggggagcatgtaacttcaaggtttaaaaacgaggtggagaggatgggttttgatatgaacaacgcctggaggatttccaacatcaatgagaagtacaaattatgtggtagctatcctcaagagctcatagtgcctgcctggatcactgacaaagaactggaaagtgtatcaagtttcaggtcctggaagcgcatccctgccgtcatctacaggcaccagagcaatggagctgtcattgcccgctgtggacagccagaggttagctggtggggctggcgaaatgcagatgatgagcatctggtacagtcagtagccaaagcttgtgcctctgactcccgatcgagtggcagcaagctgtcaactaggaacacttctcgagactttcccaatgggggagacctttctgacgtggagttcgattcttctctgtcaaatgcttcaggagcagagagtttagccatccaaccgcagaagcttttgatcttggatgcacgctcctatgcagctgctgtggcaaaccgagccaaaggaggaggctgcgaatgcccagagtattacccaaactgtgaagttgtgtttatggggatggcaaacattcattctattcggaggagttttcagtctctgcggttgctgtgcactcagatgccagatccgggaaattggctatcagctcttgaaagcacaaaatggctccatcacttgtctgtgcttctgaaatcagcgcttctggtagtgcatgctgtggatcaggatcagcggccggtgctagtacactgctcagatggctgggaccgcaccccccagattgtggcattggctaagctcttgctggacccttattaccgaaccatagagggtttccaggtcctcgtggaaatggagtggctggattttggccataaatttgctgaccggtgtggtcatggggagaactcggatgatctgaatgaacgttgcccagtgtttctgcagtggcttgactgtgttcatcagcttcagaggcaatttccttgctcttttgagttcaatgaagcattccttgtgaaactggtgcagcatacctattcctgcctgtttggaacattcctgtgcaacaacgccaaggagagaggggaaaagcatactcaggaacggacatgttccgtgtggtcacttcttcgggcaggcaacaaggctttcaaaaacctactgtattcctctcagtcagaagccgtgctgtaccctgtgtgccatgtgcgtaacctgatgctgtggagtgcagtgtacctgccctgcccatccccaaccacccctgtggacgacagctgtgcaccatacccagccccaggcaccagccctgatgatccccccctgagccggctaccaaagactagatcatacgacaatctgaccacagcctgtgacaacacagtgcctctggccagccggcgctgcagcgaccccagcctgaacgagaagtggcaggagcaccggcgctcactagagctgagcagcctggctggccctggagaggatcccctttctgccgacagcctagggaagcccaccagagtgccggggggtgccgagctttctgttgcagccggagtagctgaggggcagatggagaacatcttgcaggaggccaccaaagaggagagtggagtagaggaacctgcccacagggcaggcattgagatacaggagggtaaagaggaccctctcttagaaaaggagagcaggaggaagacacctgaggcctcagccattggacttcaccaagacccagaactgggtgatgctgctctgaggagccatctggatatgagctggcctctgttctcacagggcatttctgaacagcagagtgggctcagtgttctcctcagttctctccaggtcccccccaggggagaggattccctggaggtccctgtggagcagtttcgaatagaagagattgcagagggtagggaggaagcagttcttccaatcccagtagatgcaaaagttggctatggtacctcacagtcatgttctctgctaccttcccaagtcccttttgagaccagaggaccaaacgtggacagttctacagacatgttagtggaagataaggtgaagtcagtaagtgggccccaaggtcatcatagatcttgccttgtaaatagtggcaaggacaggcttcctcagaccatggaacccagcccttcagagacaagcctggtcgagaggccccaagtggggtctgtggtgcataggacttcccttggcagcactctcagcctgacacgttccccttgtgccttgcctttagccgaatgtaaagaggggcttgtgtgcaatggtgccccagagactgaaaacagggcctcagagcagcccccaggtcttagcaccctccagatgtaccccacacccaatgggcattgcgccaatggggaggctggtaggagcaaggactcactgagccgtcagctgtctgctatgagctgcagctctgcccacttacactcaaggaacttgcaccacaagtggctgcatagccactcaggaaggccatctgcaaccagcagccccgaccagccttcccgcagccacctggacgatgatggcatgtcagtgtacacagacacgatccaacagcgcctgcgtcagattgagtcaggccaccagcaggaagtagaaactttgaagaaacaagtccaggagctgaagagtcgcctggagagccagtacctgaccagctccctacactttaatggagactttggggatgaggtgatgacccgttggcttcctgaccacctggccgcccactgctatgcgtgcgacagtgccttctggcttgccagcaggaagcaccactgcaggaattgtgggaacgtattctgctccagttgttgtaaccagaaggttccagttcccagccagcagctctttgaacccagtcgagtatgcaagtcttgctatagcagcctacatcccacaagctccagcattgaccttgaactggataagcccattgctgccacttccaactgaagctcagtgacctgggtgggcagtggccaagctgctgttcctatgacaggcccactcaacctgggcagaccgagaggcccgtgcactttggaatgggagcgtggaaccacctgtacagagtgacagatttgggatgcaccactggattgtagattgatttttctttcctgtccccctactccctccctaccttttccatcctcctcctctgccttcaaaaaaggaaactttcccttggttgtcttaattttttttttttttgatggaagaccaagggttgccaggcccactgtaactgccgagctgcctgctgtcacgtgacactgagggatggcttgtttcttccgggtgggaggatggtggtcagagccaggagtatggagatctgagaccgtgagcagggaagaaagccagtgctaacatgcaaccattcctcacgccaccgccacatcagagctggttgggaaccctttgctgctggggaggctggaagcatattccccaagagcactgccctgggcatcatctccctcctgcgaggagctgagccagtcccctcacagatggataaatgaggctgatgtttggagggagaggcacacggtaaatggcatccccttaggcgcctctttgggaaaggaaagtggatgctcctttgaggcaggcgaggggctgggagtgggtagccgtcatg

SEQ ID NO: 157114 - DNA, 5866 bp, Homo sapiens
  Payload ID: 10792
  Gene Symbol: MTMR3
  Gene Name: myotubularin related protein 3
  ENST ID: ENST00000323630
  CDS Start-End: 621-3809
gttgttgtggttgtgagaaggcggcggcggcggcggagtagcagccggacgagacgtcccagcggctcaggcgctgcccagcgccggccctggcagggagcctggtggggtggcggagggggagactgtgccgtggagggcctcgccatgtcctgctgcccgacttccttgtgaaacctcctagtagaaaaagttcttgggacaaacttcatttggatgaagagactcggcacagccttgagtgcatccaggccaatcagatctttcccaggaagcagctgatccgggaggatgagaatcttcaggttcctttccttgaacttcatggagagagcacagagtttgtgggccgtgccgaggatgccatcattgccctttccaattacagacttcacatcaagttcaaggagtctcttgttaatgttccattacagcttatagaaagtgttgaatgccgagatatatttcagcttcatttgacttgcaaagactgcaaagttatcaggtgtcagttttcaacctttgagcagtgtcaagagtggctgaagagactgaacaacgcaatccgaccacctgctaaaatagaagatctcttctcatttgcataccatgcttggtgcatggaggtctatgccagtgaaaaagagcaacatggagacctgtgcagaccaggggagcatgtaacttcaaggtttaaaaacgaggtggagaggatgggttttgatatgaacaacgcctggaggatttccaacatcaatgagaagtacaaattatgtggtagctatcctcaagagctcatagtgcctgcctggatcactgacaaagaactggaaagtgtatcaagtttcaggtcctggaagcgcatccctgccgtcatctacaggcaccagagcaatggagctgtcattgcccgctgtggacagccagaggttagctggtggggctggcgaaatgcagatgatgagcatctggtacagtcagtagccaaagcttgtgcctctgactcccgatcgagtggcagcaagctgtcaactaggaacacttctcgagactttcccaatgggggagacctttctgacgtggagttcgattcttctctgtcaaatgcttcaggagcagagagtttagccatccaaccgcagaagcttttgatcttggatgcacgctcctatgcagctgctgtggcaaaccgagccaaaggaggaggctgcgaatgcccagagtattacccaaactgtgaagttgtgtttatggggatggcaaacattcattctattcggaggagttttcagtctctgcggttgctgtgcactcagatgccagatccgggaaattggctatcagctcttgaaagcacaaaatggctccatcacttgtctgtgcttctgaaatcagcgcttctggtagtgcatgctgtggatcaggatcagcggccggtgctagtacactgctcagatggctgggaccgcaccccccagattgtggcattggctaagctcttgctggacccttattaccgaaccatagagggtttccaggtcctcgtggaaatggagtggctggattttggccataaatttgctgaccggtgtggtcatggggagaactcggatgatctgaatgaacgttgcccagtgtttctgcagtggcttgactgtgttcatcagcttcagaggcaatttccttgctcttttgagttcaatgaagcattccttgtgaaactggtgcagcatacctattcctgcctgtttggaacattcctgtgcaacaacgccaaggagagaggggaaaagcatactcaggaacggacatgttccgtgtggtcacttcttcgggcaggcaacaaggctttcaaaaacctactgtattcctctcagtcagaagccgtgctgtaccctgtgtgccatgtgcgtaacctgatgctgtggagtgcagtgtacctgccctgcccatccccaaccacccctgtggacgacagctgtgcaccatacccagccccaggcaccagccctgatgatccccccctgagccggctaccaaagactagatcatacgacaatctgaccacagcctgtgacaacacagtgcctctggccagccggcgctgcagcgaccccagcctgaacgagaagtggcaggagcaccggcgctcactagagctgagcagcctggctggccctggagaggatcccctttctgccgacagcctagggaagcccaccagagtgccggggggtgccgagctttctgttgcagccggagtagctgaggggcagatggagaacatcttgcaggaggccaccaaagaggagagtggagtagaggaacctgcccacagggcaggcattgagatacaggagggtaaagaggaccctctcttagaaaaggagagcaggaggaagacacctgaggcctcagccattggacttcaccaagacccagaactgggtgatgctgctctgaggagccatctggatatgagctggcctctgttctcacagggcatttctgaacagcagagtgggctcagtgttctcctcagttctctccaggtcccccccaggggagaggattccctggaggtccctgtggagcagtttcgaatagaagagattgcagagggtagggaggaagcagttcttccaatcccagtagatgcaaaagttggctatggtacctcacagtcatgttctctgctaccttcccaagtcccttttgagaccagaggaccaaacgtggacagttctacagacatgttagtggaagataaggtgaagtcagtaagtgggccccaaggtcatcatagatcttgccttgtaaatagtggcaaggacaggcttcctcagaccatggaacccagcccttcagagacaagcctggtcgagaggccccaagtggggtctgtggtgcataggacttcccttggcagcactctcagcctgacacgttccccttgtgccttgcctttagccgaatgtaaagaggggcttgtgtgcaatggtgccccagagactgaaaacagggcctcagagcagcccccaggtcttagcaccctccagatgtaccccacacccaatgggcattgcgccaatggggaggctggtaggagcaaggactcactgagccgtcagctgtctgctatgagctgcagctctgcccacttacactcaaggaacttgcaccacaagtggctgcatagccactcaggaaggccatctgcaaccagcagccccgaccagccttcccgcagccacctggacgatgatggcatgtcagtgtacacagacacgatccaacagcgcctgcgtcagattgagtcaggccaccagcaggaagtagaaactttgaagaaacaagtccaggagctgaagagtcgcctggagagccagtacctgaccagctccctacactttaatggagactttggggatgaggtgacttcaatccccgactcggaaagcaatctggatcagaactgtttgtctcgctgcagcacagagattttctctgaagccagctgggagcaggtggataaacaggacacagagatgacccgttggcttcctgaccacctggccgcccactgctatgcgtgcgacagtgccttctggcttgccagcaggaagcaccactgcaggaattgtgggaacgtattctgctccagttgttgtaaccagaaggttccagttcccagccagcagctctttgaacccagtcgagtatgcaagtcttgctatagcagcctacatcccacaagctccagcattgaccttgaactggataagcccattgctgccacttccaactgaagctcagtgacctgggtgggcagtggccaagctgctgttcctatgacaggcccactcaacctgggcagaccgagaggcccgtgcactttggaatgggagcgtggaaccacctgtacagagtgacagatttgggatgcaccactggattgtagattgatttttctttcctgtccccctactccctccctaccttttccatcctcctcctctgccttcaaaaaaggaaactttcccttggttgtcttaattttttttttttttgatggaagaccaagggttgccaggcccactgtaactgccgagctgcctgctgtcacgtgacactgagggatggcttgtttcttccgggtgggaggatggtggtcagagccaggagtatggagatctgagaccgtgagcagggaagaaagccagtgctaacatgcaaccattcctcacgccaccgccacatcagagctggttgggaaccctttgctgctggggaggctggaagcatattccccaagagcactgccctgggcatcatctccctcctgcgaggagctgagccagtcccctcacagatggataaatgaggctgatgtttggagggagaggcacacggtaaatggcatccccttaggcgcctctttgggaaaggaaagtggatgctcctttgaggcaggcgaggggctgggagtgggtagccgtcatgttgtcccccgtgggatcccatttttaacttgacccagattgtcttgggctccttttactttcagggggctgctttcctgggccaggctgtgtagcacttcccaccctcaggcatgagtacagactggtcaaaatgtttatgcagtcaaggccaaagcctgccctgagcccagacacacctgggtccccattctggggcctggtcccctaaacaatctcttcctcagccagcacagggaaatccagactcagggttccagaaatcccccgttcccaaaccaaaccaatcatggatcttccctttaaggggtagaatcagcctttagagttacaagcccctggaaaagggagcaggtcccatacaatcagcctttctcctcttctcttcttgggacaggaataactgctgagcagtccccctttgccactcctggctgtctgagtgggcacttgtctggctgctggccagcagtgaagggccacttggtgacttcgtagggttccttagagaagtgacatggccttgaggagattcagggcacctttcctcagtgagctttgatatggtccaaaaacagccttaaatcaagaatatttgtggaggtaggtgtggggaaggttggagaagagttaggtttgtgctttgtaatcttggcatccatgttttgtgcctgccctccctcttggggaggccatgcttgactctgctgaaagctgctaactggtgacagggtggatcatggtgaggactaggggtaaggtcagggaatgcttaagctctggccctgccctgtattcctcttccccttggtagcagttccctgaccaagggcaaggtgtgtctcaggaaggtggttctgtgcatgcctgggtgtggttaaggcgtggcccagaaggcttccctggtgctctcagtccaggcaaagcccagagcatctgagcacgtctctgacttccagtggcaacacagtttgaacgtggtgaaacagggtgtagttcttttccacattctgtgtcatctagtcgtgcaggtagggaaaaagttggtctaattgaagattgtgcatttcctagtgacaggtgccaagaggttatgatacgggtttcttgggtctgatgtacagtgtgaataaatgcttgcagctcttagctcttttttgatcgatgaagcacttttttattaatattttcctttgttaaaggaggaaccgtaactctccatagctgtacatataacccttttctcctaaagaggagtcagtcagtgctcctatatttttcattttttgtcaaagcaagaagtaaatactttagaattgttaaatatataaataaagcaaataaagttgagtgttccacatggt

SEQ ID NO: 157115 - DNA, 8906 bp, Homo sapiens
  Payload ID: 10792
  Gene Symbol: MTMR3
  Gene Name: myotubularin related protein 3
  Uniprot ID: Q13615
  ENST ID: ENST00000333027
  CDS Start-End: 329-3841
agcgcgctctgtgtggccgctgccgccatgttgttgtggttgtgagaaggcggcggcggcggcggagtagcagccggacgagacgtcccagcggctcaggcgctgcccagcgccggccctggcagggagcctggtggggtggcggagggggagactgtgccgtggagggcctcgccatgtcctgctgcccgacttccttgtgaaacctcctagtagaaaaagttcttgggacaaacttcatttgacttcaccataagggaaagaagagagccttgttggacactgaagaagggacggggatttctcctcctaatctgggcctcttgtcatggatgaagagactcggcacagccttgagtgcatccaggccaatcagatctttcccaggaagcagctgatccgggaggatgagaatcttcaggttcctttccttgaacttcatggagagagcacagagtttgtgggccgtgccgaggatgccatcattgccctttccaattacagacttcacatcaagttcaaggagtctcttgttaatgttccattacagcttatagaaagtgttgaatgccgagatatatttcagcttcatttgacttgcaaagactgcaaagttatcaggtgtcagttttcaacctttgagcagtgtcaagagtggctgaagagactgaacaacgcaatccgaccacctgctaaaatagaagatctcttctcatttgcataccatgcttggtgcatggaggtctatgccagtgaaaaagagcaacatggagacctgtgcagaccaggggagcatgtaacttcaaggtttaaaaacgaggtggagaggatgggttttgatatgaacaacgcctggaggatttccaacatcaatgagaagtacaaattatgtggtagctatcctcaagagctcatagtgcctgcctggatcactgacaaagaactggaaagtgtatcaagtttcaggtcctggaagcgcatccctgccgtcatctacaggcaccagagcaatggagctgtcattgcccgctgtggacagccagaggttagctggtggggctggcgaaatgcagatgatgagcatctggtacagtcagtagccaaagcttgtgcctctgactcccgatcgagtggcagcaagctgtcaactaggaacacttctcgagactttcccaatgggggagacctttctgacgtggagttcgattcttctctgtcaaatgcttcaggagcagagagtttagccatccaaccgcagaagcttttgatcttggatgcacgctcctatgcagctgctgtggcaaaccgagccaaaggaggaggctgcgaatgcccagagtattacccaaactgtgaagttgtgtttatggggatggcaaacattcattctattcggaggagttttcagtctctgcggttgctgtgcactcagatgccagatccgggaaattggctatcagctcttgaaagcacaaaatggctccatcacttgtctgtgcttctgaaatcagcgcttctggtagtgcatgctgtggatcaggatcagcggccggtgctagtacactgctcagatggctgggaccgcaccccccagattgtggcattggctaagctcttgctggacccttattaccgaaccatagagggtttccaggtcctcgtggaaatggagtggctggattttggccataaatttgctgaccggtgtggtcatggggagaactcggatgatctgaatgaacgttgcccagtgtttctgcagtggcttgactgtgttcatcagcttcagaggcaatttccttgctcttttgagttcaatgaagcattccttgtgaaactggtgcagcatacctattcctgcctgtttggaacattcctgtgcaacaacgccaaggagagaggggaaaagcatactcaggaacggacatgttccgtgtggtcacttcttcgggcaggcaacaaggctttcaaaaacctactgtattcctctcagtcagaagccgtgctgtaccctgtgtgccatgtgcgtaacctgatgctgtggagtgcagtgtacctgccctgcccatccccaaccacccctgtggacgacagctgtgcaccatacccagccccaggcaccagccctgatgatccccccctgagccggctaccaaagactagatcatacgacaatctgaccacagcctgtgacaacacagtgcctctggccagccggcgctgcagcgaccccagcctgaacgagaagtggcaggagcaccggcgctcactagagctgagcagcctggctggccctggagaggatcccctttctgccgacagcctagggaagcccaccagagtgccggggggtgccgagctttctgttgcagccggagtagctgaggggcagatggagaacatcttgcaggaggccaccaaagaggagagtggagtagaggaacctgcccacagggcaggcattgagatacaggagggtaaagaggaccctctcttagaaaaggagagcaggaggaagacacctgaggcctcagccattggacttcaccaagacccagaactgggtgatgctgctctgaggagccatctggatatgagctggcctctgttctcacagggcatttctgaacagcagagtgggctcagtgttctcctcagttctctccaggtcccccccaggggagaggattccctggaggtccctgtggagcagtttcgaatagaagagattgcagagggtagggaggaagcagttcttccaatcccagtagatgcaaaagttggctatggtacctcacagtcatgttctctgctaccttcccaagtcccttttgagaccagaggaccaaacgtggacagttctacagacatgttagtggaagataaggtgaagtcagtaagtgggccccaaggtcatcatagatcttgccttgtaaatagtggcaaggacaggcttcctcagaccatggaacccagcccttcagagacaagcctggtcgagaggccccaagtggggtctgtggtgcataggacttcccttggcagcactctcagcctgacacgttccccttgtgccttgcctttagccgaatgtaaagaggggcttgtgtgcaatggtgccccagagactgaaaacagggcctcagagcagcccccaggtcttagcaccctccagatgtaccccacacccaatgggcattgcgccaatggggaggctggtaggagcaaggactcactgagccgtcagctgtctgctatgagctgcagctctgcccacttacactcaaggaacttgcaccacaagtggctgcatagccactcaggaaggccatctgcaaccagcagccccgaccagccttcccgcagccacctggacgatgatggcatgtcagtgtacacagacacgatccaacagcgcctgcgtcagattgagtcaggccaccagcaggaagtagaaactttgaagaaacaagtccaggagctgaagagtcgcctggagagccagtacctgaccagctccctacactttaatggagactttggggatgaggtgatgacccgttggcttcctgaccacctggccgcccactgctatgcgtgcgacagtgccttctggcttgccagcaggaagcaccactgcagggacactgaccgtgttgatcaaacgtggaattgtgggaacgtattctgctccagttgttgtaaccagaaggttccagttcccagccagcagctctttgaacccagtcgagtatgcaagtcttgctatagcagcctacatcccacaagctccagcattgaccttgaactggataagcccattgctgccacttccaactgaagctcagtgacctgggtgggcagtggccaagctgctgttcctatgacaggcccactcaacctgggcagaccgagaggcccgtgcactttggaatgggagcgtggaaccacctgtacagagtgacagatttgggatgcaccactggattgtagattgatttttctttcctgtccccctactccctccctaccttttccatcctcctcctctgccttcaaaaaaggaaactttcccttggttgtcttaattttttttttttttgatggaagaccaagggttgccaggcccactgtaactgccgagctgcctgctgtcacgtgacactgagggatggcttgtttcttccgggtgggaggatggtggtcagagccaggagtatggagatctgagaccgtgagcagggaagaaagccagtgctaacatgcaaccattcctcacgccaccgccacatcagagctggttgggaaccctttgctgctggggaggctggaagcatattccccaagagcactgccctgggcatcatctccctcctgcgaggagctgagccagtcccctcacagatggataaatgaggctgatgtttggagggagaggcacacggtaaatggcatccccttaggcgcctctttgggaaaggaaagtggatgctcctttgaggcaggcgaggggctgggagtgggtagccgtcatgttgtcccccgtgggatcccatttttaacttgacccagattgtcttgggctccttttactttcagggggctgctttcctgggccaggctgtgtagcacttcccaccctcaggcatgagtacagactggtcaaaatgtttatgcagtcaaggccaaagcctgccctgagcccagacacacctgggtccccattctggggcctggtcccctaaacaatctcttcctcagccagcacagggaaatccagactcagggttccagaaatcccccgttcccaaaccaaaccaatcatggatcttccctttaaggggtagaatcagcctttagagttacaagcccctggaaaagggagcaggtcccatacaatcagcctttctcctcttctcttcttgggacaggaataactgctgagcagtccccctttgccactcctggctgtctgagtgggcacttgtctggctgctggccagcagtgaagggccacttggtgacttcgtagggttccttagagaagtgacatggccttgaggagattcagggcacctttcctcagtgagctttgatatggtccaaaaacagccttaaatcaagaatatttgtggaggtaggtgtggggaaggttggagaagagttaggtttgtgctttgtaatcttggcatccatgttttgtgcctgccctccctcttggggaggccatgcttgactctgctgaaagctgctaactggtgacagggtggatcatggtgaggactaggggtaaggtcagggaatgcttaagctctggccctgccctgtattcctcttccccttggtagcagttccctgaccaagggcaaggtgtgtctcaggaaggtggttctgtgcatgcctgggtgtggttaaggcgtggcccagaaggcttccctggtgctctcagtccaggcaaagcccagagcatctgagcacgtctctgacttccagtggcaacacagtttgaacgtggtgaaacagggtgtagttcttttccacattctgtgtcatctagtcgtgcaggtagggaaaaagttggtctaattgaagattgtgcatttcctagtgacaggtgccaagaggttatgatacgggtttcttgggtctgatgtacagtgtgaataaatgcttgcagctcttagctcttttttgatcgatgaagcacttttttattaatattttcctttgttaaaggaggaaccgtaactctccatagctgtacatataacccttttctcctaaagaggagtcagtcagtgctcctatatttttcattttttgtcaaagcaagaagtaaatactttagaattgttaaatatataaataaagcaaataaagttgagtgttccacatggtagcatttgctaacacttcctaattctttgccctgtggtttatcccctcttcgtcccttttccctctcacacagaagtgtttgagggcctgctgggaaactgacctttggcaaaggaaagctacagatagccttccgactctagaccttggcaaggagcctcaccatgatgttcaagcactgaacgcatttcctcagtgattttgctcctaaaatctcccaggctaaaagagggcaaagcagtcagggatctgacctggcagctattcctccttctctgaagagttcccatcagtagtcattacaactacctctcgcctcaaggctccatttttagctgctgctctgatttcagggcagccagtactctggccccttcagtcggggagtggaaggagatgtggggtgggggtgagaaaatgcttctgcctgttgttcttgaaggatagactatgggtgggcagagagaactgggggcagaaatggaattagatgtgattgggttatgcagtcaactagaggtctccttcccgccctctctccacacagagaggaacctctgctccttagctcttacagcaggactgtggcatctagtcacttcaatactagttcttgctcttcacagaggtagatttttctttaccctacagcactgttgggcatccctcccatcacatgggtctgtgggtgagatatgttatgctgttcctccctcgggaaggttggtattgaggggtgccttgctccagaggcgccagcccagcatctgtggtgagttggctaagatccagagtgacctgctcagagctccccagaggccttcactctttggggcagtctctctagggtcactttctgaatgtaccttctacctaaagtatacaaacacaaagagccagctgagctggttctagtgtgaaagccgtaagtgccacccagcaggcgtttgaaaacaagaaatcattcttctgtggaaggagaatgtgccatctcagctaccctcagtccgccaggcagcccagtctgtgtattcatatgaagttgtgaaaaccatgagtgtgtgccatggccatcgtgtctacacacagccactattgttcctgtgggctagtctccagcaaattaaaacactggcatggcctaggaagggcgttgcgagctcctaaatggaaagcttctctgggggtagggagatgaagagccaagatgctggtgaagcaggtgcagtgaggatccaaggcaaggaattgccctgagggaggtggctgcatatggagaaaggcagttctctgtgggcaaggccagcttgcttcaggctgtagagggaatttggtctgaagcaacagggcatgaactgtgactttgagctgccaggttgtcttcatctcagaactttcctatcctggcactctcgttacctttcttctataccttggcctctgtaactgcagtccaaaacaagttacagctgccttaatccactgagattctctatgaggatgtacagaaaagttttcctgtaataattttgcttatatgctaactcttttcatgttagcaaagaatattctatgaattagaatgttactgtggtagatctaaaggagaatgaacagaaggtgctggaggacctgttaaacaatctctggctattaaaaaacatcaagatgagaattaaaggcatatcctgatatacttgcctgcttgcacatgaggctgggagatcccatgcctgttgaagttaactctagccctgacctctattgatcttttgggaatgagggctgatttgaaggtgctgttgcaggatttcatttagctgctgccagttcaagtgacctgtccccagggctgcagctgtatccacctgattgcagtaggtgagggctaacagcagaatttaaagtggaccctgggctgtggagcaaagtgactatccatttggacttttggataatgtggcaggagtcccagctgtttaatttctagtcacattttccagaaagttgttctaagttgagattactgacaagatttctcaagggcaggaccagatatgtgagagacttctagttcagagctgacccctctaagcctctgacacttaaacacgagtcctgctgtccccagcacacaactgcactgaagccttgttcctctcggctggtgtagagctcatctgcatgttgtgtgcagataccagtagcctccctgcttgaacaggcctctcctaggctaggcaggtgttcagaggcatgaaggtctgggcaggggaagggcgtcttctgaaatgggagttaccaggtttttaaatgctgctattgttttatttaccatttaaggtcttttctattatatctgagtaactagtcagtttttcttacagtgctcatagcagttgtatttgaattgtattttcagtgaaatttgttttacattgccatttaaaattggcctttaacagcttcccaactagcttataagatttttttttttaatgaaaacataacccatgaggctcagatgctgttgaagaaataaatggtatgttgctgctgacagtagtgcttgcctattgtaacagcattggttctgctgtagcctcggtgaccatttaagttgaataaatctgtcattttcacccacaaacagttgttgagcccctggatttgggttgtcactgtggttctcctgccagtgctataatccagtgtcgtaggtgcagggtatgaatcagctcagcctcttaggagagaggggctctcagcgaggagggggcggggggggggtcactatttatcttccagaggcagggttcatggattcctgatgtttagaggcggaagggaccttaggtcacctacttccacggttttcatactgttctctggggcctcgtggagagggagcctccaggcccattcaaagctttattagatttaaaagtaagatctggtatgaagaaaggttttgtttgtttcttaaaataaaaagtctgaaaatcact

SEQ ID NO: 157116 - DNA, 3758 bp, Homo sapiens
  Payload ID: 10792
  Gene Symbol: MTMR3
  Gene Name: myotubularin related protein 3
  Uniprot ID: Q13615
  ENST ID: ENST00000406629
  CDS Start-End: 10-3522
cctcttgtcatggatgaagagactcggcacagccttgagtgcatccaggccaatcagatctttcccaggaagcagctgatccgggaggatgagaatcttcaggttcctttccttgaacttcatggagagagcacagagtttgtgggccgtgccgaggatgccatcattgccctttccaattacagacttcacatcaagttcaaggagtctcttgttaatgttccattacagcttatagaaagtgttgaatgccgagatatatttcagcttcatttgacttgcaaagactgcaaagttatcaggtgtcagttttcaacctttgagcagtgtcaagagtggctgaagagactgaacaacgcaatccgaccacctgctaaaatagaagatctcttctcatttgcataccatgcttggtgcatggaggtctatgccagtgaaaaagagcaacatggagacctgtgcagaccaggggagcatgtaacttcaaggtttaaaaacgaggtggagaggatgggttttgatatgaacaacgcctggaggatttccaacatcaatgagaagtacaaattatgtggtagctatcctcaagagctcatagtgcctgcctggatcactgacaaagaactggaaagtgtatcaagtttcaggtcctggaagcgcatccctgccgtcatctacaggcaccagagcaatggagctgtcattgcccgctgtggacagccagaggttagctggtggggctggcgaaatgcagatgatgagcatctggtacagtcagtagccaaagcttgtgcctctgactcccgatcgagtggcagcaagctgtcaactaggaacacttctcgagactttcccaatgggggagacctttctgacgtggagttcgattcttctctgtcaaatgcttcaggagcagagagtttagccatccaaccgcagaagcttttgatcttggatgcacgctcctatgcagctgctgtggcaaaccgagccaaaggaggaggctgcgaatgcccagagtattacccaaactgtgaagttgtgtttatggggatggcaaacattcattctattcggaggagttttcagtctctgcggttgctgtgcactcagatgccagatccgggaaattggctatcagctcttgaaagcacaaaatggctccatcacttgtctgtgcttctgaaatcagcgcttctggtagtgcatgctgtggatcaggatcagcggccggtgctagtacactgctcagatggctgggaccgcaccccccagattgtggcattggctaagctcttgctggacccttattaccgaaccatagagggtttccaggtcctcgtggaaatggagtggctggattttggccataaatttgctgaccggtgtggtcatggggagaactcggatgatctgaatgaacgttgcccagtgtttctgcagtggcttgactgtgttcatcagcttcagaggcaatttccttgctcttttgagttcaatgaagcattccttgtgaaactggtgcagcatacctattcctgcctgtttggaacattcctgtgcaacaacgccaaggagagaggggaaaagcatactcaggaacggacatgttccgtgtggtcacttcttcgggcaggcaacaaggctttcaaaaacctactgtattcctctcagtcagaagccgtgctgtaccctgtgtgccatgtgcgtaacctgatgctgtggagtgcagtgtacctgccctgcccatccccaaccacccctgtggacgacagctgtgcaccatacccagccccaggcaccagccctgatgatccccccctgagccggctaccaaagactagatcatacgacaatctgaccacagcctgtgacaacacagtgcctctggccagccggcgctgcagcgaccccagcctgaacgagaagtggcaggagcaccggcgctcactagagctgagcagcctggctggccctggagaggatcccctttctgccgacagcctagggaagcccaccagagtgccggggggtgccgagctttctgttgcagccggagtagctgaggggcagatggagaacatcttgcaggaggccaccaaagaggagagtggagtagaggaacctgcccacagggcaggcattgagatacaggagggtaaagaggaccctctcttagaaaaggagagcaggaggaagacacctgaggcctcagccattggacttcaccaagacccagaactgggtgatgctgctctgaggagccatctggatatgagctggcctctgttctcacagggcatttctgaacagcagagtgggctcagtgttctcctcagttctctccaggtcccccccaggggagaggattccctggaggtccctgtggagcagtttcgaatagaagagattgcagagggtagggaggaagcagttcttccaatcccagtagatgcaaaagttggctatggtacctcacagtcatgttctctgctaccttcccaagtcccttttgagaccagaggaccaaacgtggacagttctacagacatgttagtggaagataaggtgaagtcagtaagtgggccccaaggtcatcatagatcttgccttgtaaatagtggcaaggacaggcttcctcagaccatggaacccagcccttcagagacaagcctggtcgagaggccccaagtggggtctgtggtgcataggacttcccttggcagcactctcagcctgacacgttccccttgtgccttgcctttagccgaatgtaaagaggggcttgtgtgcaatggtgccccagagactgaaaacagggcctcagagcagcccccaggtcttagcaccctccagatgtaccccacacccaatgggcattgcgccaatggggaggctggtaggagcaaggactcactgagccgtcagctgtctgctatgagctgcagctctgcccacttacactcaaggaacttgcaccacaagtggctgcatagccactcaggaaggccatctgcaaccagcagccccgaccagccttcccgcagccacctggacgatgatggcatgtcagtgtacacagacacgatccaacagcgcctgcgtcagattgagtcaggccaccagcaggaagtagaaactttgaagaaacaagtccaggagctgaagagtcgcctggagagccagtacctgaccagctccctacactttaatggagactttggggatgaggtgatgacccgttggcttcctgaccacctggccgcccactgctatgcgtgcgacagtgccttctggcttgccagcaggaagcaccactgcagggacactgaccgtgttgatcaaacgtggaattgtgggaacgtattctgctccagttgttgtaaccagaaggttccagttcccagccagcagctctttgaacccagtcgagtatgcaagtcttgctatagcagcctacatcccacaagctccagcattgaccttgaactggataagcccattgctgccacttccaactgaagctcagtgacctgggtgggcagtggccaagctgctgttcctatgacaggcccactcaacctgggcagaccgagaggcccgtgcactttggaatgggagcgtggaaccacctgtacagagtgacagatttgggatgcaccactggattgtagattgatttttctttcctgtccccctactccctccctaccttttccatcctcctcctctgccttcaaaaaaggaaactttccctt

SEQ ID NO: 157117 - DNA, 6018 bp, Homo sapiens
  Payload ID: 10792
  Gene Symbol: MTMR3
  Gene Name: myotubularin related protein 3
  Uniprot ID: Q13615
  ENST ID: ENST00000401950
  CDS Start-End: 343-3939
ggctcggcgtcgggagcgcgctctgtgtggccgctgccgccatgttgttgtggttgtgagaaggcggcggcggcggcggagtagcagccggacgagacgtcccagcggctcaggcgctgcccagcgccggccctggcagggagcctggtggggtggcggagggggagactgtgccgtggagggcctcgccatgtcctgctgcccgacttccttgtgaaacctcctagtagaaaaagttcttgggacaaacttcatttgacttcaccataagggaaagaagagagccttgttggacactgaagaagggacggggatttctcctcctaatctgggcctcttgtcatggatgaagagactcggcacagccttgagtgcatccaggccaatcagatctttcccaggaagcagctgatccgggaggatgagaatcttcaggttcctttccttgaacttcatggagagagcacagagtttgtgggccgtgccgaggatgccatcattgccctttccaattacagacttcacatcaagttcaaggagtctcttgttaatgttccattacagcttatagaaagtgttgaatgccgagatatatttcagcttcatttgacttgcaaagactgcaaagttatcaggtgtcagttttcaacctttgagcagtgtcaagagtggctgaagagactgaacaacgcaatccgaccacctgctaaaatagaagatctcttctcatttgcataccatgcttggtgcatggaggtctatgccagtgaaaaagagcaacatggagacctgtgcagaccaggggagcatgtaacttcaaggtttaaaaacgaggtggagaggatgggttttgatatgaacaacgcctggaggatttccaacatcaatgagaagtacaaattatgtggtagctatcctcaagagctcatagtgcctgcctggatcactgacaaagaactggaaagtgtatcaagtttcaggtcctggaagcgcatccctgccgtcatctacaggcaccagagcaatggagctgtcattgcccgctgtggacagccagaggttagctggtggggctggcgaaatgcagatgatgagcatctggtacagtcagtagccaaagcttgtgcctctgactcccgatcgagtggcagcaagctgtcaactaggaacacttctcgagactttcccaatgggggagacctttctgacgtggagttcgattcttctctgtcaaatgcttcaggagcagagagtttagccatccaaccgcagaagcttttgatcttggatgcacgctcctatgcagctgctgtggcaaaccgagccaaaggaggaggctgcgaatgcccagagtattacccaaactgtgaagttgtgtttatggggatggcaaacattcattctattcggaggagttttcagtctctgcggttgctgtgcactcagatgccagatccgggaaattggctatcagctcttgaaagcacaaaatggctccatcacttgtctgtgcttctgaaatcagcgcttctggtagtgcatgctgtggatcaggatcagcggccggtgctagtacactgctcagatggctgggaccgcaccccccagattgtggcattggctaagctcttgctggacccttattaccgaaccatagagggtttccaggtcctcgtggaaatggagtggctggattttggccataaatttgctgaccggtgtggtcatggggagaactcggatgatctgaatgaacgttgcccagtgtttctgcagtggcttgactgtgttcatcagcttcagaggcaatttccttgctcttttgagttcaatgaagcattccttgtgaaactggtgcagcatacctattcctgcctgtttggaacattcctgtgcaacaacgccaaggagagaggggaaaagcatactcaggaacggacatgttccgtgtggtcacttcttcgggcaggcaacaaggctttcaaaaacctactgtattcctctcagtcagaagccgtgctgtaccctgtgtgccatgtgcgtaacctgatgctgtggagtgcagtgtacctgccctgcccatccccaaccacccctgtggacgacagctgtgcaccatacccagccccaggcaccagccctgatgatccccccctgagccggctaccaaagactagatcatacgacaatctgaccacagcctgtgacaacacagtgcctctggccagccggcgctgcagcgaccccagcctgaacgagaagtggcaggagcaccggcgctcactagagctgagcagcctggctggccctggagaggatcccctttctgccgacagcctagggaagcccaccagagtgccggggggtgccgagctttctgttgcagccggagtagctgaggggcagatggagaacatcttgcaggaggccaccaaagaggagagtggagtagaggaacctgcccacagggcaggcattgagatacaggagggtaaagaggaccctctcttagaaaaggagagcaggaggaagacacctgaggcctcagccattggacttcaccaagacccagaactgggtgatgctgctctgaggagccatctggatatgagctggcctctgttctcacagggcatttctgaacagcagagtgggctcagtgttctcctcagttctctccaggtcccccccaggggagaggattccctggaggtccctgtggagcagtttcgaatagaagagattgcagagggtagggaggaagcagttcttccaatcccagtagatgcaaaagttggctatggtacctcacagtcatgttctctgctaccttcccaagtcccttttgagaccagaggaccaaacgtggacagttctacagacatgttagtggaagataaggtgaagtcagtaagtgggccccaaggtcatcatagatcttgccttgtaaatagtggcaaggacaggcttcctcagaccatggaacccagcccttcagagacaagcctggtcgagaggccccaagtggggtctgtggtgcataggacttcccttggcagcactctcagcctgacacgttccccttgtgccttgcctttagccgaatgtaaagaggggcttgtgtgcaatggtgccccagagactgaaaacagggcctcagagcagcccccaggtcttagcaccctccagatgtaccccacacccaatgggcattgcgccaatggggaggctggtaggagcaaggactcactgagccgtcagctgtctgctatgagctgcagctctgcccacttacactcaaggaacttgcaccacaagtggctgcatagccactcaggaaggccatctgcaaccagcagccccgaccagccttcccgcagccacctggacgatgatggcatgtcagtgtacacagacacgatccaacagcgcctgcgtcagattgagtcaggccaccagcaggaagtagaaactttgaagaaacaagtccaggagctgaagagtcgcctggagagccagtacctgaccagctccctacactttaatggagactttggggatgaggtgacttcaatccccgactcggaaagcaatctggatcagaactgtttgtctcgctgcagcacagagattttctctgaagccagctgggagcaggtggataaacaggacacagagatgacccgttggcttcctgaccacctggccgcccactgctatgcgtgcgacagtgccttctggcttgccagcaggaagcaccactgcaggaattgtgggaacgtattctgctccagttgttgtaaccagaaggttccagttcccagccagcagctctttgaacccagtcgagtatgcaagtcttgctatagcagcctacatcccacaagctccagcattgaccttgaactggataagcccattgctgccacttccaactgaagctcagtgacctgggtgggcagtggccaagctgctgttcctatgacaggcccactcaacctgggcagaccgagaggcccgtgcactttggaatgggagcgtggaaccacctgtacagagtgacagatttgggatgcaccactggattgtagattgatttttctttcctgtccccctactccctccctaccttttccatcctcctcctctgccttcaaaaaaggaaactttcccttggttgtcttaattttttttttttttgatggaagaccaagggttgccaggcccactgtaactgccgagctgcctgctgtcacgtgacactgagggatggcttgtttcttccgggtgggaggatggtggtcagagccaggagtatggagatctgagaccgtgagcagggaagaaagccagtgctaacatgcaaccattcctcacgccaccgccacatcagagctggttgggaaccctttgctgctggggaggctggaagcatattccccaagagcactgccctgggcatcatctccctcctgcgaggagctgagccagtcccctcacagatggataaatgaggctgatgtttggagggagaggcacacggtaaatggcatccccttaggcgcctctttgggaaaggaaagtggatgctcctttgaggcaggcgaggggctgggagtgggtagccgtcatgttgtcccccgtgggatcccatttttaacttgacccagattgtcttgggctccttttactttcagggggctgctttcctgggccaggctgtgtagcacttcccaccctcaggcatgagtacagactggtcaaaatgtttatgcagtcaaggccaaagcctgccctgagcccagacacacctgggtccccattctggggcctggtcccctaaacaatctcttcctcagccagcacagggaaatccagactcagggttccagaaatcccccgttcccaaaccaaaccaatcatggatcttccctttaaggggtagaatcagcctttagagttacaagcccctggaaaagggagcaggtcccatacaatcagcctttctcctcttctcttcttgggacaggaataactgctgagcagtccccctttgccactcctggctgtctgagtgggcacttgtctggctgctggccagcagtgaagggccacttggtgacttcgtagggttccttagagaagtgacatggccttgaggagattcagggcacctttcctcagtgagctttgatatggtccaaaaacagccttaaatcaagaatatttgtggaggtaggtgtggggaaggttggagaagagttaggtttgtgctttgtaatcttggcatccatgttttgtgcctgccctccctcttggggaggccatgcttgactctgctgaaagctgctaactggtgacagggtggatcatggtgaggactaggggtaaggtcagggaatgcttaagctctggccctgccctgtattcctcttccccttggtagcagttccctgaccaagggcaaggtgtgtctcaggaaggtggttctgtgcatgcctgggtgtggttaaggcgtggcccagaaggcttccctggtgctctcagtccaggcaaagcccagagcatctgagcacgtctctgacttccagtggcaacacagtttgaacgtggtgaaacagggtgtagttcttttccacattctgtgtcatctagtcgtgcaggtagggaaaaagttggtctaattgaagattgtgcatttcctagtgacaggtgccaagaggttatgatacgggtttcttgggtctgatgtacagtgtgaataaatgcttgcagctcttagctcttttttgatcgatgaagcacttttttattaatattttcctttgttaaaggaggaaccgtaactctccatagctgtacatataacccttttctcctaaagaggagtcagtcagtgctcctatatttttcattttttgtcaaagcaagaagtaaatactttagaattgttaaatatataaataaagcaaataaagttgagtgttccacatggtagcatttgctaacacttcctaa

SEQ ID NO: 157118 - DNA, 665 bp, Homo sapiens
  Payload ID: 10792
  Gene Symbol: MTMR3
  Gene Name: myotubularin related protein 3
  ENST ID: ENST00000445401
  CDS Start-End: 248-665
tgttgttgtggttgtgagaaggcggcggcggcggcggagtagcagccggacgagacgtcccagcggctcaggcgctgcccagcgccggccctggcagggagcctggtggggtggcggagggggagactgtgccgtggagggcctcgccatgtcctgctgcccgacttcaccataagggaaagaagagagccttgttggacactgaagaagggacggggatttctcctcctaatctgggcctcttgtcatggatgaagagactcggcacagccttgagtgcatccaggccaatcagatctttcccaggaagcagctgatccgggaggatgagaatcttcaggttcctttccttgaacttcatggagagagcacagagtttgtgggccgtgccgaggatgccatcattgccctttccaattacagacttcacatcaagttcaaggagtctcttgttaatgttccattacagcttatagaaagtgttgaatgccgagatatatttcagcttcatttgacttgcaaagactgcaaagttatcaggtgtcagttttcaacctttgagcagtgtcaagagtggctgaagagactgaacaacgcaatccgaccacctgctaaaatagaagatctcttctcatttgcataccatgcttggtgcatggaggtct

SEQ ID NO: 157119 - DNA, 5839 bp, Homo sapiens
  Payload ID: 10793
  Gene Symbol: MTMR4
  Gene Name: myotubularin related protein 4
  Uniprot ID: Q9NYA4
  ENST ID: ENST00000323456
  CDS Start-End: 126-3713
ggtggggtcgggactgcgcggcctcagcagctgcgggagacggaagtggcaagagcgcggcctcagagggtcgggcggacgccgcctggtgagaagcaggcagccagtacccttgccacggtagaatgggtgaggaggggccccccagcctggagtacatccaagccaaggatctgttcccccccaaggaactagtgaaggaggaagagaatcttcaggtccccttcacagtgctgcagggtgagggagtagagttcctgggccgggcagccgatgccctcattgccatctctaactaccggctgcatatcaaattcaaggactctgtcatcaacgtccccctccggatgattgacagtgtggagagccgtgatatgttccagttgcacatttcctgcaaggactccaaagtggtgaggtgccacttctccacttttaagcagtgccaagagtggctctcacggctaagccgagccacagcaagacctgccaagcctgaagacctctttgcctttgcctaccatgcctggtgcctggggctgaccgaggaggaccagcacactcacctatgtcagccaggtgagcacatacgttgtcgacaggaggcggagcttgcaaggatgggctttgacctgcagaacgtctggagagtctcacacatcaacagcaactacaaattgtgccccagttacccccagaagctgctggttcctgtgtggatcactgacaaagagctggagaacgtggcttccttccgctcctggaagcggattcccgtggttgtgtatagacacttgcgcaatggggctgccatcgcccgctgcagccagccagagatcagctggtggggctggcgcaatgctgatgatgagtacctggtcacgtccattgctaaagcctgtgccctggacccggggacaagggccactgggggctccctcagcaccgggaataatgataccagcgaggcgtgtgatgctgactttgattcttctctgactgcgtgctctggagtggagagcacagcagctcctcaaaagctgctgatcctggatgcgcgatcctacacggcagcagtggccaaccgggccaagggtggaggctgtgaatgtgaagagtactatcccaactgtgaggtcgtgttcatgggaatggccaacatccatgccatccggaacagctttcagtacctccgggctgtgtgtagccagatgccggatcctagcaactggttgtcggcactggagagtaccaaatggctgcagcacttgtcggtgatgctaaaagcagctgtgctggtggctaatacagtagaccgggaaggccggcctgtgctggtacactgctcagatggctgggaccgcacaccgcagatcgtagccctggccaaaatattactggacccatattacaggacgttggagggcttccaagtgttagtggagtctgactggctggattttgggcacaagtttggagatcgctgtggccaccaagagaatgtggaggaccaaaacgaacaatgccctgtgttcctccagtggcttgattctgttcatcagttgcttaagcagttcccctgcctgtttgaatttaatgaagcattcctggtaaaactggtgcaacacacatactcctgcctctacggcaccttcctggccaacaacccctgtgagcgagagaagcgcaacatctacaagcggacctgctctgtgtgggcgctccttcgagctggcaataaaaactttcataacttcctctacacacccagctcagacatggtcctgcatcctgtttgtcatgtccgggccctgcacctctggacagctgtttatctgccagcatcatctccatgcacacttggggaagaaaacatggatctttacctttccccagtggcccagagccaggagttctctggccgctctctggacagattacctaaaaccagatccatggatgatcttctttctgcctgtgacacaagcagccccctgactcgtacatccagtgaccctaacctgaataaccactgtcaggaggtcagggtaggcctggagccctggcacagcaatcctgagggatcagagacaagctttgtggactctggggtaggagggcctcagcaaactgtaggagaagtgggtcttcctcctcctctgcccagcagccagaaagactacttgagcaataaacctttcaagagtcacaaaagctgttctccaagttacaaactgcttaataccgcagtgcctcgggaaatgaagagcaacacctctgatcctgagatcaaagtcctagaagagactaagggaccagctccagacccttctgcccaggatgagctgggtaggactttagatggcataggggagccacctgaacattgtcctgaaacagaagctgtcagtgcactctccaaggtcatttctaacaagtgtgatggagtttgtaattttcctgagtcttcccagaactctcctacaggtacgccccaacaggcccagccagactccatgctaggtgtgccctccaagtgtgttcttgatcacagcctcagcaccgtttgcaacccaccgagtgctgcctgccaaactcctctagacccaagcactgacttcctcaaccaagatccctcagggtctgtggcaagtatctcccaccaggaacaactgagttctgtgccggatctgacccatggggaggaagacattggtaaaagaggaaataataggaatgggcagttattggaaaatcctcgctttgggaaaatgccattggaattggtccggaagccaatttctcagagccagatcagtgagttctcttttctagggtccaactgggacagcttccaagggatggtgacttcattcccaagtggggaggccacccctcggcggctgctttcctatggctgttgtagcaagaggccaaacagtaagcagatgcgggccacagggccctgctttgggggccagtgggctcagagagaaggtgtgaagtcacctgtctgttctagtcattccaatggacattgtactggcccaggaggaaagaaccagatgtggttgtccagtcatccaaagcaagtctctagcacaaagcccgttccactgaactgcccttctccagtgcctcctctgtatttggatgatgatggactcccctttcccacggatgtgatccagcataggttacggcaaatcgaagcagggtacaaacaagaggtggagcagctacgtcgacaggtgcgtgagcttcagatgaggctggacatccgtcactgctgtgcccctccagcagagccccccatggactatgaggatgattttacatgtttgaaggagtcagatggcagtgatactgaggattttggctctgatcacagtgaagactgcctttcagaagcaagctgggaacctgttgataagaaagagactgaggtgactcgctgggttccagaccatatggcatcacactgctataactgtgactgtgaattctggttggccaaacgaagacaccattgcagaaattgtgggaatgtattttgtgctggatgctgccacctgaagctgcccattcctgatcagcaactctatgacccagttctcgtctgtaactcatgttacgaacacattcaagtctctcgtgccagggaactcatgagccaacagctgaagaaacccattgctacagcttccagttgaatgccggggagaaacctgtccaattttagcaggtttgaagggaggatcttcttcagttgtagtttggaaggttccttggtgtggctcatgaaatcacagagctcagagataccatcttgagaaatcctccttggtatcatgaaactggagcagaggaattgcaatttagcaggaggtcctctactggtgataccctcaccttggggtaatggtcctaacccagacccagggtctggaagcttaatgttgagttggtgactccagcctctttctcctggaggtcacaagatgatgattgcgtagatgttgcctggtgcaaagtgccccaaacagcaatagaaaggcatatgtataaccaaactccaagtgataaccagacccatctctcctccaccttgacaaaagcagattatagtatacaaggtaggaattcctgtcctatttgagatgaactatatcctgtacctctgtgctctgtgtctgcatgaaggctcagcctttagaggcactccttctagttgcattagtactgtctttctgtggagtttggtttgaagactggctcagcaagtggaggtttcaatgtatttttcagttggctcatcagccagcattggtgaatattcagtttaggggaacagttctagggagtgagacatttttgggagcagaggaaaactctgctgatgttcggtcctggcaaacattgagttattttgagctgtgaaggcagtcgtctctgttacacagtggcagctcttgagttatgcactgtgaagaatgagaagggaaaagcaaaaattatccttgtgaaatatctgctgattgtgccctactctttgcacctgacttttcctagttgtcctggtgctaacacaggagctacaccttgatcctctcctggcatgaaaataaaacaaaggttttcgttgttgttgttccattgcccatttcccccatgttgtctttcccttggctgatgcctcctctgggtcacattgcttcttatcctgaacacttgacaccttgagggtagaatttagcgtttggtttttacctcctagcatatgctgtttggtatgtgagggtttcagtacaaatgctgctgtctatttctgtgcacttaacaatggaacccaaacagaagagaataaagccttgataccaaaattgggaaagaacatgtgtccatttggaccaaacgttgttggtttttaaaaaattttattttgtttttttgtttttgtttttgttttttttcatcttaatatgtaccagtggcacttaaccaaaagatacagtgatatagccatgtactgtgggtgggacagatacagtctccttggcctataatgaaaccactaggactttatacagttttccttaatttgttgacatataaatggtaaattatatttaggcttatcctgttttgaaatgatggtagtcatctttcttactgctactttcatgttgctttctagaaaacagcatttcattccaaaataactaggatctgcatttagaacaagaatcattatttgtcctgaccttttcagtcctacagagacgcatctgtggttcttttgtacttgccatagatgtaacctaaaaagttttggcatatttaggtcagcctagcggaactttttttttcatttaaatggagctgaataatggagattttgtgtctgcaaaattcctgagatcattgaaaaagtaacaagctgttccttgtttctgatacataaaattattttaagcattttatcaatcattaaaatttactgccagttgtgagtggctttttaattaacttgtctttcattgcacttcactctgcctgttttcaaggggagtaagattggtaacatttggggagactgtatctgtctacttagcgtggctgttttgagggactgtcccatcagtgaacaaactgcatggccttggagagagactctgggctcttggctcagatgtgttcatcaaatactcctttcagagctgttgtgggtgtaagtgacatgatgtggccaaaaatccaaactgtgcagttgcgttgtgacaaacatgcaatgtgctgtaaaaattcaatacagtttaaataaaatctctatattagt

SEQ ID NO: 157120 - DNA, 1281 bp, Homo sapiens
  Payload ID: 10793
  Gene Symbol: MTMR4
  Gene Name: myotubularin related protein 4
  ENST ID: ENST00000582390
  CDS Start-End: 218-556
actcgtgcgggagggcggagctgggcccgctccattgtggagaggaggggagaggcgcgcgggagccgcgcggaggcccggccaccagcgccctagcctcttggccgccgcggctgcacctggcgagccccgcagccgggatgcggcgggcgcccggggctggcgggcagcgcagcggctccggggacatgtgcgctggcccagaccgcccgcgaccatgagcctgaccgcccgcgtctcctgctccatgcttagctgcttcggtgaggaggggccccccagcctggagtacatccaagccaaggatctgttcccccccaaggaactagtgaaggaggaagagaatcttcaggtccccttcacagtgctgcagggtgagggagtagagttcctgggccgggcagccgatgccctcattgccatctctaactaccggctgcatatcaaattcaaggactctgtcatcaacgtccccctccggatgattgacagtgtggagagccgtgatatgttccagttgcacatttcctgcaaggactccaaagtggtgaggtgagaacaacggagcctcactcaggtcccctggccctagtcttgtccagttctctgtgctgcagggtttctctggtgcaagagaggaaagatcctgcctcactttccccagttggaagaaaaggtgaagaccatgttctgggttgggaggtcagtttactgacccataggatcttgacctgaaaaaatgggggtaatgcctagttcatggagtcatcgtaaggattaagtgagataatgtgtatgtgtatgaaagcaccgaggacaatatctggcacagagcactcatattattgttggtttatttatttattcatttgatatacatgtattgagtaccctactcaatgccagcctgttttaagccctggggatacagcagggaacaaatagacaaaattttgccgcctcagagagcttacattccaatgaggagataccaaccgtaagtaataagtaaaatttgtgaaatgatagtaagtgtaaaggaaaaaaataaagcagggaaagggaataaggagtgctatgagggtgaagattgtaaaacaatcaggctgggcacggtggttcacgcctgtaataccagcacttcgggtggccaaggtgggaagatcccttcagcttaggagttcaagatcagcctgggcaacatagcgagaccccatctctactaaaaatagaaaaaattagccaggcgtggtgatgcatgcctgtagtcccagctactca

SEQ ID NO: 157121 - DNA, 425 bp, Homo sapiens
  Payload ID: 10793
  Gene Symbol: MTMR4
  Gene Name: myotubularin related protein 4
  ENST ID: ENST00000579921
  CDS Start-End: 140-425
agggtcgggcggacgccgcctggtgagaagcaggcagccagtacccttgccacggtagaatggagcgtggaatgactaacctggcaccattctaaggggaaagaaaggtttaacgaagtcacgggattgaaggaccctgatgggcaggggcatgggtgaggaggggccccccagcctggagtacatccaagccaaggatctgttcccccccaaggaactagtgaaggaggaagagaatcttcaggtccccttcacagtgctgcagggtgagggagtagagttcctgggccgggcagccgatgccctcattgccatctctaactaccggctgcatatcaaattcaaggactctgtcatcaacgtccccctccggatgattgacagtgtggagagccgtgatatgttccagttgcacatttcctgca

SEQ ID NO: 157122 - DNA, 810 bp, Homo sapiens
  Payload ID: 10793
  Gene Symbol: MTMR4
  Gene Name: myotubularin related protein 4
  ENST ID: ENST00000583656
  CDS Start-End: 218-810
actcgtgcgggagggcggagctgggcccgctccattgtggagaggaggggagaggcgcgcgggagccgcgcggaggcccggccaccagcgccctagcctcttggccgccgcggctgcacctggcgagccccgcagccgggatgcggcgggcgcccggggctggcgggcagcgcagcggctccggggacatgtgcgctggcccagaccgcccgcgaccatgagcctgaccgcccgcgtctcctgctccatgcttagctgcttcggtgaggaggggccccccagcctggagtacatccaagccaaggatctgttcccccccaaggaactagtgaaggaggaagagaatcttcaggtccccttcacagtgctgcagggtgagggagtagagttcctgggccgggcagccgatgccctcattgccatctctaactaccggctgcatatcaaattcaaggactctgtcatcaacgtccccctccggatgattgacagtgtggagagccgtgatatgttccagttgcacatttcctgcaaggactccaaagtggtgaggtgccacttctccacttttaagcagtgccaagagtggctctcacggctaagccgagccacagcaagacctgccaagcctgaagacctctttgcctttgcctaccatgcctggtgcctggggctgaccgaggaggaccagcacactcacctatgtcagccaggtgagcacatacgttgtcgacaggaggcggagcttgcaaggatgggctttgacctgcagaacgtctggagagtctcacacatcaacagcaactacaa

SEQ ID NO: 157123 - DNA, 5622 bp, Homo sapiens
  Payload ID: 10793
  Gene Symbol: MTMR4
  Gene Name: myotubularin related protein 4
  ENST ID: ENST00000579925
  CDS Start-End: 72-3488
gcgcggcctcagagggtcgggcggacgccgcctggtgagaagcaggcagccagtacccttgccacggtagaatgggtgaggaggggccccccagcctggagtacatccaagccaaggatctgttcccccccaaggaactagtgaaggaggaagagaatcttcaggtccccttcacagtgctgcagggtgagggagtagagttcctgggccgggcagccgatgccctcattgccatctctaactaccggctgcatatcaaattcaaggactctgtcatcaacgtccccctccggatgattgacagtgtggagagccgtgatatgttccagttgcacatttcctgcaaggactccaaagtggtgaggtgccacttctccacttttaagcagtgccaagagtggctctcacggctaagccgagccacagcaagacctgccaagcctgaagacctctttgcctttgcctaccatgcctggtgcctggggctgaccgaggaggaccagcacactcacctatgtcagccaggtgagcacatacgttgtcgacaggaggcggagcttgcaaggatgggctttgacctgcagaacgtctggagagtctcacacatcaacagcaactacaaattgtgccccagttacccccagaagctgctggttcctgtgtggatcactgacaaagagctggagaacgtggcttccttccgctcctggaagcggattcccgtggttgtgtatagacacttgcgcaatggggctgccatcgcccgctgcagccagccagagatcagctggtggggctggcgcaatgctgatgatgagtacctggtcacgtccattgctaaagcctgtgccctggacccggggacaagggccactgggggctccctcagcaccgggaataatgataccagcgaggcgtgtgatgctgactttgattcttctctgactgcgtgctctggagtggagagcacagcagctcctcaaaagctgctgatcctggatgcgcgatcctacacggcagcagtggccaaccgggccaagggtggaggctgtgaatgtgaagagtactatcccaactgtgaggtcgtgttcatgggaatggccaacatccatgccatccggaacagctttcagtacctccgggctgtgtgtagccagatgccggatcctagcaactggttgtcggcactggagagtaccaaatggctgcagcacttgtcggtgatgctaaaagcagctgtgctggtggctaatacagtagaccgggaaggccggcctgtgctggtacactgctcagatggctgggaccgcacaccgcagatcgtagccctggccaaaatattactggacccatattacaggacgttggagggcttccaagtgttagtggagtctgactggctggattttgggcacaagtttggagatcgctgtggccaccaagagaatgtggaggaccaaaacgaacaatgccctgtgttcctccagtggcttgattctgttcatcagttgcttaagcagttcccctgcctgtttgaatttaatgaagcattcctggtcctgcatcctgtttgtcatgtccgggccctgcacctctggacagctgtttatctgccagcatcatctccatgcacacttggggaagaaaacatggatctttacctttccccagtggcccagagccaggagttctctggccgctctctggacagattacctaaaaccagatccatggatgatcttctttctgcctgtgacacaagcagccccctgactcgtacatccagtgaccctaacctgaataaccactgtcaggaggtcagggtaggcctggagccctggcacagcaatcctgagggatcagagacaagctttgtggactctggggtaggagggcctcagcaaactgtaggagaagtgggtcttcctcctcctctgcccagcagccagaaagactacttgagcaataaacctttcaagagtcacaaaagctgttctccaagttacaaactgcttaataccgcagtgcctcgggaaatgaagagcaacacctctgatcctgagatcaaagtcctagaagagactaagggaccagctccagacccttctgcccaggatgagctgggtaggactttagatggcataggggagccacctgaacattgtcctgaaacagaagctgtcagtgcactctccaaggtcatttctaacaagtgtgatggagtttgtaattttcctgagtcttcccagaactctcctacaggtacgccccaacaggcccagccagactccatgctaggtgtgccctccaagtgtgttcttgatcacagcctcagcaccgtttgcaacccaccgagtgctgcctgccaaactcctctagacccaagcactgacttcctcaaccaagatccctcagggtctgtggcaagtatctcccaccaggaacaactgagttctgtgccggatctgacccatggggaggaagacattggtaaaagaggaaataataggaatgggcagttattggaaaatcctcgctttgggaaaatgccattggaattggtccggaagccaatttctcagagccagatcagtgagttctcttttctagggtccaactgggacagcttccaagggatggtgacttcattcccaagtggggaggccacccctcggcggctgctttcctatggctgttgtagcaagaggccaaacagtaagcagatgcgggccacagggccctgctttgggggccagtgggctcagagagaaggtgtgaagtcacctgtctgttctagtcattccaatggacattgtactggcccaggaggaaagaaccagatgtggttgtccagtcatccaaagcaagtctctagcacaaagcccgttccactgaactgcccttctccagtgcctcctctgtatttggatgatgatggactcccctttcccacggatgtgatccagcataggttacggcaaatcgaagcagggtacaaacaagaggtggagcagctacgtcgacaggtgcgtgagcttcagatgaggctggacatccgtcactgctgtgcccctccagcagagccccccatggactatgaggatgattttacatgtttgaaggagtcagatggcagtgatactgaggattttggctctgatcacagtgaagactgcctttcagaagcaagctgggaacctgttgataagaaagagactgaggtgactcgctgggttccagaccatatggcatcacactgctataactgtgactgtgaattctggttggccaaacgaagacaccattgcagaaattgtgggaatgtattttgtgctggatgctgccacctgaagctgcccattcctgatcagcaactctatgacccagttctcgtctgtaactcatgttacgaacacattcaagtctctcgtgccagggaactcatgagccaacagctgaagaaacccattgctacagcttccagttgaatgccggggagaaacctgtccaattttagcaggtttgaagggaggatcttcttcagttgtagtttggaaggttccttggtgtggctcatgaaatcacagagctcagagataccatcttgagaaatcctccttggtatcatgaaactggagcagaggaattgcaatttagcaggaggtcctctactggtgataccctcaccttggggtaatggtcctaacccagacccagggtctggaagcttaatgttgagttggtgactccagcctctttctcctggaggtcacaagatgatgattgcgtagatgttgcctggtgcaaagtgccccaaacagcaatagaaaggcatatgtataaccaaactccaagtgataaccagacccatctctcctccaccttgacaaaagcagattatagtatacaaggtaggaattcctgtcctatttgagatgaactatatcctgtacctctgtgctctgtgtctgcatgaaggctcagcctttagaggcactccttctagttgcattagtactgtctttctgtggagtttggtttgaagactggctcagcaagtggaggtttcaatgtatttttcagttggctcatcagccagcattggtgaatattcagtttaggggaacagttctagggagtgagacatttttgggagcagaggaaaactctgctgatgttcggtcctggcaaacattgagttattttgagctgtgaaggcagtcgtctctgttacacagtggcagctcttgagttatgcactgtgaagaatgagaagggaaaagcaaaaattatccttgtgaaatatctgctgattgtgccctactctttgcacctgacttttcctagttgtcctggtgctaacacaggagctacaccttgatcctctcctggcatgaaaataaaacaaaggttttcgttgttgttgttccattgcccatttcccccatgttgtctttcccttggctgatgcctcctctgggtcacattgcttcttatcctgaacacttgacaccttgagggtagaatttagcgtttggtttttacctcctagcatatgctgtttggtatgtgagggtttcagtacaaatgctgctgtctatttctgtgcacttaacaatggaacccaaacagaagagaataaagccttgataccaaaattgggaaagaacatgtgtccatttggaccaaacgttgttggtttttaaaaaattttattttgtttttttgtttttgtttttgttttttttcatcttaatatgtaccagtggcacttaaccaaaagatacagtgatatagccatgtactgtgggtgggacagatacagtctccttggcctataatgaaaccactaggactttatacagttttccttaatttgttgacatataaatggtaaattatatttaggcttatcctgttttgaaatgatggtagtcatctttcttactgctactttcatgttgctttctagaaaacagcatttcattccaaaataactaggatctgcatttagaacaagaatcattatttgtcctgaccttttcagtcctacagagacgcatctgtggttcttttgtacttgccatagatgtaacctaaaaagttttggcatatttaggtcagcctagcggaactttttttttcatttaaatggagctgaataatggagattttgtgtctgcaaaattcctgagatcattgaaaaagtaacaagctgttccttgtttctgatacataaaattattttaagcattttatcaatcattaaaatttactgccagttgtgagtggctttttaattaacttgtctttcattgcacttcactctgcctgttttcaaggggagtaagattggtaacatttggggagactgtatctgtctacttagcgtggctgttttgagggactgtcccatcagtgaacaaactgcatggccttggagagagactctgggctcttggctcagatgtgttcatcaaatactcctttcagagctgttgtgggtgtaagtgacatgatgtggccaaaaatccaaactgtgcagttgcgttgtgacaaacatgcaatgtgctgtaaaaattcaatacagtttaaataaaatctctatattagtgctgcttt

SEQ ID NO: 157124 - DNA, 572 bp, Homo sapiens
  Payload ID: 10793
  Gene Symbol: MTMR4
  Gene Name: myotubularin related protein 4
  ENST ID: ENST00000582663
  CDS Start-End: 76-372
aagagcgcggcctcagagggtcgggcggacgccgcctggtgagaagcaggcagccagtacccttgccacggtagaatgggtgaggaggggccccccagcctggagtacatccaagccaaggatctgttcccccccaaggaactagtgaaggaggaagagaatcttcaggtccccttcacagtgctgcagggtgagggagtagagttcctgggccgggcagccgatgccctcattgccatctctaactaccggctgcatatcaaattcaaggactctgtcatcaacgtccccctccggatgattgacagtgtggagagccgtgatatgttccagttgcacatttcctgcaaggactccaaagtggtgaggtgagcacatacgttgtcgacaggaggcggagcttgcaaggatgggctttgacctgcagaacgtctggagagtctcacacatcaacagcaactacaaattgtgccccagttacccccagaagctgctggttcctgtgtggatcactgacaaagagctggagaacgtggcttccttccgctcctggaagcggattcccgtggttg

SEQ ID NO: 157125 - DNA, 317 bp, Homo sapiens
  Payload ID: 10793
  Gene Symbol: MTMR4
  Gene Name: myotubularin related protein 4
  ENST ID: ENST00000583243
  CDS Start-End: 269-317
tgcttggggatgtgggatgtggctagtaggctgaatgggatgttaggagggtgaggaggggccccccagcctggagtacatccaagccaaggatctgttcccccccaaggaactagtgaaggaggaagagaatcttcaggtccccttcacagtgctgcagggtgagggagtagagttcctgggccgggcagccgatgccctcattgccatctctaactaccggctgcatatcaaattcaaggactctgtcatcaacgtccccctccggatgattgacagtgtggagagccgtgatatgttccagttgcacatttcct

SEQ ID NO: 157126 - DNA, 5659 bp, Homo sapiens
  Payload ID: 10794
  Gene Symbol: MTMR6
  Gene Name: myotubularin related protein 6
  Uniprot ID: Q9Y217
  ENST ID: ENST00000381801
  CDS Start-End: 763-2628
tttcgttatgtgatatccctctacaggatgagttttaatggatgctggtgctaacatcgtatgaaattgaggtaggaggcgggactctgacaccagaccagattgaggactagctaatcatcatactttacataaggaatccgtaggattggagagttgattgtttcaaataaggctggtttccttatttggttatttccttagaataataactccaaatctgattatttccttagaatacattcttatgagtagaactgcagctcaaactaaatttggtgctgtccagtggtatggcgatggacttcagaacatcctccactcttgccctcaccccacaagaaccctttactcgggatccattctcacgcagtcttcctccccgaccgccccgcgcgtccgctcggcgggatgacaaagaccgcctcgggtggggtggtgagcagtaccggcctcctccagcagggggcgctgtgggatccgccgctgtccgggacgaaccagcaagccgctctcggtccacacacgctctgtctgcctgccccgagtcccccgggaggccgcggggtttggggaagtgtttctaggagacggcgctcaccggctgcacctgcgccgttgacgccaccggggccggcagacagacccgcggcgctggctggtggagggagttcccgcttgctctctgtcgctgtcaccgccctgtttctgtagccgtatggtacgcctgtgagaccggctgccggctgacgtctccttgcgatggagcatatccggacgaccaaggtcgaacaagtaaaattacttgaccgattcagtaccagcaacaagtcattaacaggaacactgtatcttacggctacacatctattatttatcgactctcatcaaaaagaaacctggatattacaccaccatattgcctcagtagagaaacttgctttgactacttctggatgcccccttgtgatacagtgcaagaacttcagaactgtgcatttcattgttcccagagaaagagattgccatgatatttacaactctttgctacaactgtcaaaacaagcaaaatatgaagatctctatgcattttcttataatcccaaacaaaatgattcagaacgactacaaggctggcagctcattgatctcgctgaggaatataagaggatgggagtgccaaactcacactggcagttgtctgatgccaaccgggactacaagatttgtgaaacttaccccagagaactttatgttccccggatagcaagcaaaccaataattgttggtagttccaagttccggagcaagggaagattcccagttctttcctactatcatcaagataaggaggctgccatttgtcgatgtagtcagccactctctggattcagtgccaggtgcctggaggatgaacatttgcttcaagccattagtaaagccaatccagtcaatcgctatatgtacgtcatggataccaggccaaaactgaatgcaatggccaacagagcagctggaaaaggttatgaaaatgaagacaactattccaatattagatttcagtttgttggaattgaaaatattcatgtcatgaggtccagccttcagaaattattggaagtcaatggcactaaagggctttctgtcaatgatttctactccggtttggagagctcgggatggcttcgccatatcaaagctgttatggatgctgcaatcttcttggccaaagcaataacagttgaaaatgcaagtgtgttggtgcattgttccgatggttgggataggacttcccaggtttgttccctgggttctcttttattggattcctactacaggacaatcaaaggattcatggttttaatagaaaaggattggatctcttttggacataaattttcagagaggtgtggccagttggatggtgacccaaaggaagtctcaccagtgtttactcagttcttggaatgtgtgtggcatttgaccgaacagtttccacaagcctttgaattcagtgaagcatttcttcttcagatccatgagcatattcattcatgccagtttggaaacttccttggaaattgtcagaaggaaagagaagagctcaagttgaaggagaagacttattccctgtggccatttcttttggaagaccaaaagaagtacttaaatcctctctacagttccgaatctcacagatttacagttttggagccaaatacagtatctttcaattttaagttttggaggaacatgtaccatcaatttgatcgaacactgcatcctaggcagtctgtatttaatataattatgaatatgaatgagcaaaataaacaattagagaaagatattaaagacctagaatctaaaattaaacaacgcaaaaataagcaaacagatggcatcctcaccaaggaattgttacattcagttcatcctgaatcacctaacctcaaaacttccctgtgttttaaagagcagactctgctacccgtaaatgatgctcttcgaactatagagggcagcagcccggcagataatcgttatagtgaatatgcagaagagttttctaaatcagaacctgctgtggtcagcttagagtatggtgtggcaagaatgacttgttagactcatagagttttttctgcaatgattgcagtacaagaaaaggattattgtgaggatggtctgtaagcataaccaaaaggaatttgtctaataacaattttagggtttaacagtaggctaatagttgaaggaaggataataactacccttgtgagagaaataagtcattttaattgcatttccagcaaggaatgacattcagttctgtaagaaatgagtggtatttgatgtatttactcaaaacacaatttgcactgtacactagtgaattgacgtttatgatttatgttaattcagccaaacataaataaccttccttaagtacaatttaacttcaagaaaacaaaatttgacaacatagtttcttaataaatgatatggcatgtactttcaattatgtagctttgtaactatgaatatttacatattttgccttttagtgatatttaatgttaaagtgccatgaaaaatatttctaagaaagccttaaattcccagtggattctttacccttaagttttacagcctacaacaagattttttgttttgtttttcttctggtcagccttgttttgtttgtaaagaattgtgctctcattactgctgggggtgcatgctacaatacttctatataaacacttgtagaagtacactgttcacgtttagcctgccccacttttgtattcaaaattaatgaaactgaaggtttattctgatcataatttgtttagtgctacatttgataatttattatttacagcttagaatattgatttcttgaatacgtataagcacatttgactgtcttttatatatggattactgcattccattgattcttattttgtggttggctttatttctttcacaactgtgtaagtttaaagagctaaagctctaaaactgttctgagaaacaatgaatagtacatgtatatgtatatttttaaactgccttattgctcaatgagttgctgttcctggagtatctaactttcagtttactcaaaaacttttgggtaaataaaaaagggaagtacagatagtttaggttgtgcatggttgcatgaattttgaagtcatttctatgtggagcattatttttcttcttgttaaatatagaaaaaaaaagagattctagtacaaagttactgtttaacaaaagcaacataaactctgggaaagatttcattttgccatgttatatttactgtttattctgtgtactagtacatatctttaaattaccaaaaaacaagaaacaaaacataaaaaccccaaaactatcacttggaattagcaatatcacccaactggctttaaaattgaaaatttaaataacatggtggcatgaagtacaattcgagtattaggcaatttgcatagtgttcctcatgctactttctgttacacctctattatattagttttgaatataaacatctttttcagaccaaaaaaaactttattgtatgagagcttatcttatcctgtttatttttccaatgcttttctgtaatacattatgtaatttaaaaaatattcctttttaaacagcaacagaaatgcactataaaatatagtatgtgattaaccaatcctgcttccatatttaagcactgggaatggaaacttaatctctgtgactacaaagggaagtttttgtgccttggtgttccagtcactgattgtggttttagaatcttctgtggctgacttcttgtattcaactctggtttattatcttaatcttcaacttcagacatatatttgtgtgtttatatgctcacaggtggactgagaaatcagttacatcttaagtgacctacagggtatatgttggcaaaagcagactgtgtatatgtcttataaagttgaatttatgttcagtgtgtttggaagtgtatagcatgtaaattacttcatatatgatttaaaggtaattaaatgttcacattttactttgaatgtttttcttctggataaaacaaatggaatcaagttgtagttgttttttttttcttctcacctaggcaagtagacttgcccattacattaacataacagcataaggtttgaggagtttattttccaaaagtttgttgataaataatacctgtttcatacaaaaataatttccagaatatttaaaataggtatagtgggctaaaaggcccatcagatgtaggtaataatgtcattaagttttcattttgttcctgtcacttgcttatattacaatcactatttttttgtgcccttgccaacttgatggaaggcagggtccattgagtacaaacattcgaggtgaaatgtctctccaaaggcagatctggatgtaaatatgaggaagaaaataactggctgacaagaggataattttattgagggtgttttgaaaaggtcagctaggctagaagtagctcagggaatcttgagtaaagatgaagggaactcttttaaaacaaattcaatttatttggtcgggtagcagagcagggaggtggtgtcagtcaagcctgttttgaaacattttttgcagaaggtcagctttaaaatattgaaaaatttccagttgacatgctaagttggattaaatgctgatcatttataaaactatatagttgctgcaaaagtaattggggcttttgccattgaaagtgatgacaaaaaccgcaattacttttgcaccaacctaatactacagttgcagacttttattagtgacgctgatcttcattagtcaagttttagttattttgttggcttttccatgtagaattccaagtgacattaacatactttgattaattaaagaaaatttggagactgtttaagatatatgtctagatatcaatgtaaactataagctttaggaacttacatctagaagaaagcctggaatctagaataattatctcaaaaaaaagtatatataccattgtacttgatataagaaaatgtaaacatgaaaccttgacattttaataaacagtatttgtgctactctagttatttctaggaaagtaaaa

SEQ ID NO: 157127 - DNA, 3850 bp, Homo sapiens
  Payload ID: 10795
  Gene Symbol: MTMR7
  Gene Name: myotubularin related protein 7
  Uniprot ID: Q9Y216
  ENST ID: ENST00000180173
  CDS Start-End: 36-2018
gcgcccgcccgggaccctgcagacgtgggccagccatggagcacatccgtacgcccaaggttgaaaatgtccgcttggtagatcgagtgtctcctaaaaaagcagctctaggtactttgtatttgacggctacccatgtcatattcgtggaaaattcacctgacccaagaaaagaaacatggattcttcacagtcagatttccaccattgagaaacaggcaacaaccgctaccggatgccctctgctgattcgctgcaagaactttcagataatacagctcatcatacctcaggaaagagattgccacgacgtgtacatctccctgatacgccttgcaaggccagtgaaatatgaggagttatactgcttttcattcaaccccatgctggataaagaagaaagagagcaaggctgggtgctgatcgatcttagtgaagaatacacgcggatgggcctccctaatcattactggcagctcagcgatgtgaatagagactacagagtctgtgactcttatcctactgaactgtacgttcccaaatcggccacggcacacatcatagtggggagttccaaattccggagtagacggcgatttcctgtcctttcttactattataaagataaccacgcctccatctgccggagcagccagcccctgtccggcttcagtgcccggtgcctagaggacgagcagatgctccaggccattaggaaagccaatccaggaagtgacttcgtttatgtcgttgacacccggcctaaacttaatgcaatggcaaatcgtgctgcagggaaaggctatgagaatgaagacaattattccaatatcaagtttcagtttatcgggatagagaacatccatgtcatgaggaacagtctgcagaaaatgctggaagtgtgtgaacttaaatctccctccatgagtgatttcctgtggggtctggagaactctggctggttaaggcacattaaagccataatggatgcaggaatcttcattgcaaaggcagtgtcagaggaaggggcaagtgtgcttgttcactgttctgatggctgggacaggaccgctcaggtgtgctcggtggcaagcctgctgctggaccctcactaccggactctgaagggcttcatggtattaattgaaaaggactggatttcctttggtcataagtttaatcaccgatatggcaatctagatggtgacccaaaagaaatctctccagttattgaccagttcattgagtgtgtttggcagttaatggaacaatttccctgtgcctttgagttcaatgagaggtttttgattcacattcaacatcacatttattcctgccagtttggaaacttcctatgtaacagccaaaaggagagacgagaactcaagattcaagaaagaacatactcattatgggctcacctgtggaagaatcgggccgactacctgaatcctctgtttagagctgatcacagccagactcagggaacccttcatctccctacaacaccatgtaacttcatgtacaagttttggagtggaatgtataaccgctttgaaaaggggatgcagccccgacagtcagttacagattacctaatggcagtgaaggaagaaactcagcagctagaggaagaactagaggccctggaagaaaggctggaaaaaattcaaaaggtccagttaaattgcactaaggtgaagagtaagcaaagtgagcccagcaagcactcagggttttctacctcagacaacagcatagccaacactccccaggattacagtgggaatatgaaatcatttccatcccggagcccttcacaaggcgatgaagattctgctctgattctaacccaagacaatctgaaaagttcagatccagatctgtcagccaacagtgaccaagagtccggggtggaggatttgagctgtcggtctccaagtggtggtgagcatgcaccgagtgaagatagtggcaaggaccgggattctgatgaagccgtgtttctcactgcctgaagtttccctttggagttccaaagtaaaggacacataagcaacacttccaaaaacaagggaacaaggtggtttattgtaaaaacaggaaatggtgcatgtcattgagaactactttaatgcagctatgaaaagggaaaaaagtgcccagttcttgatttcttagatactgaagaggacgtagtcatttcatttatcaaatataaggaaaattattcaccattttgaagctcaccctagactatgaaaattatattcactgcagagcaattacttctgtcattacctgaagtgatcagtatctatcttccttgtcatagcatgcatctctcaaaaagcctccactcctttccctcacatctgtgatcatcatgattcttttagttcacttctagatgcatattttgtgttttctaaagcatctgacattatcctcctttccgaccctcttatacatatttctaaaaacaggcacattggtgagatgcaccctttttagttaatagatgcattcctaaggagcttttaattgcttatctttcaggcataatcatcactttaacttttccttggagcatatattttgaattgtgagaataattttgttgcttttctctgagatctatagtctgtttctcctcattatttaaaaatgctaaaccttgtatctcactttttctctaacactgatttaatagctaacgaggtagaagcaacattcattctcctggtcttacatatgaatttaagtatcagctttcttgtaataaccttttattactgttctagagactacactaccgacagtgtgggccagccaccagcctgatctcaaagtatcacattataaagttagtagataaaacatctgtgagtgaaaatccagtttcaagaaccagagaattgggttgtcatgtctgtttaatgaagggaataggttttgtaatctatcattttagaaattatgtaactggctaatatggtttaattaaccttagtaacatctcatgaccactgactgctgaaagttctgaaaagaatttttgttttgttacactgcacatttaagggagagtccctcccctatcttatgagttaaaaaagacttcactaggtgacctaaattaaacttagtggggaaaagtggccatgtttggacataaataaatggtattcacactgtatggttttaatatattagtacattctagaatgtaaaaggattaaactttacaatttagatcaatattttgaatatgtgaaaggattaatttaaactttacaatttacatcaatattttgaatatctgattttttttaatgggagaattattacatttcgctgaaatgaggacgagggcaagaaagcaacattgctgatctctctagtatgaaagatttggagggagtgttgcaatatatataaatgaaaacatttaattgtgttcatcatatttaaaaatatagaatatattagagaactgtgatttaaaagtactgttaatgtaaaaaataaagcaagtgtaattaattctttcagaatataaaatttgggcattctctgctgagcagttcccaaattaagtacaaggaatgtttattcattttctgcaatatactatatgtaatagggaataccttgctaaaataaaacttaggatatagtggtaatggctttcacatttttataacataacataactcacttcacaaccttcttggagctgtccactcttagaaactctgttgcctaatattgaggatgtggctttaatttcttccgtttgacagtgtatgtctataaaaacaataaacattttttaaaaaatgacaaa

SEQ ID NO: 157128 - DNA, 2158 bp, Homo sapiens
  Payload ID: 10795
  Gene Symbol: MTMR7
  Gene Name: myotubularin related protein 7
  Uniprot ID: Q9Y216
  ENST ID: ENST00000521857
  CDS Start-End: 36-1703
gcgcccgcccgggaccctgcagacgtgggccagccatggagcacatccgtacgcccaaggttgaaaatgtccgcttggtagatcgagtgtctcctaaaaaagcagctctaggtactttgtatttgacggctacccatgtcatattcgtggaaaattcacctgacccaagaaaagaaacatggattcttcacagtcagatttccaccattgagaaacaggcaacaaccgctaccggatgccctctgctgattcgctgcaagaactttcagataatacagctcatcatacctcaggaaagagattgccacgacgtgtacatctccctgatacgccttgcaaggccagtgaaatatgaggagttatactgcttttcattcaaccccatgctggataaagaagaaagagagcaaggctgggtgctgatcgatcttagtgaagaatacacgcggatgggcctccctaatcattactggcagctcagcgatgtgaatagagactacagagtctgtgactcttatcctactgaactgtacgttcccaaatcggccacggcacacatcatagtggggagttccaaattccggagtagacggcgatttcctgtcctttcttactattataaagataaccacgcctccatctgccggagcagccagcccctgtccggcttcagtgcccggtgcctagaggacgagcagatgctccaggccattaggaaagccaatccaggaagtgacttcgtttatgtcgttgacacccggcctaaacttaatgcaatggcaaatcgtgctgcagggaaaggctatgagaatgaagacaattattccaatatcaagtttcagtttatcgggatagagaacatccatgtcatgaggaacagtctgcagaaaatgctggaagtgtgtgaacttaaatctccctccatgagtgatttcctgtggggtctggagaactctggctggttaaggcacattaaagccataatggatgcaggaatcttcattgcaaaggcagtgtcagaggaaggggcaagtgtgcttgttcactgttctgatggctgggacaggaccgctcaggtgtgctcggtggcaagcctgctgctggaccctcactaccggactctgaagggcttcatggtattaattgaaaaggactggatttcctttggtcataagtttaatcaccgatatggcaatctagatggtgacccaaaagaaatctctccagttattgaccagttcattgagtgtgtttggcagttaatggaacaatttccctgtgcctttgagttcaatgagaggtttttgattcacattcaacatcacatttattcctgccagtttggaaacttcctatgtaacagccaaaaggagagacgagaactcaagattcaagaaagaacatactcattatgggctcacctgtggaagaatcgggccgactacctgaatcctctgtttagagctgatcacagccagactcagggaacccttcatctccctacaacaccatgtaacttcatgtacaagttttggagtggaatgtataaccgctttgaaaaggggatgcagccccgacagtcagttacagattacctaatggcagtgaaggaagaaactcagcagctagaggaagaactagaggccctggaagaagtaagacatacttgctttgttaatctattttctgtgcttatttcttgaagagcaaggcttcatgaaagcctcttaagattcagtgcaatacaaatatttcacatttttagtcagtagaacacctgaaacacaaccccatccaggtcaggactcagataaccgaagcccaaacctaggcatttaatgcatttcacacatctggtttgtggctcagttccacaaatttttggttgttccttattttaggtcaacttgtttggttactgttatttgagagtagtaaaattaatttttttctggaaagtgtgaaaaagtaacagaataaaatcaaatatatgtacttgtaaaactctttccccacttttagaaattatgttaactatgatattaatctataattggtaaaggggagactgactgtaaagtcttatcttttggcttctatgaacttccctgtacttggacagggaggttataataaaatgcttttcctaattggataa

SEQ ID NO: 157129 - DNA, 739 bp, Homo sapiens
  Payload ID: 10795
  Gene Symbol: MTMR7
  Gene Name: myotubularin related protein 7
  ENST ID: ENST00000517317
  CDS Start-End: 16-333
agacgtgggccagccatggagcacatccgtacgcccaaggttgaaaatgtccgcttggtagatcgagtgtctcctaaaaaagcagctctaggtactttgtatttgacggctacccatgtcatattcgtggaaaattcacctgacccaagaaaagaaacatggattcttcacagtcagatttccaccattgagaaacaggcaacaaccgctaccggatgccctctgctgattcgctgcaagaactttcagataatacagctcatcatacctcaggaaagagattgccacgacgtgtacatctccctgatacgccttgcaaggccaggtctgtgactcttatcctactgaactgtacgttcccaaatcggccacggcacacatcatagtggggagttccaaattccggagtagacggcgatttcctgtcctttcttactattataaagataaccacgcctccatctgccggagcagccagcccctgtccggcttcagtgcccggtgcctagaggacgagcagatgctccaggccattaggaaagccaatccaggaagtgacttcgtttatgtcgttgacacccggcctaaacttaatgcaatggcaaatcgtgctgcagggaaaggctatgagaatgaagacaattattccaatatcaagtttcagtttatcgggatagagaacatccatgtcatgaggaacagtctgcagaaaatgctggaagtgtgtgaacttaaatct

SEQ ID NO: 157130 - DNA, 2639 bp, Homo sapiens
  Payload ID: 10796
  Gene Symbol: MTMR8
  Gene Name: myotubularin related protein 8
  Uniprot ID: Q96EF0
  ENST ID: ENST00000374852
  CDS Start-End: 69-2183
ggcggctagaccggtggcggcggcatctggagtagcactgagatcttccggtggcgggaactgcagtcatggatcatattacggtacccaaggtagaaaacgtgaaattggtggatcgttatgtgagtaagaaaccagctaatgggattctttatcttactgcaacccacctgatctatgtggaggcttcaggtgcagcccggaaagaaacatggattgcactccatcacattgccactgtggagaagttacccatcactagcctgggttgtcccctgaccctccgctgcaagaatttccgggtggcccactttgttttagattctgaccttgtgtgccatgaggtttatatttcactgctcaagctttctcagccagcattacctgaagatctttatgctttttcttataatcccaaatcctcaaaagagatgagggaaagtggatggaaactgattgacccaatatcagactttgggcgtatgggaatacccaacagaaactggaccataacagatgccaacagaaactatgagatatgcagcacctaccctcctgaaatagtggttcctaaatctgttaccttgggaacggtggttggaagttcaaagttcagaagtaaagaacgtgtccctgtgctctcctacctctacaaagagaacaatgctgccatttgccgctgtagccagcctctctctggattttacactcgctgtgtagatgatgagctcttgttggaggccattagccaaacaaacccagggagccagtttatgtatgttgtagacacaagaccaaagttgaatgccatggccaaccgagcagctgggaaggggtatgaaaatgaagacaactatgccaacattcgcttcagattcatgggcattgagaacatccatgtaatgcggagcagtctgcagaaactcttggaagtttgtgaattgaaaactccaacaatgagtgaatttcttagcggcctggagagctcagggtggttaagacacattaaagctattatggatgctggaattttcattacaaaggcagtgaaggtagaaaaggccagtgtcttagtccattgttctgatggatgggaccgcacagcacaagtctgctcagtggctagcatcctcctagatccattttataggacattcaaaggactcatgatcttgatagagaaggaatggatatccatgggccacaagttttcccaaaggtgtggccacctcgatggggactctaaagaagtgtcccctatcttcacccagttcctagactgtatctggcaattaatggaacagtttccctgtgcctttgagtttaatgaaaacttcctgctggagattcatgaccatgttttctcctgccagtttggaaacttccttggtaactgccagaaggatcgggaagatctaagagtctatgagaaaacacattctgtgtggcctttcttggttcagaggaaaccagacttcaggaaccctctctataaaggcttcactatgtatggggtactcaatcctagtactgtgccctacaacattcagttctggtgtgggatgtataaccgctttgacaaagggctgcagcccaagcagagtatgctagagagcctcctggaaattaagaaacagagagcaatgctggagacagatgtgcatgaactagaaaagaaactaaaagtccgtgatgagccaccagaagagatctgtacctgctctcaattaggaaacatattatcccagcatctgggaagtcctttgaccaatcctcttggctttatgggtatcaatggagacctgaataccctgatggagaatggcaccctatccagggaaggaggcctccgagctcagatggatcaagtaaaaagccagggtgcagacctccaccataactgttgtgagattgtgggcagccttagggccataaatatctctggggatgtgggcatctctgaggccatgggcatctctggagacatgtgcacctttgaggctacgggcttctccaaagacttaggaatctgtggggccatggacatctctgaggccactggcatctctggaaacttgggtatttctgaggccaggggtttctctggggacatgggcatcttgggggacacaggcatctccaaggccagcaccaaggaggcagactactccaagcatcagtgagttagttactcatcttccatgctaggtatacctacagcagctacaatgattcttgtcccagagagggctatgctgcttttccaattggtttaagtgggtgaagccagggcacccctctccccacttaagtctggaagggaattactttactgattaagtgaccaatatgttcatattaagcagtacagagtgtaggcaagagaaagaatatgttattgttctaaaatgggatttaactatagaaatgttgcctctcagctgagacacatattaagctggttctactgtctgttttccttaatgatcgacctgccctattttctatcctcactgcagtaatgtgaaagtgaagtggaaatattgtcacaatggtcaataatgacccttttgagggtatggagagatggtatacagcaggtaactgtgaattgcagaataaattgaaagaaaatttta

SEQ ID NO: 157131 - DNA, 7481 bp, Homo sapiens
  Payload ID: 10797
  Gene Symbol: MTMR9
  Gene Name: myotubularin related protein 9
  Uniprot ID: Q96QG7
  ENST ID: ENST00000221086
  CDS Start-End: 474-2123
gtcttccgagtttcgagacctgctgcttccgcccggagttgttgtgggctccagcagcgagtagccacttccgctaggagtccctagcggccagggcgtggaagcggattctgaggcggctttctcctactgccctccgcttgccaacgcgggacccggagcccaacggcagcggcggtccttgggcctgtggagaggggttctctgtggccgagtcctaggcctggtgaaccgcgcggtgcgggagaggcgcttgggcctcgtccagccccagcccctgtctccccgcggccggtgccggcggctgtaggcctcgccgcgcccacccagcctggggcgggcccagcctcaccgcccggcccgccccgccccacgggccagccccgcgccgggtgtttccgctacttccctgcggcggggtaaccgcctcgcacctaccgggctcggttccctggctccggccgcgggggagcatggagtttgcggagctgattaagaccccgcgggtggacaatgtggtgctgcaccggcctttctacccggctgtcgagggcaccctgtgcctgacgggccaccacttgatcctgtcctcccggcaggacaatacggaggagctgtggctcctccattcaaacatcgacgccatcgacaagcgatttgtaggatcactgggtaccatcatcataaaatgtaaagattttcgaattattcagttggatattcctggaatggaggaatgcttgaatatagccagttccattgaggcattgtctactctggactccatcactctgatgtaccctttcttttaccgtcctatgtttgaagtgatagaagatggctggcattccttccttcctgagcaagaatttgaactctattcttcagctaccagtgaatggaggctaagctatgtcaataaggaatttgctgtctgtccctcttacccaccaattgtcacagtgcccaaatccatcgatgatgaagctcttcggaaggtagctacatttcgacatggagggcgcttcccagtactaagctattaccacaaaaaaaatgggatggtaattatgcgaagtggtcagccactcactggtacaaacgggaggaggtgcaaggaggacgagaagctgataaatgctaccctcagggctggaaagcgtggctacatcattgacacccgatccctgaacgtggctcagcaaactagagccaaaggaggtggctttgaacaagaagctcattatcctcagtggaggcgaattcataagtccattgagaggtatcacattcttcaggagagcttaatcaaacttgtggaagcttgtaatgaccaaacacataacatggaccgatggctcagtaaattggaggcctctaactggctgactcacatcaaagagattctgacaactgcctgcctagcggctcagtgcatcgacagggaaggagcatcaatattgattcacggaacagaaggaactgattccacactccaggtgacctccttggcccagatcatcttagagccaagaagcaggaccattcgtggttttgaggccctgattgaaagagagtggctgcaggctggtcacccattccagcagcgctgtgcacagtcagcctactgtaacaccaagcagaagtgggaggctcctgtatttcttctcttcttggactgcgtgtggcagatccttcgtcagtttccctgttcttttgagtttaatgagaatttcctcatcatgctctttgagcatgcttatgcctcacagtttggaacatttctgggcaacaatgaaagtgaaagatgtaagttgaagctacagcagaagacgatgtctttgtggtcctgggttaatcagcccagtgagctgagtaaattcaccaatcccctctttgaagccaacaaccttgtcatctggccttcagttgctccgcagagtcttccactgtgggaaggtattttcctacgttggaatagatcctctaagtatttggatgaagcatatgaagaaatggttaacatcattgaatataataaagaattacaagcaaaagtcaatatccttcgaaggcagttggcagaactggaaacagaggacgggatgcaggagagtccctgaaaggtctcctcgcacccttcgcaaggaccttcttgggcctgtgtccgccgttctctccttgtgcccttcagttcacttttacacggtagccttgaagtgaaggctttagatgtgggacccccctaatgtaatggatttctcaatactgtatgaataatgaaacttactatcataaaccatgtttcatgtggcctgttagggcctgtcactttgggagccggaaggaggtgctagtcattttatttttacgtgaaatagatgacctatttaatgccatttgtgtttcatgccattttatccaaagctttttctctgtgtccactctccaaacagcattctagagcagtcaaggagacagctaatctctctagggactatttggtggtttaaaaaaagggtcagacttttaaacactctgaccatagaaatgtttttcaaaatggcaacaatggataaaccaaggattttgtgtttaacaatccatttccagtgtcttcgccacataaaatagccattttctttaaaatagttttggactaacgaagctgaaatctattctcattcttgtttgtcaagaaaggaaaatctgttattcaaggtaaattatttctacaagggcaacaggtatggtcctccgatatttacattaagaagagttaaatttattttaacgtagacactaaaagtatgtgcaatatacaattaaagtaggaatttgttactgattgagaattgttactggtgaattggttttcaggttttgagcatacatatacaatgtgtttcaaatgctgcttgtaaaattaaaccatcatctagaatagagttaatttattataatcaagctacaaataggttttcttaaaccagagatgcactgcccttgtctaaagttcttattgcactggtttatatgtgtatgtgtgttttattgtgtgtttttttaatttgtaagtattctaagagtttcctaatactaaggttaaaattttcatgttgacctgagccttttgcaaatttgctttggctctattgatttgtccattatgtgttaggcaaatataacttaagtggagggggaagtttatgaatataatatagctctgtgttttaaacctcagaaacagatttgagtgtttcagtattatagaaacagtgatgactattcatgctctgctagtctatgcctgcaactccaaatgtttgtggttcagtatttcccacctacatttctgtttggtgacattgctcattttaacaaatatgaccgagtctagtttttctttaaaaggatagtttatgagtaatctttaaaaccatttccataccatctgtatataaccatttcggtagagaacacactacactgaaccctgctttagagctgtgtgttgagctaaaaatataattttttaaaaattgactagcaaaatctatggccacactgagaagcctttgaaaatggcaaatacttttcatcaccaattgcccaattcatctttcttctgcttcctcagccttgtagcaaaggctacacagcagcccacagtccacagtctttttgggaaaattggcctgccaccttctttaagctcagtttatttttgacttactttctttgctgtagttatgaaccttggggcattaaaatcccatggcaaggagcataagagatgttctcgtagctctgcgttgtgtgaaatgtccatcttagttttgttaaaaaaaaaaaaaaaaaaaggaaacagcctcacttttttgtgctccctcagaattgcttgctatgtctgttaatacagctgagctttttgttttcttctctttttgtctcaagattgtatatgaaggaggcttttcttctcagctaacaggcatataaggaaaaccatctagagagttttctttagaagtgactcccattagcctggtgtggtggtgtgtgcctatagtcccagccactaggaaagctgaggcagaaggatcccttgagcctaggaggttgaggctgcagtgagctatgatcgcatcagtccactccagcctgagcaacagagcgagaccctgtgtctaagtaaagaaaaagccagaagtgactcccactgcttctgttgatcggccatagggcttccatgggtggaaacttgtgagggagtttgtattaggtctggtcatggagggatgatgtaccatcaaggtagacccatcttcctgatgcacatttgctgtgcgagccagagtacagtcataacacggtattcgcatttcgttttctctgtctcactgagacaacaatctatactgttttggcaagtttgcattttagtattaatttataattagggattgttcaaacttcagatctgtttacaggttgtaaaaataaacttcggtatcagtgcatctacagaagtgttatttggtaatccaaatattagagttttcccaaatccaaaaacggtcagaaataagtccattatcaatataatttgaagaagatttttagtagtactgtgaagttcgtgcttacctggatgagaagaataaatgacacggatacactcctgagaagacactcgttaaacattgcatcggagagctgcctttgataaatgtgctgttaaacacttgaatgaagagaatggtggcagaatgagtgagcaagcagattgccccagaggggccggtaataatcacgtgagggataatcagattcctgcgtattcagcatcttctctattcatgtggagtgaaagctggtttttatacaggagatacgtaaagtaggccccacaaataatatttttaaaatacaaaggatcaccacaatcctctattgaacatataaggatcctcagatttaaataagtactttttttttttttaatcagaagaacattgttgtttgattatatgtttttaaaaacctgaagcttttttggtggcaggacctttcaataaatatttatttggtcaaaattttttattttgattttattaaatgggaagaaagcaagcagaaatagtaaaattcagtaggtttaaaacaatctataaatgtattttatttccaagaaaacttagggtctcaaagcaagattttaaagtgatttttgagaagacttgggggggacaataatagacattcatgtcagatcccatatgggggatttttaaacatttctttgaactttgaggcctgatttaggggtgggattttattgctttttgttttaaaggatgaaattttgtggggttttagtctttgattcagtcagtatttggtttatgttaaataaaaaatcagtatcatggaaaagatatgaccataatttagtctcctcaagtgaaaaacaggagtaatgtttcgttgcactttgaaagatctgcttcaaggcataactcgtgtagttgtctggtttcagggatagctgtttgaattgtcattctaaagtaggtcatcaggttcacttattatccgaccttaatctgggataaaggttttggtatttgcccacttctagatagaatgaatgaaaacaacacaagcgttttatgagcactctttatcagaaaggtatttcctggaccagaaatgggcaatagttacaatagttgatcctctgttctggaagctttgaaatttatcagagaatgaagtcattcagtacatctgataaagttttgttgttgttgttgttgttgttgttttaattgggcaaccctcagaactgaagaggttcagagaactttccaggtttatactatacctcaagaccacatagattagctactgcttattctttcacatgggctaggcctgttctcctcctccagacctagtattctaagttattaccacatagtatttttatgttacccatcatctttaaaaacattataggctgggcatggtggcttacgcctgtaatcccagcactttgggaggccaaggcgggcggatcatgaggtcaggagatcgagaccatcctggctaacacggtgaaaacccatgtctactaaaaatacaaaaaattagccaggtgtggtggcgggcgcctgtagtcccagctactcaggaggctgaggcaggagaatggtgtgaacccgggaggcagagcttgcagtgagccgagatcgcaccactgcactccagcctgggcgaaagggcaagactccatctcaaaaaaaaaaaaaaaaaaagactcatttatccatttacatttattctcagatgataaaatatatactgatactataactttcttatggtatcagttttctttattttcttgaataaaattacttctaccttcatttggtctttataatccactgtccacagcatcttcctttaaaccaatagtcccagaagagaccctctgaaattctaggactggatattaaaatgcctgaacctgttatctaaatcctttttaagaaacttaatgttccagctcttgaactacactgtggaacagtaatttgtgcccaatttagtggaagataatgaggctcactgtaaacactacattgtcctgcaaagtaattctgatgagagtttactgacttctagagccattctctttaaccgtctgcaggtctaaggattaactatatttgtgatttgtaataaaactgagttgtacaacactgcctgtgtttgtctggccaagacatttgcttcacttttaaaatgcacgttatctttggagaggtgaattattctacaaaatgcaccctaaatctcattgtttaaaaccttactgatctaataccatctacacaaaaaaatgttgtagttgcagaacttagtttataaaaacaaagaatgtgtatttcttcaatagccgggtatttggattgttctcttgataatatttgaatgtgactcttggatttaagtgcactattattcatggcttatacaataaaattgcactgtatggcaaatatgtctataatgtatgctttgctgaaacctcaagagtgctgtaaggtacaggtttccatattgtgaacctgtgtacgcacacacacatatacatacagtcttagggaaaaaaaaaagcagaacttttgtaagtctgtgtaacattttaatattgtttgtaatattcactaggtgataatttcccctgtaccctataactgtaatcattcaccttgggttggccggtttgtcaagcttggtttactgaatcaagaaagagtcttgtcgaatgtggtactgttcttagtgtgtaatatttgcgtatggtgttcctctgcctcagaggacagttgcacagatggctagtgttaaatttctatagacgatggtaataaaatctgaatatatttaagtgctaataaattaaa

SEQ ID NO: 157132 - DNA, 1960 bp, Homo sapiens
  Payload ID: 10797
  Gene Symbol: MTMR9
  Gene Name: myotubularin related protein 9
  Uniprot ID: Q96QG7
  ENST ID: ENST00000526292
  CDS Start-End: 297-1691
tccgcagggagccgggggtcccttgtgggcgccccgggaaatacttcctggcgttttccgcgcagcctgccgcccagctagccggcaagatgagccctctgtggcctagaatcaggatttaccaagctgaaacccgtccagatggaggacccggtttccattaaacctggatggagttctcagggttatcgtgtggctggtaccatcctgatgatcatttctgatttgtaggatcactgggtaccatcatcataaaatgtaaagattttcgaattattcagttggatattcctggaatggaggaatgcttgaatatagccagttccattgaggcattgtctactctggactccatcactctgatgtaccctttcttttaccgtcctatgtttgaagtgatagaagatggctggcattccttccttcctgagcaagaatttgaactctattcttcagctaccagtgaatggaggctaagctatgtcaataaggaatttgctgtctgtccctcttacccaccaattgtcacagtgcccaaatccatcgatgatgaagctcttcggaaggtagctacatttcgacatggagggcgcttcccagtactaagctattaccacaaaaaaaatgggatggtaattatgcgaagtggtcagccactcactggtacaaacgggaggaggtgcaaggaggacgagaagctgataaatgctaccctcagggctggaaagcgtggctacatcattgacacccgatccctgaacgtggctcagcaaactagagccaaaggaggtggctttgaacaagaagctcattatcctcagtggaggcgaattcataagtccattgagaggtatcacattcttcaggagagcttaatcaaacttgtggaagcttgtaatgaccaaacacataacatggaccgatggctcagtaaattggaggcctctaactggctgactcacatcaaagagattctgacaactgcctgcctagcggctcagtgcatcgacagggaaggagcatcaatattgattcacggaacagaaggaactgattccacactccaggtgacctccttggcccagatcatcttagagccaagaagcaggaccattcgtggttttgaggccctgattgaaagagagtggctgcaggctggtcacccattccagcagcgctgtgcacagtcagcctactgtaacaccaagcagaagtgggaggctcctgtatttcttctcttcttggactgcgtgtggcagatccttcgtcagtttccctgttcttttgagtttaatgagaatttcctcatcatgctctttgagcatgcttatgcctcacagtttggaacatttctgggcaacaatgaaagtgaaagatgtaagttgaagctacagcagaagacgatgtctttgtggtcctgggttaatcagcccagtgagctgagtaaattcaccaatcccctctttgaagccaacaaccttgtcatctggccttcagttgctccgcagagtcttccactgtgggaaggtattttcctacgttggaatagatcctctaagtatttggatgaagcatatgaagaaatggttaacatcattgaatataataaagaattacaagcaaaagtcaatatccttcgaaggcagttggcagaactggaaacagaggacgggatgcaggagagtccctgaaaggtctcctcgcacccttcgcaaggaccttcttgggcctgtgtccgccgttctctccttgtgcccttcagttcacttttacacggtagccttgaagtgaaggctttagatgtgggacccccctaatgtaatggatttctcaatactgtatgaataatgaaacttactatcataaaccatgtttcatgtggcctgttagggcctgtcactttgggagccggaaggaggtgctagtcattttatttttacgtgaaatagatgacctattt

SEQ ID NO: 157133 - DNA, 3503 bp, Homo sapiens
  Payload ID: 10797
  Gene Symbol: MTMR9
  Gene Name: myotubularin related protein 9
  ENST ID: ENST00000530200
  CDS Start-End: 63-368
gcggcggggtaaccgcctcgcacctaccgggctcggttccctggctccggccgcgggggagcatggagtttgcggagctgattaagaccccgcgggtggacaatgtggtgctgcaccggcctttctacccggctgtcgagggcaccctgtgcctgacgggccaccacttgatcctgtcctcccggcaggacaatacggaggagctgtggctcctccattcaaacatcgacgccatcgacaagcgatttgtaggatcactgggtaccatcatcataaaatgtaaagattttcgaattattcagttggatattcctggaatggaggaatgcttgaatatagccagttccattgagaatccctcctgctagccctccacccttccccgaatacatctggacacgatttgcattgtctactctggactccatcactctgatgtaccctttcttttaccgtcctatgtttgaagtgatagaagatggctggcattccttccttcctgagcaagaatttgaactctattcttcagctaccagtgaatggaggctaagctatgtcaataaggaatttgctgtctgtccctcttacccaccaattgtcacagtgcccaaatccatcgatgatgaagctcttcggaaggtagctacatttcgacatggagggcgcttcccagtactaagctattaccacaaaaaaaatgggatggtaattatgcgaagtggtcagccactcactggtacaaacgggaggaggtgcaaggaggacgagaagctgataaatgctaccctcagggctggaaagcgtggctacatcattgacacccgatccctgaacgtggctcagcaaactagagccaaaggaggtggctttgaacaagaagctcattatcctcagtggaggcgaattcataagtccattgagaggtatcacattcttcaggagagcttaatcaaacttgtggaagcttgtaatgaccaaacacataacatggaccgatggctcagtaaattggaggcctctaactggctgactcacatcaaagagattctgacaactgcctgcctagcggctcagtgcatcgacagggaaggagcatcaatattgattcacggaacagaaggaactgattccacactccaggtgacctccttggcccagatcatcttagagccaagaagcaggaccattcgtggttttgaggccctgattgaaagagagtggctgcaggctggtcacccattccagcagcgctgtgcacagtcagcctactgtaacaccaagcagaagtgggaggctcctgtatttcttctcttcttggactgcgtgtggcagatccttcgtcagtttccctgttcttttgagtttaatgagaatttcctcatcatgctctttgagcatgcttatgcctcacagtttggaacatttctgggcaacaatgaaagtgaaagatgtaagttgaagctacagcagaagacgatgtctttgtggtcctgggttaatcagcccagtgagctgagtaaattcaccaatcccctctttgaagccaacaaccttgtcatctggccttcagttgctccgcagagtcttccactgtgggaaggtattttcctacgttggaatagatcctctaagtatttggatgaagcatatgaagaaatggttaacatcattgaatataataaagaattacaagcaaaagtcaatatccttcgaaggcagttggcagaactggaaacagaggacgggatgcaggagagtccctgaaaggtctcctcgcacccttcgcaaggaccttcttgggcctgtgtccgccgttctctccttgtgcccttcagttcacttttacacggtagccttgaagtgaaggctttagatgtgggacccccctaatgtaatggatttctcaatactgtatgaataatgaaacttactatcataaaccatgtttcatgtggcctgttagggcctgtcactttgggagccggaaggaggtgctagtcattttatttttacgtgaaatagatgacctatttaatgccatttgtgtttcatgccattttatccaaagctttttctctgtgtccactctccaaacagcattctagagcagtcaaggagacagctaatctctctagggactatttggtggtttaaaaaaagggtcagacttttaaacactctgaccatagaaatgtttttcaaaatggcaacaatggataaaccaaggattttgtgtttaacaatccatttccagtgtcttcgccacataaaatagccattttctttaaaatagttttggactaacgaagctgaaatctattctcattcttgtttgtcaagaaaggaaaatctgttattcaaggtaaattatttctacaagggcaacaggtatggtcctccgatatttacattaagaagagttaaatttattttaacgtagacactaaaagtatgtgcaatatacaattaaagtaggaatttgttactgattgagaattgttactggtgaattggttttcaggttttgagcatacatatacaatgtgtttcaaatgctgcttgtaaaattaaaccatcatctagaatagagttaatttattataatcaagctacaaataggttttcttaaaccagagatgcactgcccttgtctaaagttcttattgcactggtttatatgtgtatgtgtgttttattgtgtgtttttttaatttgtaagtattctaagagtttcctaatactaaggttaaaattttcatgttgacctgagccttttgcaaatttgctttggctctattgatttgtccattatgtgttaggcaaatataacttaagtggagggggaagtttatgaatataatatagctctgtgttttaaacctcagaaacagatttgagtgtttcagtattatagaaacagtgatgactattcatgctctgctagtctatgcctgcaactccaaatgtttgtggttcagtatttcccacctacatttctgtttggtgacattgctcattttaacaaatatgaccgagtctagtttttctttaaaaggatagtttatgagtaatctttaaaaccatttccataccatctgtatataaccatttcggtagagaacacactacactgaaccctgctttagagctgtgtgttgagctaaaaatataattttttaaaaattgactagcaaaatctatggccacactgagaagcctttgaaaatggcaaatacttttcatcaccaattgcccaattcatctttcttctgcttcctcagccttgtagcaaaggctacacagcagcccacagtccacagtctttttgggaaaattggcctgccaccttctttaagctcagtttatttttgacttactttctttgctgtagttatgaaccttggggcattaaaatcccatggcaaggagcataagagatgttctcgtagctctgcgttgtgtgaaatgtccatcttagttttgttaaaaaaaaaaaaaaaaaa

SEQ ID NO: 157134 - DNA, 1541 bp, Homo sapiens
  Payload ID: 10798
  Gene Symbol: MYOZ1
  Gene Name: myozenin 1
  Uniprot ID: Q9NP98
  ENST ID: ENST00000359322
  CDS Start-End: 366-1265
gtttctccctaagtgcttctttggatctcaggctctaggtgcaatgtgaaggggagtccctgggcagactgatccctggctcagacagttcagtgggagaatcccaaaggccttttccctccttcctgagcctccgggcaaggagggagggatcttggttccagggtctcagtaccccctgtgccatttgagctgcttgcgctcatcatctctattaataaccaacttccctcccccactgccagtgctgcccccacgcctgcccagctcgtgttctccggtcacagcagctcagtcctccaaagctgctggaccccagggagagctgaccactgcccgagcagccggctgaatccacctccacaatgccgctctcaggaaccccggcccctaataagaagaggaaatccagcaagctgatcatggaactcactggaggtggacaggagagctcaggcttgaacctgggcaaaaagatcagtgtcccaagggatgtgatgttggaggaactgtcgctgcttaccaaccggggctccaagatgttcaaactgcggcagatgagggtggagaagtttatttatgagaaccaccctgatgttttctctgacagctcaatggatcacttccagaagttccttccaacagtggggggacagctgggcacagctggtcagggattctcatacagcaagagcaacggcagaggcggcagccaggcagggggcagtggctctgccggacagtatggctctgatcagcagcaccatctgggctctgggtctggagctgggggtacaggtggtcccgcgggccaggctggcagaggaggagctgctggcacagcaggggttggtgagacaggatcaggagaccaggcaggcggagaaggaaaacatatcactgtgttcaagacctatatttccccatgggagcgagccatgggggttgacccccagcaaaaaatggaacttggcattgacctgctggcctatggggccaaagctgaacttcccaaatataagtccttcaacaggacggcaatgccctatggtggatatgagaaggcctccaaacgcatgaccttccagatgcccaagtttgacctggggcccttgctgagtgaacccctggtcctctacaaccaaaacctctccaacaggccttctttcaatcgaacccctattccctggctgagctctggggagcctgtagactacaacgtggatattggcatccccttggatggagaaacagaggagctgtgaggtgtttcctcctctgatttgcatcatttcccctctctggctccaatttggagagggaatgctgagcagatagcccccattgttaatccagtatccttatgggaatggagggaaaaaggagagatctacctttccatcctttactccaagtccccactccacgcatccttcctcaccaactcagagctccccttctacttgctccatatggaacctgctcgtttatggaatttgctctgccaccagtaacagtcaataaacttcaaggaaaatgaa

SEQ ID NO: 157135 - DNA, 2597 bp, Homo sapiens
  Payload ID: 10799
  Gene Symbol: MYOZ2
  Gene Name: myozenin 2
  Uniprot ID: Q9NPC6
  ENST ID: ENST00000307128
  CDS Start-End: 214-1008
atatagccagttgatgtcagctgaatgccagtctcttcagaaaagctcagtccccagtttgagtcagagtagggaccatgctgtcccaggttcaaggataaaaaccatcaggcccaagtgccatccatagtccatctccagagtcttcctccacaaactgggattcatccccgctgaaaaagcacaatctaacagcaagggaacaaaaaaaccatgctatcacataatactatgatgaagcagagaaaacagcaagcaacagccatcatgaaggaagtccatggaaatgatgttgatggcatggacctgggcaaaaaggtcagcatccccagagacatcatgttggaagaattatcccatctcagtaaccgtggtgccaggctatttaagatgcgtcaaagaagatctgacaaatacacatttgaaaatttccagtatcaatctagagcacaaataaatcacagtattgctatgcagaatgggaaagtggatggaagtaacttggaaggtggttcgcagcaagcccccttgactcctcccaacaccccagatccacgaagccctccaaatccagacaacattgctccaggatattctggaccactgaaggaaattcctcctgaaaaattcaacaccacagctgtccctaagtactatcaatctccctgggaacaagccattagcaatgatccggagcttttagaggctttatatcctaaacttttcaagcctgaaggaaaggcagaactgcctgattacaggagctttaacagggttgccacaccatttggaggttttgaaaaagcatcaagaatggttaaatttaaagttccagattttgagctactattgctaacagatcccaggtttatgtcctttgtcaatcccctttctggcagacggtcctttaataggactcctaagggatggatatctgagaatattcctatagtgataacaaccgaacctacagatgataccactgtaccagaatcagaagacctatgaaaagaaagttgtatgtgccacataaaactctgaatataaaagttgctgttctactattttaactactggcaaagccacttgcatttttcattagtagcaacaatagcaatttagtgattttccttttctgacattcaatttcaatctcagatcaaatactaataaacaattagaaatcttactttaaaaaacttataactcacttgtcttcattcataattttgttttcacctggtttaaagaatccagatattttactgcaaaagttcagatggaaaagtaattgacagtttcacctttgtctcattttatatgatttattacagtgtaagtttttcaagtggaatctagaatcaaaatacagggagagatatgaagacctattcagagtttcatctggggatgaaagctatggaagatgatgtacaaatgttattgatggagaaaatggttgggtgtgtcctttctggtgaccatgagaaaataatatgtcttgatgaagtcttttcattagtcactcttagaattctaaagtgctttgcacttttcaatatgttttgaatcattaggtaatttattctggatgatattctccaaaattcaattcagttattatattcatttagcattaagtcaaggagactgagaatgactcaagggacgtcatagtaccatagttttaaggaccaaggtgtgcccagaattcaagtttcacaaatcccaatgctgtgcattgattatgttcaactttatgtgtgcattcttagaagagtaagaacaaataaagtacaccgtaatatacatataaatacattcatgtttgtgagagaaggaaagagtaagtaatttgaattggcagctttctttgctaaatctttaaattctgttaagatcctcaagtaactggggagtacatgctttaggacacaaacaaaaacaaagggcatgaaagtatctgaaagcaatgtagcacatatctatcgtaatatatgtaatatattgacataaaagacacaaactaatataaagttatagttatatcttaaaatataattgaagaagcatatgacatataacttatagaaatcagtatcaattcctcccatttcaattcagttaagacttctgtgatagatgtttatagcagagaagaaatgtctcatcaatagaaaactatcagataaagtttaggagataggaagaaggactgtgtgtagtaatgaaaataccaagttgcaacattacatgtttacaaaaaaaaatctgtgtttgtagtgtggaagttggtgactgttttaatcatcatctagacttgttaagtagaaaaattttaaaaatttgcttatgaaaatataacccccagaaagtaacaatgacaaagtattatatttatatatattattgtagagaatttgtatatttttaaagatgtcttaagatatcttaattttatttataagttttggtgtttacctgttttaaaatgataatgttggcatctgtgataaactatcaatgaggctcccatcatgccattttttgttcattttaatctttaaaaaataaaaattaggcatattaattatgca

SEQ ID NO: 157136 - DNA, 3445 bp, Homo sapiens
  Payload ID: 10800
  Gene Symbol: MYOZ3
  Gene Name: myozenin 3
  Uniprot ID: Q8TDC0
  ENST ID: ENST00000297130
  CDS Start-End: 200-955
caggagagaagaaaggaaggaagaaaaggataagtcaagcaaagatattgaggagcaattcattcatccatctatctatccatccattccttccttcgacaaatatctgctgagttcctatcaagcaccattcttggcactaaggatataacagttaacaagcggaagctaccagcagctgaccctcaacatttccaggatgatccccaaggagcagaaggggccagtgatggctgccatgggggacctcactgaaccagtccctacgctggacctgggcaagaagctgagcgtgccccaggacctgatgatggaggagctgtcactacgcaacaacagagggtccctcctcttccagaagaggcagcgccgtgtgcagaagttcactttcgagttagcagccagccagcgggcgatgctggccggaagcgccaggaggaaggtgactggaacagcggagtcggggacggttgccaatgccaatggccctgaggggccgaactaccgctcggagctccacatcttcccggcctcacccggggcctcactcgggggtcccgagggcgcccaccctgcagccgcccctgctgggtgcgtccccagccccagcgccctggcgccaggctatgcggagccgctgaagggcgtcccgccagagaagttcaaccacaccgccatctccaagggctaccgctgcccttggcaggagttcgtcagctaccgggactaccagagcgatggccgaagtcacacccccagccccaacgactaccgaaatttcaacaagaccccggtgccatttggaggacccctcgtggggggcacttttcccaggccaggcacccccttcatcccggagcccctcagtggcttggaactcctccgtctcagacccagcttcaacagagtggcccagggctgggtccgtaacctcccagagtccgaggagctgtagccctagcctgaatcttcagttccccagtctcgggggcctggtaacatccggagccaagacttgtggacagcacttcacagttgaagaagggccttcacacacaaaacctgattgcaaatggcttcagaggtcaccaagttcagtcgtcccaaaacatgggtgtgtttcaaaattacctggggatgttgttccaaatccagacaactggactgtcccagacttgcagcatcagagtctcctgagtcgaggaatctgtattattaatagcaaccagggccgggtgtcgtggctcacgcctgtcatcccagcactttgggaggccgaggcaggaggatcacctgaggtcaggagtttgagaccagtctggccaaaatagtggaaccccgtcgctactaaaaatacaaaaatgagtcggacatggtggtgcatgcctgtaatcccagctacttgggaggctgagacaggagaatcacttgaactaggaggcagaggttgcagtgagccgagattgcgccactgcaccccagcctggacaacagagtgagactccttctcaaaagtaaataaataaatagcaaccagtactccaggtgattccagcataacttatccatggtttgtgtcattaggagtccacatccacacctctgctctttcctgttcctgtagtgtacactcccccggtgacagggtgctcactggcaccccatcttcctgtgaataactcaaataattagaaaatgttccttttactgagatgcagttggtcttcatctattcatgctctaaacagttcctaagcgctgactgtgcgctagacactgccaggcccgggcctcgaggaggaaaagacagtagggaagacattatagagcatgaagtcaccataattttccctaaagcatgcttattgacaattgaggaacaaagtgttgtggagcagaagaaggagtccctcaccctaggtgtgagatgggattctggaagcttcctgaaggatttgagtgggaccttgtgggaggcgtgagagtccatgaagggggtgtgagggggagggtatttctggaaagtggaccagcatgtgcaaaaatatggaactgagcacgggtgcagggtgttctgcagaagggagaaggctgtgctagaggagccagtgagggccagcatggggtgggcttcactaaggaaatggggaaggttttagtgatgggtcttgctgggtgctgtgtggggcgcatattggagaagggtaatgccagaagccaggaagcctgcaagggatgaggccatgggaatggagagaaggggccacccactgggcacctaacaggacaggtgcaaagtggggtgcttattaagattccttctttccactccattttgagcaggctgcttaaagtggtggtgatgatgatgatgatgatggcagctttatatcgagtgcctcagtgcttgggctggtagtagtttctctacatatcttatttctaattctcagaacaaccctgagagaaagatattgttgtccccactttacagatgtggatatttaggccaaaaggaggaagtgacttgtccaggggcagacaccaaatgggaatctgattccagtggatgtctcttttcagtgcactgggtggtcaatgcccactcgctctgaaatcatctgactgtgatgccctgccttggagtttagaagttgagtgcaggcttgggagtcagactggatggggtaggttctaactctgccactgctagccggatgaacttgagcaagtcatttcacatctccgagcctctgtttctccaagtgtaagatgaggacaagtataaaacctcctttatgggtttgttgtgaacacagtgcagggcacatttataataagagctcagtcaatggtaggtttcatgcaactgctgctctaggctggaaaagttgttcttgcactggatgcagcatgagaagctggctgctaagatgtcactgggggtcactaaagctgaagcctgaaggaaagcctctcattgctgtagagctctccctgcctctctctctgggggcgatggggaaggtcaggagtccagcccattcccagggtgtgtgggatagcgattgcattttccttttgctctggagtttcactccccttctgggtcccaagggcccaatggcctgacttttagaattgcttgcaattggtgttttctcttgaatttgggggctgccatttaaagccaggtttccatgagctgaagaccagccattcaagaatctgaaaagtagacaagaggactccagttgcctcaggttggttctgctgtgctctggaaagtaactgcagccaccaggtatgaaaaggagcctggtggggagaccactgcacccaaaacaaatcctttcttcttctgagaatgtgactttttctggtgttgtaaaaaagaaaaaaaaaagaatgctcattgtaaaaataaaaaaataataataagcaa

SEQ ID NO: 157137 - DNA, 1451 bp, Homo sapiens
  Payload ID: 10800
  Gene Symbol: MYOZ3
  Gene Name: myozenin 3
  Uniprot ID: Q8TDC0
  ENST ID: ENST00000517768
  CDS Start-End: 556-1311
aagaaaggcaggagagaagaaaggaaggaagaaaaggataagtcaagcaaagatattgaggagcaattcattcatccatctatctatccatccattccttccttcgacaaatatctgctgagttcctatcaagcaccattcttggcactaaggatataacagttaacaagcggaagctaccagcagctgaccctcaacatttccaggtgactttggtgtgtgcatatgtgagtgtgtgtgtacacgtgggtgcaagccctctgtctgcacaggcctgttgccagggcacctgtcttccctagggtctggtgcttttagcctctggctccagctcctattgcagcccgaaataaggctgtgacccatggcaaggcaggaatgattctcatcagctgaagccagagctggctgcaggggacaccctgctcgctgcctactgactgctgaccgctgactgcctacagggacgccacgcaactctcagcttcccgacagaggtgttaatcttgagggtctaagattccctcctgcctattgtggtcccatcctctcaggatgatccccaaggagcagaaggggccagtgatggctgccatgggggacctcactgaaccagtccctacgctggacctgggcaagaagctgagcgtgccccaggacctgatgatggaggagctgtcactacgcaacaacagagggtccctcctcttccagaagaggcagcgccgtgtgcagaagttcactttcgagttagcagccagccagcgggcgatgctggccggaagcgccaggaggaaggtgactggaacagcggagtcggggacggttgccaatgccaatggccctgaggggccgaactaccgctcggagctccacatcttcccggcctcacccggggcctcactcgggggtcccgagggcgcccaccctgcagccgcccctgctgggtgcgtccccagccccagcgccctggcgccaggctatgcggagccgctgaagggcgtcccgccagagaagttcaaccacaccgccatctccaagggctaccgctgcccttggcaggagttcgtcagctaccgggactaccagagcgatggccgaagtcacacccccagccccaacgactaccgaaatttcaacaagaccccggtgccatttggaggacccctcgtggggggcacttttcccaggccaggcacccccttcatcccggagcccctcagtggcttggaactcctccgtctcagacccagcttcaacagagtggcccagggctgggtccgtaacctcccagagtccgaggagctgtagccctagcctgaatcttcagttccccagtctcgggggcctggtaacatccggagccaagacttgtggacagcacttcacagttgaagaagggccttcacacacaaaacctgattgcaaatggcttcagaggtcaccaagtt

SEQ ID NO: 157138 - DNA, 605 bp, Homo sapiens
  Payload ID: 10800
  Gene Symbol: MYOZ3
  Gene Name: myozenin 3
  ENST ID: ENST00000520112
  CDS Start-End: 111-590
gagccggaggggcgccgcgccccaggtcacacagcgagtcagccaaggccaagaccaacccgcgctgcgaactcgtggcttcctcactgcagtcctccgtgtttcctgggatggggaggggtctcctgtgctggagcaactgtggcttcccattcccgccgtcctctcccctaactccgatcttccctcctccaaccgcgtccgcggaatgggggtggggcgaggtggggttgggggctgagggtggaagaacggaggcgctcccttccccccgcgcccctaggctatgcggagccgctgaagggcgtcccgccagagaagttcaaccacaccgccatctccaagggctaccgctgcccttggcaggagttcgtcagctaccgggactaccagagcgatggccgaagtcacacccccagccccaacgactaccgaaatttcaacaagaccccggtgccatttggaggacccctcgtggggggcacttttcccaggccaggcacccccttcatcccggagcccctcagtggcttggaactcctccgtctcagacccagcttcaacagagtggcccagggctgggtccgtaacctcccagagtccga

SEQ ID NO: 157139 - DNA, 576 bp, Homo sapiens
  Payload ID: 10800
  Gene Symbol: MYOZ3
  Gene Name: myozenin 3
  ENST ID: ENST00000523553
  CDS Start-End: 1-315
aatgccaatggccctgaggggccgaactaccgctcggagctccacatcttcccggcctcacccggggcctcactcgggggtcccgagggcgcccaccctgcagccgcccctgctgggtgcgtccccagccccagcgccctggcgccaggctatgcggagccgctgaagggcgtcccgccagagaagttcaaccacaccgccatctccaagggctaccgctgcccttggcaggagttcgtcagctaccgggactaccagagcgatggccgaagtcacacccccagccccaacgactaccgaaatttcaacaagtaaggcggggcgggcagcccgggggacagaccgggaggggcgggaagccagtcacagccacagcgggagcctgcgtttcctgagcactttctgcaggccaggctctgtccccagcgctttctattcattgactgagctctggctggaacagcgcctccgcacctggtaggtgctcagttaacgtgggagaaatgaagagtgaaggtgccgcacatcttggatattctccaggacatggtgggcgggtgctatgagttttcctgt

SEQ ID NO: 157140 - DNA, 1031 bp, Homo sapiens
  Payload ID: 10800
  Gene Symbol: MYOZ3
  Gene Name: myozenin 3
  Uniprot ID: Q8TDC0
  ENST ID: ENST00000615557
  CDS Start-End: 556-819
caaaaatttgttcacttggaaatgtggagatctttaacttgtaaagatcttgataaaacaagttacaggccgtgagccaccgcgcctggcccatatatgcttttttataataataaaaggctattttaaagttaaaagaacacaggtctaaaactgaactcctgatctttcccagaaccttctcctccctttgccttccccatctccgtgaatggctgctctatccttccagtggctaaggccagaaaccttgcagtcatcctctctcactcattgcccatacccatggcttacctttaaaaaatatcgagaatctgaccatttctcactacctccaccattatgggcaaagacctgcatggggaattcatgcaataaacacaaatggccaaagaacttcggaaacagtgctaaacttcactgagcaacaaacacatgcaaattaaactctgaggtgtcatttttgcccatcaggtgggcaaagatttcaaacaatcatgacacccggtgtcggcaagcttggtgagaaacaggcattcttacacacagcatgccatgcttcgagaggtggggcctggagtgtatgggggatggggtggtgagagcccgctctggcctttcctggcagtccctacgctggacctgggcaagaagctgagcgtgccccaggacctgatgatggaggagctgtcactacgcaacaacagagggtccctcctcttccagaagaggcagcgccgtgtgcagaagttcactttcgagttagcagccagccagcgggcggtgagtaagccaccattgtgctcatggggaaaatgaggaccacagagagccactggttagcctaaagtcaaacggtaagccaggctgaggactgtgatgttcccatcagattaggctcctgcctttcagtgtgatccttgaaaagtgttatctttttaggcatctctccctggatacagaacaaagtaaacaaagtggattagggggttgaggataagccgtggagtgaagggactctggctcctacc

SEQ ID NO: 157141 - DNA, 4275 bp, Homo sapiens
  Payload ID: 10801
  Gene Symbol: MARCKS
  Gene Name: myristoylated alanine-rich protein kinase C substrate
  Uniprot ID: P29966
  ENST ID: ENST00000612661
  CDS Start-End: 385-1383
cccgcatcttattagcaaccagggagatttctccattttcctcttgtctacagtgcggctacaaatctgggatttttttattacttctttttttttcgaactacacttgggctcctttttttgtgctcgacttttccaccctttttccctccctcctgtgctgctgctttttgatctcttcgactaaaatttttttatccggagtgtatttaatcggttctgttctgtcctctccaccacccccacccccctccctccggtgtgtgtgccgctgccgctgttgccgccgccgctgctgctgctgctcgccccgtcgttacaccaacccgaggctctttgtttcccctcttggatctgttgagtttctttgttgaagaagccagcatgggtgcccagttctccaagaccgcagcgaagggagaagccgccgcggagaggcctggggaggcggctgtggcctcgtcgccttccaaagcgaacggacaggagaatggccacgtgaaggtaaacggcgacgcttcgcccgcggccgccgagtcgggcgccaaggaggagctgcaggccaacggcagcgccccggccgccgacaaggaggagcccgcggccgccgggagcggggcggcgtcgccctccgcggccgagaaaggtgagccggccgccgccgctgcccccgaggccggggccagcccggtagagaaggaggcccccgcggaaggcgaggctgccgagcccggctcgcccacggccgcggagggagaggccgcgtcggccgcctcctcgacttcttcgcccaaggccgaggacggggccacgccctcgcccagcaacgagaccccgaaaaaaaaaaagaagcgcttttccttcaagaagtctttcaagctgagcggcttctccttcaagaagaacaagaaggaggctggagaaggcggtgaggctgaggcgcccgctgccgaaggcggcaaggacgaggccgccgggggcgcagctgcggccgccgccgaggcgggcgcggcctccggggagcaggcagcggcgccgggcgaggaggcggcagcgggcgaggagggggcggcgggtggcgacccgcaggaggccaagccccaggaggccgctgtcgcgccagagaagccgcccgccagcgacgagaccaaggccgccgaggagcccagcaaggtggaggagaaaaaggccgaggaggccggggccagcgccgccgcctgcgaggccccctccgccgccgggcccggcgcgcccccggagcaggaggcagcccccgcggaggagcccgcggccgccgcagcctcgtcagcctgcgcagccccctcacaggaggcccagcccgagtgcagtccagaagcccccccagcggaggcggcagagtaaaagagcaagcttttgtgagataatcgaagaacttttctcccccgtttgtttgttggagtggtgccaggtactggttttggagaacttgtctacaaccagggattgattttaaagatgtctttttttattttacttttttttaagcaccaaattttgttgttttttttttttctcccctccccacagatcccatctcaaatcattctgttaaccaccattccaacaggtcgaggagagcttaaacaccttcttcctctgccttgtttctcttttattttttattttttcgcatcagtattaatgtttttgcatactttgcatctttattcaaaagtgtaaactttctttgtcaatctatggacatgcccatatatgaaggagatgggtgggtcaaaaagggatatcaaatgaagtgatggggtcacaatggggaaattgaagtggtgcataacattgccaaaatagtgtgccactagaaatggtgtaaaggctgtcttttttttttttttaaaagaaaagttattaccatgtattttgtgaggcaggtttacaacactacaagtcttgagttaagaaggaaagaggaaaaaagaaaaaacaccaatacccagatttaaaaaaaaaaaaacgatcatagtcttaggagttcatttaaaccataggaacttttcacttatctcatgttagctgtaccagtcagtgattaagtagaactacaagttgtataggctttattgtttattgctggtttatgaccttaataaagtgtaattatgtattaccagcagggtgtttttaactgtgactattgtataaaaacaaatcttgatatccagaagcacatgaagtttgcaactttccaccctgcccatttttgtaaaactgcagtcatcttggaccttttaaaacacaaattttaaactcaaccaagctgtgataagtggaatggttactgtttatactgtggtatgtttttgattacagcagataatgctttcttttccagtcgtctttgagaataaaggaaaaaaaatcttcagatgcaatggttttgtgtagcatcttgtctatcatgttttgtaaatactggagaagctttgaccaatttgacttagagatggaatgtaactttgcttacaaaaattgctattaaactcctgcttaaggtgttctaattttctgtgagcacactaaaagcgaaaaataaatgtgaataaaatgtacaaatttgttgtgtttttttatgttctaataatactgagacttctaggtcttaggttaatttttaggaagatcttgcatgccatcaggagtaaattttattgtggttcttaatctgaagttttcaagctctgaaattcataatccgcagtgtcagattacgtagaggaagatcttacaacatttccatgtcaaatctgttaccatttattggcatttagttttcatttaagaattgaacataattatttttattgtagctatatagcatgtcagattaaatcatttacaacaaaaggggtgtgaacctaagactatttaaatgtcttatgagaaaatttcataaagccattctcttgtcattcaggtccagaaacaaattttaaactgagtgagagtctatagaatccatactgcagatgggtcatgaaatgtgaccaaatgtgtttcaaaaattgatggtgtattacctgctattgtaattgcttagtgcttggctaatttccaaattattgcataatatgttctaccttaagaaaacaggtttatgtaacaaagtaatggtgttgaatggatgatgtcagttcatgggcctttagcatagttttaagcatccttttttttttttttttttgaaagtgtgttagcatcttgttactcaaaggataagacagacaataatacttcactgaatcttaataatctttactagtttacctcctctgctctttgccacccgataactggatatcttttccttcaaaggaccctaaactgattgaaatttaagatatgtatcaaaaacattatttcatttaatgcacatctgttttgctgtttttgagcagtgtgcagtttagggttcatgataaatcattgaaccacatgtgtaacaactgaatgccaaatcttaaactcattagaaaaataacaaattaggttttgacacgcattcttaattggaataatggatcaaaaatagtggttcatgaccttaccaaacacccttgctactaataaaatcaaataacacttagaagggtatgtatttttagttagggtttcttgatcttggaggatgtttgaaagttaaaaattgaatttggtaaccaaaggactgatttatgggtctttcctatcttaaccaacgttttcttagttacctagatggccaagtacagtgcctggtatgtagtaagactcagtaaaaaagtggatttttaaaaataactcccaaagtgaatagtcaaaaatcctgttagcaaactgttatatattgctaagtttgttcttttaacagctggaatttattaagatgcattattttgattttattcactgcctaaaacactttgggtggtattgatggagttggtggattttcctccaagtgattaaatgaaatttgacgtatcttttcatccaaagttttgtacatcatgttttctaacggaaaaaaatgttaatatggcttttttgtattactaaaaatagctttgagattaaggaaaaataaataactcttgtacagttcagtattgtctattaaatctgtattggcagtatgtataatggcatttgctgtggttacaaaatacttcctctgggttataataatcatttgatccaattcctattgcttgtaaaataaagttttaccagttgatataa

SEQ ID NO: 157142 - DNA, 1868 bp, Homo sapiens
  Payload ID: 10801
  Gene Symbol: MARCKS
  Gene Name: myristoylated alanine-rich protein kinase C substrate
  ENST ID: ENST00000617290
  CDS Start-End: 309-1301
tttattacttctttttttttcgaactacacttgggctcctttttttgtgctcgacttttccaccctttttccctccctcctgtgctgctgctttttgatctcttcgactaaaatttttttatccggagtgtatttaatcggttctgttctgtcctctccaccacccccacccccctccctccggtgtgtgtgccgctgccgctgttgccgccgccgctgctgctgctgctcgccccgtcgttacaccaacccgaggctctttgtttcccctcttggatctgttgagtttctttgttgaagaagccagcatgggtgcccagttctccaagaccgcagcgaagggagaagccgccgcggagaggcctggggaggcggctgtggcctcgtcgccttccaaagcgaacggacaggagaatggccacgtgaaggtaaacggcgacgcttcgcccgcggccgccgagtcgggcgccaaggaggagctgcaggccaacggcagcgccccggccgccgacaaggaggagcccgcggccgccgggagcggggcggcgtcgccctccgcggccgagaaaggtgagccggccgccgccgctgcccccgaggccggggccagcccggtagagaaggaggcccccgcggaaggcgaggctgccgagcccggctcgcccacggccgcggagggagaggccgcgtcggccgcctcctcgacttcttcgcccaaggccgaggacggggccacgccctcgcccagcaacgagaccccgaaaaaaaaaaagaagcgcttttccttcaagaagtctttcaagctgagcggcttctccttcaagaagaacaagaaggaggctggagaaggcggtgaggctgaggcgcccgctgccgaaggcggcaaggacgaggccgccgggggcgcagctgcggccgccgccgaggcgggcgcggcctccggggagcaggcagcggcgccgggcgaggaggcggcagcgggcgaggagggggcggcgggtggcgacccgcaggaggccaagccccaggaggccgctgtcgcgccagagaagccgcccgccagcgacgagaccaaggccgccgaggagcccagcaaggtggaggagaaaaaggccgaggaggccggggccagcgccgccgcctgcgaggccccctccgccgccgggccggcgcgcccccggagcggaggcagcccccgcggaggagcccgcggccgccgcagcctcgtcagcgcagccccctcacaggaggcccagcccgagtgcagtccagaagcccccccagcggaggcggcagagtaaaagagcaagcttttgtgagataatcgaagaacttttctcccccgtttgtttgttggagtggtgccaggtactggttttggagaacttgtctacaaccagggattgattttaaagatgtctttttttattttacttttttttaagcaccaaattttgttgttttttttttttctcccctccccacagatcccatctcaaatcattctgttaaccaccattccaacaggtcgaggagagcttaaacaccttcttcctctgccttgtttctcttttattttttattttttcgcatcagtattaatgtttttgcatactttgcatctttattcaaaagtgtaaactttctttgtcaatctatggacatgcccatatatgaaggagatgggtgggtcaaaaagggatatcaaatgaagtgatggggtcacaatggggaaattgaagtggtgcataacattgccaaaatagtgtgccactagaaatggtgtaaaggctgtcttttttttttttttaaaagaaaagttattaccatgtattttgtgaggcaggtttacaacactacaagtcttg

SEQ ID NO: 157143 - DNA, 1525 bp, Homo sapiens
  Payload ID: 10802
  Gene Symbol: MEAF6
  Gene Name: MYST/Esa1-associated factor 6
  Uniprot ID: Q9HAF1
  ENST ID: ENST00000296214
  CDS Start-End: 29-604
gcgccgccgccgcccgcctcagcccaacatggcgatgcacaacaaggcggcgccgccgcagatcccggacacccggcgggagctggcggagctcgtgaagcggaagcaggagctggcggaaacattggcaaatttggagcgacagatctatgcttttgagggaagctacctggaagacactcagatgtatggcaatattattcgtggctgggatcggtatctgaccaaccaaaaaaactccaatagcaaaaatgatcgaaggaaccggaagtttaaggaagctgagcggctcttcagtaaatcctcggttacctcagcagctgcagtaagtgcattggcaggagttcaggaccagctcattgaaaagagggagccaggaagtgggacggaaagtgacacttctccagacttccacaatcaggaaaatgagcccagccaggaggaccctgaggatctggatggatctgtgcagggagtgaaacctcagaaggctgcttcttctacttcctcagggagtcaccacagcagccataaaaagcgaaagaataaaaaccggcacaggattgatctgaagttaaacaaaaaaccacgagctgactattagaagacacattagtgcagaagcttccaggctgtagagccctgcttcccttctctgacctcacaaagataaacatccttcacctgagttcgtggccatccacctctgctctcccagacccagtgcctgtgactttgagtagtttgttctaaatgtggtgacaaacaagtcatttctgtaagacattgggtcttactttatgtcatttttagtaacagaactgcaggaagatgaagacaatgttgtaatcccagcaagttgctaactgtgcgtttctcccttcttagaatgaatgtctcccccaaaactggctggcaccagcttcatctgtgatacccttcaagaaatgttctctggttttgttttatgctgaaagtagaacacaagtcacatttcagatggaggctgtaaatatctggcattttcttatattgttttatgttttcttgtttttctcttgttgtttttatcttattttctttggggtttttttgtaatgcctttgtacagctcatactttcctgctgacatatctgatcatctctttcatgcagttgccaatattcataactgaaaataatctggtttatcataagtaaaatgggaaacttgcctctgttttttgcaaggggaggtaaagagtgtttagtaattacctatcttaaatctttctgagttggtagtagattcatgttcaaggaacaggaaaaatggaaaaacataagtttaaatcagttctttttaaataactttttattcttttgtataaataaaatttcacaggcttcaaattctcatgctttacttttaaacccgagattgttttttcacttatttattcatatcatgccttatggaaatttctttttctgtattttctctctttgctggtattcacctgattaaatattgctctaaaaatca

SEQ ID NO: 157144 - DNA, 603 bp, Homo sapiens
  Payload ID: 10802
  Gene Symbol: MEAF6
  Gene Name: MYST/Esa1-associated factor 6
  Uniprot ID: Q9HAF1
  ENST ID: ENST00000373073
  CDS Start-End: 18-596
gcccgcctcagcccaacatggcgatgcacaacaaggcggcgccgccgcagatcccggacacccggcgggagctggcggagctcgtgaagcggaagcaggagctggcggaaacattggcaaatttggagcgacagatctatgcttttgagggaagctacctggaagacactcagatgtatggcaatattattcgtggctgggatcggtatctgaccaaccaaaaaaactccaatagcaaaaatgatcgaaggaaccggaagtttaaggaagctgagcggctcttcagtaaatcctcggttacctcagcagctgcagtaagtgcattggcaggagttcaggaccagctcattgaaaagagggagccaggaagtgggacggaaagtgacacttctccagacttccacaatcaggaaaatgagcccagccaggaggaccctgaggatctggatggatctgtgcagggagtgaaacctcagaaggctgcttcttctacttcctcagggagtcaccacagcagccataaaaagcgaaagaataaaaaccggcacagaatgaatgtctcccccaaaactggctggcaccagcttcatctgtgataccctt

SEQ ID NO: 157145 - DNA, 2005 bp, Homo sapiens
  Payload ID: 10802
  Gene Symbol: MEAF6
  Gene Name: MYST/Esa1-associated factor 6
  ENST ID: ENST00000373074
  CDS Start-End: 708-1217
agggggacccagtcaccccgtctggactttggaggctggtggggagcgtgttctttttggtactgggagtagatccgttgaatggaggtttttgatagacagggttgtgatgtgtttgggaacatctagaaggtgacaggcgagggagaagaacacattccggagaattcagaattgtgacaggcacccaaggcccaatgcactctggtggctaagctcttcctgcccccgcgtctcggcttgggcacccgggaggcccctctcacctgaagctgcccttctaggtttccatagcaactggcagcccggtgtcggcggcctctcttgagcctgcggggaggggagcgagttgacgctgaaaggctgctcacctttccctctcctggtagcgataccttttgtgcgtgggagtggacatcgcccaagttctgcgttagcctgggctcttgactcatggtttccgtgaatcctctaaagtatatgcaaaatttcgcgtgtgtgtgtatttttctggagacatgctttatacattcaggggtccatcacccccaaaggtctagactgtcttagtcctaaacggctcctcctccccgtatcttccatctctccacagggtggtttagtgtgggcaagcttgcgtttacgagtctaatatcaggatttcattttggccagacttaagtgtttgcatttaaaaggtatcattcatgtccttgtttttcatctctcaggaaacattggcaaatttggagcgacagatctatgcttttgagggaagctacctggaagacactcagatgtatggcaatattattcgtggctgggatcggtatctgaccaaccaaaaaaactccaatagcaaaaatgatcgaaggaaccggaagtttaaggaagctgagcggctcttcagtaaatcctcggttacctcagcagctgcagtaagtgcattggcaggagttcaggaccagctcattgaaaagagggagccaggaagtgggacggaaagtgacacttctccagacttccacaatcaggaaaatgagcccagccaggaggaccctgaggatctggatggatctgtgcagggagtgaaacctcagaaggctgcttcttctacttcctcagggagtcaccacagcagccataaaaagcgaaagaataaaaaccggcacaggattgatctgaagttaaacaaaaaaccacgagctgactattagaagacacattagtgcagaagcttccaggctgtagagccctgcttcccttctctgacctcacaaagataaacatccttcacctgagttcgtggccatccacctctgctctcccagacccagtgcctgtgactttgagtagtttgttctaaatgtggtgacaaacaagtcatttctgtaagacattgggtcttactttatgtcatttttagtaacagaactgcaggaagatgaagacaatgttgtaatcccagcaagttgctaactgtgcgtttctcccttcttagaatgaatgtctcccccaaaactggctggcaccagcttcatctgtgatacccttcaagaaatgttctctggttttgttttatgctgaaagtagaacacaagtcacatttcagatggaggctgtaaatatctggcattttcttatattgttttatgttttcttgtttttctcttgttgtttttatcttattttctttggggtttttttgtaatgcctttgtacagctcatactttcctgctgacatatctgatcatctctttcatgcagttgccaatattcataactgaaaataatctggtttatcataagtaaaatgggaaacttgcctctgttttttgcaaggggaggtaaagagtgtttagtaattacctatcttaaatctttctgagttggtagtagattcatgttcaaggaacaggaaaaatggaaaaacataagtttaaatcagttctttttaaataactttttattcttttgtataaataaaatttcacaggcttcaaa

SEQ ID NO: 157146 - DNA, 2147 bp, Homo sapiens
  Payload ID: 10802
  Gene Symbol: MEAF6
  Gene Name: MYST/Esa1-associated factor 6
  Uniprot ID: Q9HAF1
  ENST ID: ENST00000373075
  CDS Start-End: 18-623
gcccgcctcagcccaacatggcgatgcacaacaaggcggcgccgccgcagatcccggacacccggcgggagctggcggagctcgtgaagcggaagcaggagctggcggaaacattggcaaatttggagcgacagatctatgcttttgagggaagctacctggaagacactcagatgtatggcaatattattcgtggctgggatcggtatctgaccaaccaaaaaaactccaatagcaaaaatgatcgaaggaaccggaagtttaaggaagctgagcggctcttcagtaaatcctcggttacctcagcagctgcagtaagtgcattggcaggagttcaggaccagctcattgaaaagagggagccaggaagtgggacggaaagtgacacttctccagacttccacaatcaggaaaatgagcccagccaggaggaccctgaggatctggatggatctgtgcagggagtgaaacctcagaaggctgcttcttctacttcctcagggagtcaccacagcagccataaaaagcgaaagaataaaaaccggcacagcccgtctggcatgtttgattatgactttgagattgatctgaagttaaacaaaaaaccacgagctgactattagaagacacattagtgcagaagcttccaggctgtagagccctgcttcccttctctgacctcacaaagataaacatccttcacctgagttcgtggccatccacctctgctctcccagacccagtgcctgtgactttgagtagtttgttctaaatgtggtgacaaacaagtcatttctgtaagacattgggtcttactttatgtcatttttagtaacagaactgcaggaagatgaagacaatgttgtaatcccagcaagttgctaactgtgcgtttctcccttcttagaatgaatgtctcccccaaaactggctggcaccagcttcatctgtgatacccttcaagaaatgttctctggttttgttttatgctgaaagtagaacacaagtcacatttcagatggaggctgtaaatatctggcattttcttatattgttttatgttttcttgtttttctcttgttgtttttatcttattttctttggggtttttttgtaatgcctttgtacagctcatactttcctgctgacatatctgatcatctctttcatgcagttgccaatattcataactgaaaataatctggtttatcataagtaaaatgggaaacttgcctctgttttttgcaaggggaggtaaagagtgtttagtaattacctatcttaaatctttctgagttggtagtagattcatgttcaaggaacaggaaaaatggaaaaacataagtttaaatcagttctttttaaataactttttattcttttgtataaataaaatttcacaggcttcaaattctcatgctttacttttaaacccgagattgttttttcacttatttattcatatcatgccttatggaaatttctttttctgtattttctctctttgctggtattcacctgattaaatattgctctaaaaatcaccatggcatatggaaagtctcaaaattataccaaaagtgataacttatgtcgttcttaagtggagtgaaaggatagcatcagtgagagccagtgttgcccaccaggtctccctttcttggagggcttgttggggctgaggaatctgctagtaatcgttacctgcctctagtgctgtggtgaacttgcgacagggtctggctgcacattggaatcacctgagaagctttaaaatactcatgcctggatcccatccctagagactggggtacagcctagttattgggaatttctttaaaagagttcctgggattctgataagaagccaggttgagaaccactacattagaagactgaatggtttaatttacatcctatgttatgattggtctaagggataagatttggggtctaacctttcctttcactctagttagtcatagtccttgacttatgcctatatctttgtaagaaatagtatgtttcatttgtgatagtattggtagggctgaatatggatggcatctactgtaaaacaagtctaccttgtcagatgtgcaaaagctttcactcttgttctcaaataaacttttgtgggttttttt

SEQ ID NO: 157147 - DNA, 666 bp, Homo sapiens
  Payload ID: 10802
  Gene Symbol: MEAF6
  Gene Name: MYST/Esa1-associated factor 6
  Uniprot ID: Q9HAF1
  ENST ID: ENST00000448519
  CDS Start-End: 1-576
atggcgatgcacaacaaggcggcgccgccgcagatcccggacacccggcgggagctggcggagctcgtgaagcggaagcaggagctggcggaaacattggcaaatttggagcgacagatctatgcttttgagggaagctacctggaagacactcagatgtatggcaatattattcgtggctgggatcggtatctgaccaaccaaaaaaactccaatagcaaaaatgatcgaaggaaccggaagtttaaggaagctgagcggctcttcagtaaatcctcggttacctcagcagctgcagtaagtgcattggcaggagttcaggaccagctcattgaaaagagggagccaggaagtgggacggaaagtgacacttctccagacttccacaatcaggaaaatgagcccagccaggaggaccctgaggatctggatggatctgtgcagggagtgaaacctcagaaggctgcttcttctacttcctcagggagtcaccacagcagccataaaaagcgaaagaataaaaaccggcacagcccgtctggcatgtttgattatgactttgagtatgtatattaggttaggctgggaagttttttttaaaaacagaaaaacgtgatggaggattgatctgaagttaaacaaaaaaccacgagctgtaagtatcag

SEQ ID NO: 157148 - DNA, 837 bp, Homo sapiens
  Payload ID: 10803
  Gene Symbol: NAA10
  Gene Name: N(alpha)-acetyltransferase 10, NatA catalytic subunit
  Uniprot ID: P41227
  ENST ID: ENST00000370009
  CDS Start-End: 112-774
agcgagcccagctccggtcccagccccggccgtcccggcgtcgcttcggagcgcggcggcagctgactgcgccttcacgatccgctgggacccgcgagccccgccgccgttatgaacatccgcaatgcgaggccagaggacctaatgaacatgcagcactgcaacctcctctgcctgcccgagaactaccagatgaaatactacttctaccatggcctttcctggccccagctctcttacattgctgaggacgagaatgggaagattgtggggtatgtcctggccaaaatggaagaggacccagatgatgtgccccatggacatatcacctcattggctgtgaagcgttcccaccggcgcctcggtctggctcagaaactgatggaccaggcctctcgagccatgatagagaacttcaatgccaaatatgtctccctgcatgtcaggaagaggatcagtgaagtggagcccaaatactatgcagatggggaggacgcctatgccatgaagcgggacctcactcagatggccgacgagctgaggcggcacctggagctgaaagagaagggcaggcacgtggtgctgggtgccatcgagaacaaggtggagagcaaaggcaattcacctccgagctcaggagaggcctgtcgcgaggagaagggcctggctgccgaggatagtggtggggacagcaaggacctcagcgaggtcagcgagaccacagagagcacagatgtcaaggacagctcagaggcctccgactcagcctcctagagcctgccccatcccctcctcaccccacgagctttcacaataaattcgctccgtggcactggg

SEQ ID NO: 157149 - DNA, 538 bp, Homo sapiens
  Payload ID: 10803
  Gene Symbol: NAA10
  Gene Name: N(alpha)-acetyltransferase 10, NatA catalytic subunit
  ENST ID: ENST00000370011
  CDS Start-End: 112-538
agcgagcccagctccggtcccagccccggccgtcccggcgtcgcttcggagcgcggcggcagctgactgcgccttcacgatccgctgggacccgcgagccccgccgccgttatgaacatccgcaatgcgaggccagaggacctaatgaacatgcagcactgcaacctcctctgcctgcccgagaactaccagatgaaatactacttctaccatggcctttcctggccccagctctcttacattgctgaggacgagaatgggaagattgtgggggaagaggacccagatgatgtgccccatggacatatcacctcattggctgtgaagcgttcccaccggcgcctcggtctggctcagaaactgatggaccaggcctctcgagccatgatagagaacttcaatgccaaatatgtctccctgcatgtcaggaagaggatcagtgaagtggagcccaaatactatgcagatggggaggacgcctatgccatgaagcgggacctcactcagatggccgacgagctgaggcggcacctggagc

SEQ ID NO: 157150 - DNA, 1002 bp, Homo sapiens
  Payload ID: 10803
  Gene Symbol: NAA10
  Gene Name: N(alpha)-acetyltransferase 10, NatA catalytic subunit
  ENST ID: ENST00000370015
  CDS Start-End: 138-647
gcgcaccgccccttccgccgtcgcccagcgagcccagctccggtcccagccccggccgtcccggcgtcgcttcggagcgcggcggcagctgactgcgccttcacgatccgctgggacccgcgagccccgccgccgttatgaacatccgcaatgcgaggccagaggacctaatgaacatgcagcactgcaacctcctctgcctgcccgagaactaccagatgaaatactacttctaccatggcctttcctggccccagctctcttacattgctgaggacgagaatgggaagattgtggggtatgtcctggccaaaatggaagaggacccagatgatgtgccccatggacatatcacctcattggctgtgaagcgttcccaccggcgcctcggtctggctcagaaactgatggaccaggcctctcgagccatgatagagaacttcaatgccaaatatgtctccctgcatgtcaggaagagtaaccgggccgccctgcacctctattccaacaccctcaactttcagatcagtgaagtggagcccaaatactatgcagatggggaggacgcctatgccatgaagcgggacctcactcagatggccgacgagccagcgacagggccaggctccctttgtctggaaacttaggccctgtctctttgcccccgcttctccctgggttcctggtggcagctgaggcggcacctggagctgaaagagaagggcaggcacgtggtgctgggtgccatcgagaacaaggtggagagcaaaggcaattcacctccgagctcaggagaggcctgtcgcgaggagaagggcctggctgccgaggatagtggtggggacagcaaggacctcagcgaggtcagcgagaccacagagagcacagatgtcaaggacagctcagaggcctccgactcagcctcctagagcctgccccatcccctcctcaccccacgagctttcacaataaattcgctccgtggcactggggaactttgtg

SEQ ID NO: 157151 - DNA, 908 bp, Homo sapiens
  Payload ID: 10803
  Gene Symbol: NAA10
  Gene Name: N(alpha)-acetyltransferase 10, NatA catalytic subunit
  ENST ID: ENST00000393712
  CDS Start-End: 55-609
ggcagctgactgcgccttcacgatccgctgggacccgcgagccccgccgccgttatgaacatccgcaatgcgaggccagaggacctaatgaacatgcagcactgcaacctcctctgcctgcccgagaactaccagatgaaatactacttctaccatggcctttcctggccccagctctcttacattgctgaggacgagaatgggaagattgtggggtatgtcctggccaaaatggaagaggacccagatgatgtgccccatggacatatcacctcattggctgtgaagcgttcccaccggcgcctcggtctggctcagaaactgatggaccaggcctctcgagccatgatagagaacttcaatgccaaatatgtctccctgcatgtcaggaagagtaaccgggccgccctgcacctctattccaacaccctcaactttcagatcagtgaagtggagcccaaatactatgcagatggggaggacgcctatgccatgaagcgggacctcactcagatggccgacgagcgacagggccaggctccctttgtctggaaacttaggccctgtctctttgcccccgcttctccctgggttcctggtggcagctgaggcggcacctggagctgaaagagaagggcaggcacgtggtgctgggtgccatcgagaacaaggtggagagcaaaggcaattcacctccgagctcaggagaggcctgtcgcgaggagaagggcctggctgccgaggatagtggtggggacagcaaggacctcagcgaggtcagcgagaccacagagagcacagatgtcaaggacagctcagaggcctccgactcagcctcctagagcctgccccatcccctcctcaccccacgagctttcacaataaattcgctccgtggcactggggaa

SEQ ID NO: 157152 - DNA, 599 bp, Homo sapiens
  Payload ID: 10803
  Gene Symbol: NAA10
  Gene Name: N(alpha)-acetyltransferase 10, NatA catalytic subunit
  ENST ID: ENST00000432089
  CDS Start-End: 163-599
acttccggccggtggccggcccggcgcgcaccgccccttccgccgtcgcccagcgagcccagctccggtcccagccccggccgtcccggcgtcgcttcggagcgcggcggcagctgactgcgccttcacgatccgctgggacccgcgagccccgccgccgttatgaacatccgcaatgcgaggccagaggacctaatgaacatgcagcactgcaacctcctctgcctgcccgagaactaccagatgaaatactacttctaccatggcctttcctggccccagctctcttacattgctgaggacgagaatgggaagattgtgggggaagaggacccagatgatgtgccccatggacatatcacctcattggctgtgaagcgttcccaccggcgcctcggtctggctcagaaactgatggaccaggcctctcgagccatgatagagaacttcaatgccaaatatgtctccctgcatgtcaggaagagtaaccgggccgccctgcacctctattccaacaccctcaactttcagatcagtgaagtggagcccaaatactatgcagatggggaggacgcctatgccatgaagcgggacctcac

SEQ ID NO: 157153 - DNA, 1772 bp, Homo sapiens
  Payload ID: 10803
  Gene Symbol: NAA10
  Gene Name: N(alpha)-acetyltransferase 10, NatA catalytic subunit
  Uniprot ID: P41227
  ENST ID: ENST00000464845
  CDS Start-End: 320-1027
cgcgccgagggaggggccggctccagctccggggcagcgcccgccccgcccccaggcccgccccgcgctgaccggctccgcgcattggcccgccccgtgcgctggcctgtcccgcgcattggccaagcggccgggaggacgggcccggcggccgtgcacttccggccggtggccggcccggcgcgcaccgccccttccgccgtcgcccagcgagcccagctccggtcccagccccggccgtcccggcgtcgcttcggagcgcggcggcagctgactgcgccttcacgatccgctgggacccgcgagccccgccgccgttatgaacatccgcaatgcgaggccagaggacctaatgaacatgcagcactgcaacctcctctgcctgcccgagaactaccagatgaaatactacttctaccatggcctttcctggccccagctctcttacattgctgaggacgagaatgggaagattgtggggtatgtcctggccaaaatggaagaggacccagatgatgtgccccatggacatatcacctcattggctgtgaagcgttcccaccggcgcctcggtctggctcagaaactgatggaccaggcctctcgagccatgatagagaacttcaatgccaaatatgtctccctgcatgtcaggaagagtaaccgggccgccctgcacctctattccaacaccctcaactttcagatcagtgaagtggagcccaaatactatgcagatggggaggacgcctatgccatgaagcgggacctcactcagatggccgacgagctgaggcggcacctggagctgaaagagaagggcaggcacgtggtgctgggtgccatcgagaacaaggtggagagcaaaggcaattcacctccgagctcaggagaggcctgtcgcgaggagaagggcctggctgccgaggatagtggtggggacagcaaggacctcagcgaggtcagcgagaccacagagagcacagatgtcaaggacagctcagaggcctccgactcagcctcctagagcctgccccatcccctcctcaccccacgagctttcacaataaattcgctccgtggcactggggaactttgtgtgtgagcgcgcgcacatttagagggtgtgtttctccaggtcctctggtggggatgtgagccttggccttttgacccagagcatcctgccaggcccgagtacaaggaaagagctttggaggtgggactccctagtctcatgaccttcagcagctgtggccccggggaaggaggccctggacttatgggagagaccctgccttggaggtctgcttggccacgctgaatgtgttttgtggcacaagccggggctgctcaggctcaaagctcaacagcagggctcccactcttggtggccttcagttctcttcccaccttcaccttcagactttctctccctaatcacacctgcttcgggctacagcagctccccagcatacccgtgggctccagatgtggacatccaactgctcattgggcttatctacaaatgtcctgtctgagtaatgacccagccagatgccccatcaacagtccttgagtcctccctcccctgccaccctaatggtcagtgagtccatgatacctcttgagtctactccctaacctgagtttgcatttgaaaataatttatttttagtacaattccccgcgtttccccattgacattttgtattagttggtgtatttgttattgttgatgcgccaatactgataagttattgtaaactaca

SEQ ID NO: 157154 - DNA, 2014 bp, Homo sapiens
  Payload ID: 10804
  Gene Symbol: NAA11
  Gene Name: N(alpha)-acetyltransferase 11, NatA catalytic subunit
  Uniprot ID: Q9BSU3
  ENST ID: ENST00000286794
  CDS Start-End: 174-863
atcttttccatctcctgctccttccgccttcccgccatccgccctccacacgattcagcccggtggtgttagccccctggactcgattcctgaggcaaacagtgccccttaaggtcggcgacagcctcttctgggttcactgcagtccaaccggttccctaccctctgccattatgaacatccgcaacgctcagccagacgacctgatgaatatgcaacactgcaacctcctttgccttcctgagaactaccagatgaaatactatttatatcatggcctttcctggccccagctttcttacatcgctgaggatgaggacgggaagattgtgggctatgttctggccaaaatggaggaggaaccagatgatgtcccgcatggccatatcacctcactggccgtgaagcgttcacaccggcgcctcggcctggcccagaagctgatggaccaggcctccagggccatgatagagaactttaacgccaaatacgtgtctctgcacgtcaggaagagtaaccggccagccttgcacctttattctaacaccctcaactttcagattagtgaggtggaacctaaatactatgcagatggggaagatgcttatgctatgaagcgggatctctcgcagatggcagatgagctgagacgacaaatggacctgaagaagggcgggtatgtggtcctgggctccagggagaaccaggagacccagggcagcacactttctgattctgaagaggcctgtcagcaaaagaacccggctaccgaagaaagtggcagtgacagcaaagaacctaaggagtctgtggagagcaccaacgtccaggacagctcagaaagctcggattccacctcctagagcatgcttaagcatttcaggtcctcatgtctcaaccacatctactctgtgaaccctggcttagtctgtctgctctgcagcatctgctgtggggatcatctcacagtgaccagaatggcttctcactcttaactctataaacaaccacctttcacatatcctgctgggatcatgaaggaatacctggacacaagagccactgcacaacagccaaggaactttgagacctgccattacagaacctttcttggcctactcacactacgctgccattttattctgtttgtagtagtcctctgttgggtgtggttatcctgcaagtttttctccttttagaatgatgaacaggaagcagggcaaactcttgaagatttccagctttcagtttttgtttttgttttttaaccattatttacctgagttttcatccttgaggaggtgaagtagtcaggaccatgaagtcagacctcatgccctcttcctcctctttcctggaagaagtattcagtttccttttcctttctctggtaactcctcctttatactattcccccctcccttttttttgaggaggagggcatcaccttcccagtgggaaaaggtgttaagttaggagcttctactgtacaatcagaacttggagattttaagaaaaggacaaacggtaattaaattggaatctctaatgtgcttgtttgtgttagtttttttgtgattatgtcacttggcatttattgagtacctgcagtgttcacacacaatgctggagccttcattagttacatatttaaccctctcagcaaccctgtaaagtaggtagtattatccctgttttacagatgaggaaactgaagctcagagaagtgaattaaatatcctggatctgaacccaattctgtttgaattcaaagccaaagttccttctacttttctgttcctactctttgcattttatttataaatgtgttaaaattttagcaaaaatggagaatctgctgtttaaaaatgtgtttgcttaatacatggctactgtatgtcaattgtaaatatttatataacctacaattataatctatttttattatttttctctagtaaaaataagtgaagacaaagtaccttgacctctgcagtaaaagttaccagataaa

SEQ ID NO: 157155 - DNA, 1035 bp, Homo sapiens
  Payload ID: 10804
  Gene Symbol: NAA11
  Gene Name: N(alpha)-acetyltransferase 11, NatA catalytic subunit
  ENST ID: ENST00000511542
  CDS Start-End: 1-336
ttgcacctttattctaacaccctcaactttcagattagtgaggtggaacctaaatactatgcagatggggaagatgcttatgctatgaagcgggatctctcgcagatggcagatgagctgagacgacaaatggacctgaagaagggcgggtatgtggtcctgggctccagggagaaccaggagacccagggcagcacactttctgattctgaagaggcctgtcagcaaaagaacccggctaccgaagaaagtggcagtgacagcaaagaacctaaggagtctgtggagagcaccaacgtccaggacagctcagaaagctcggattccacctcctagagcatgcttaagaatgccacagactgagtgatttacacttaatggaggccaggaagttcaatatcaaggtggtgacatctggcaagggccttcttgctgcatcatcccatgaaggtgagaagatgaaaagccaatgaagatctgagacagcacaacctaaggaatgggggaacaacaggatggagaacctgggtccatgaatgatctcatggagcagagctgcttacccatcttgaaatatgtggcattcacttagtgttcaagaatttagtggcaaaacacacactcacactcacacacacacactcttacacatgcagattttgaaatttggaaagctgataactctggtgatgctatggtaaaatattccataaaactgacatgagctaacttgggaaggatataacttttccacagaatctatagtatgggggcaaaccattgaaaagggcagaatgtgtgtgttgacagttgcttgatatttttataagatgctataagacagagatggattgacaattgaccagtttgccggcagctttttaacgggagatccccctatgcctgcagcctataatctgtattaactagaagcaattaacttattcccctgcagatttggaaaagccaactacttctactcaccaaagagcagaaagtaagactccagacttaaaggaaaagaagacttccctt

SEQ ID NO: 157156 - DNA, 6222 bp, Homo sapiens
  Payload ID: 10805
  Gene Symbol: NAA15
  Gene Name: N(alpha)-acetyltransferase 15, NatA auxiliary subunit
  Uniprot ID: Q9BXJ9
  ENST ID: ENST00000296543
  CDS Start-End: 324-2924
gtgttaggaagcgtgacccgggtgggaaaaccctccgcgtccgccattttggctgcctctgtcggtctgttcagttaccacgtgaaccgccgacggagacccgtagtgggggaggcggcggcagcgttaagtgagaaaggaaaaaagacaacgaggaaaaaggaggtgtccgggtagggcaacgcggcgacacccgaggcctggtggtggcggcggatcgagatattcaaggctgaagcagctacggaacggcagcggcggcggtcggacaaactgactgaccgagccgggtggtggcgggagcagcgggagcagccggaacgatgccggccgtgagcctcccgcccaaggagaatgcgctcttcaagcggatcttgaggtgttatgaacataaacagtatagaaatggattgaaattctgtaaacaaatactttctaatcccaaatttgcagagcatggagaaaccttggctatgaaaggattaacattgaactgtttggggaaaaaggaagaagcttatgaattggttcgtagaggtttgagaaatgacttgaagagtcatgtgtgttggcacgtttatggccttcttcagaggtcagacaagaagtatgatgaagccattaagtgttacagaaatgcactaaaatgggataaagacaatcttcaaatcttaagggacctttccttactacagattcaaatgcgagatcttgagggttacagggaaacgaggtatcagttacttcagcttcgacctgcgcagagagcatcatggattggttatgctattgcttaccatttattagaagattatgaaatggcagcaaagattttagaagaatttaggaaaacacaacagacatcccctgacaaggtggattatgaatatagtgaactactcttatatcagaatcaagttcttcgggaagcaggtctctatagagaagctttggaacatctttgtacctatgaaaagcagatttgtgataaacttgctgtagaagaaaccaaaggggaacttctgttgcaactatgtcgtttggaagatgctgcagatgtttatagaggattgcaagagagaaatcctgaaaactgggcctattacaaaggcttggaaaaagcactcaagccagctaatatgttagaacggctaaaaatttatgaggaagcctggactaaatatcccaggggactggtgccaagaaggctgccgttaaactttttatctggtgagaagtttaaagaatgtttggataagttcctaaggatgaatttcagcaagggttgcccaccagtcttcaatactttaagatcattatacaaagacaaagaaaaggtggcaatcatagaagagttagtagtaggttatgaaacctctctaaaaagctgccggttatttaaccccaatgatgatggaaaggaggaaccaccaaccacattactttgggtccagtactacttggcacaacattatgacaaaattggtcagccatctattgctttggagtacataaatactgctattgaaagtacacctacattaatagaactctttctcgtgaaagctaaaatctataagcatgctggaaatattaaagaagctgcaaggtggatggatgaggcccaggccttggacacagcagacagatttatcaactccaaatgtgcaaaatacatgctaaaagccaacctgattaaagaagctgaagaaatgtgctcaaagtttacaagggaaggaacatcagcggtagagaatttgaatgaaatgcagtgcatgtggttccaaacagaatgtgcccaggcttataaagcaatgaataaatttggtgaagcacttaagaaatgtcatgagattgagagacattttatagaaatcactgatgaccagtttgactttcatacatactgtatgaggaagattacccttagatcatatgtggacttattaaaactagaagatgtacttcgacagcatccattttacttcaaggcagcaagaattgctatagagatctatttgaagcttcatgacaacccccttacagatgagaataaagaacacgaagctgatacagcaaacatgtctgacaaagagctaaagaagctacgtaataaacaaagaagagctcaaaagaaagcccagatagaagaagagaaaaaaaatgcagaaaaagaaaagcagcagagaaatcagaaaaagaagaaggatgatgatgatgaggagataggaggtccaaaagaagaacttattccagagaaactggccaaggttgaaactccattggaagaagctattaaatttttaacaccgttgaagaacttggtgaagaacaagatagagactcatctttttgcctttgagatttactttaggaaagaaaagtttcttttgatgctacaatcagtaaagagggcatttgctattgattctagtcatccctggcttcatgagtgtatgattcgtctctttaatactgcagtgtgtgaaagtaaagatttatctgatacagttagaacagtattaaaacaagaaatgaatcgtctttttggagcaacgaatccaaagaattttaatgaaacttttctgaaaaggaattctgattcattgccacacagattatcagctgccaaaatggtatattacttagatccttctagtcagaagcgagctatagagttggcaacaacacttgatgaatctctcactaacagaaacctccagacatgtatggaggtattggaagccttgtatgatggtagcctaggagactgtaaagaagctgctgaaatttatagagcaaattgtcataagcttttcccttatgctttggctttcatgcctcctggatatgaagaggatatgaagatcacagttaatggagatagttctgcagaagctgaagaactggccaatgaaatttgaacatcactaaacaagcaaatggaatgactttggaccatatctagtatataatatttttgtcacgcacctgctgcattgctctaacttacacagaatgagaggagtaaatgttcttgccttcaaatagtgttttacgttttttatcctgctgaaaaagtatatataaaatatctaacattacaggatagaggttcagtttcttaaaaaattaaagctgctaaaattgagtggttaaaaaagataccttatcctattcctccccacccacccatgtttttaaactaatttatataaaatctggaggctgttacagctaacaaagcaggtgtgtggcagaaatattactttaaatttgtcttgtgagattttactatatctcagacagcataaatgctgttttagcactggattctttcactgagcacaaagagttgttggggctttagcatctgactgattttgttacggggttgattctgaccataggaagtatgcaatgtgaatcactatttacagagaaacctacaacagatgcttgatgttgtagaaactgggacatatagataccaagcaaaattataagaaacctataaggtgttcaatacgcttgtgtttccaaaattcactgtacatgatcagtttggtgttcttgtaccacagtttttaactgaaggaaccagttgtaacagtctcaattttaactaaaacttgaagaactaaaacaacaatgcaaacctttcagcattgtttggccaaacttgttaaaactgtaatgcaagaaccaaatgcactgtgatgtggcaccaactaattagcaagcatgaatttttcacccaagagtgaaaaaaggaaaatctaccatggcttgaagttaaagagcagaactcctgactaccattctatgactgatcaaaagactaatagttaaaaacctcagcaggccttgttcacgatatgcagaaaaaaaagtgctgcagtttagatacctctggaatttttccacagtgtcacaggtttgtaatacttgaagccctacatttctaagaatatatttcttgctcagttgtttcaggcaagcccaagactttgtaatttttaaagggcccaagattttttttttttttttttttttcaaataacagaccagcttctttttcttgcagttacagatgtaatttcctttttgttgtcaaacataaggtaccaaatatgatgcaataaattgttttgaaaaacagttgtgtgaatatttcaactaatctgtgttgggcttctgtgaaatacacaggtggaaacagaggtgcaagccagaggcaatgtaatatgctgtaaggctagtgcagatgggagctttttagaaggggctaagtgctggtgtcagggaaattccataatgaagtagaatgctgctcctgcattaagatttcattgagggcaaggctggtggcaggtactatgaatgtaattcataatttaaaaggaaaactaaaaactattttgatttgggaaaatgagccttaatttgttaaacctatacactgagaactagcctcaggcttaatattctcattgcatttgcaagatctgagcaaataagattaagtaaaacaaatcaattgtatatataattgacctttttgtggaacatgtagtttatagaaagtatactctaaagggaatttgccgaagaccttttactgattgaacagttgtgctacaatcaacttttcatagtacatgacctgcattccacatctcagtctaacagtttagtagtgatgtaaagagaagtacaaaccgaactccagtgctttgttatgttttattaactggccctgtctcaggaacatcttaacagatggcaaaaaaacaaaaactttttttcaactcctatgagtggcaactgaagttcttattgttgggaaagaacactagtcctacctctgccactaatgaggtgtttggaggaggtaccagccatataatagggggtgtatgtgtgaattttgtttaaactctactgtatattgaaatgaaattcatttatttgtcttgacaatgttcaaatgatgtagattgtcttagaatgaatattcataagtactcagaactcttaagatgcagatgccacccgtgaggagctaaattcctaatgtgtattgtattccaacccaattttactggaactattgaataaatcttttattttctttcaggtttacttgatagtggatacattggtgtcagaggaccttgactgggttcattttatgtccagacatcacccctgaaacactgtactgtactatcttgctctgagtagtatcaactggatcgtctcatatttgcctcattcatcctattaatttcaaatgatactgtgggggaaaaacagggttagaaaaacaagtggaaaaaatggagtgatgttgtaatctaaacaagtgccttatgtttattgctaagaactggtgttaccaacccttttgagaagaaagggtctcttgacctgtattaacataggaaagtaaagttctttttgtttttctttatattcagctactcttgtcatttctcgttgaaaaactaaaatctgactaggttagtttactcagctttaattagatagttgagtcatatattttcaacatttttctgtatcgtatttattatgcacaaaaataaagtgtgatctctaatagcatggctaaaggtaatgccaatattagtgaatagctttgctgtgggctttatcaggcccttgtttttcacagtgttgtttgtactccatggtgtattgctattagagctgtgaaatgaaagctgtgactttatgaagagatcaaaaaaagtgtggtccagattcaggtaggttgtggtaagttcagggaagtcttgtatgatttctaagaatatttcagttaccatgtatagtatttgggaaaagctgtaatgtaaaatattggactttgttgcaagataggtatatacttgtgtcagataattaaagccttaaattttgaaatgaatctttgagatttcaaagaaagactgacctttcaaatagaaggcggtctttctattctagctaatgccccacttctttaagttataaacaaagtttcatgataccattctgctatcatctaaactttgctgaactctactgccaacctacattaaaaacaaagtcccacgaaatggctgtgttacaccatagtgagcagaaacttaaattttgttctaattttgatggttgaaaaatttcaacctgtagcaataaaacatttttggaaaa

SEQ ID NO: 157157 - DNA, 6072 bp, Homo sapiens
  Payload ID: 10805
  Gene Symbol: NAA15
  Gene Name: N(alpha)-acetyltransferase 15, NatA auxiliary subunit
  ENST ID: ENST00000398947
  CDS Start-End: 191-2788
agaaaggaaaaaagacaacgaggaaaaaggaggtgtccgggtagggcaacgcggcgacacccgaggcctggtggtggcggcggatcgagatattcaaggctgaagcagctacggaacggcagcggcggcggtcggacaaactgactgaccgagccgggtggtggcgggagcagcgggagcagccggaacgatgccggccgtgagcctcccgcccaaggagaatgcgctcttcaagcggatcttgaggtgttatgaacataaacagtatagaaatggattgaaattctgtaaacaaatactttctaatcccaaatttgcagagcatggagaaaccttggctatgaaaggattaacattgaactgtttggggaaaaaggaagaagcttatgaattggttcgtagaggtttgagaaatgacttgaagagtcatgtgtgttggcacgtttatggccttcttcagaggtcagacaagaagtatgatgaagccattaagtgttacagaaatgcactaaaatgggataaagacaatcttcaaatcttaagggacctttccttactacagattcaaatgcgagatcttgagggttacagggaaacgaggtatcagttacttcagcttcgacctgcgcagagagcatcatggattggttatgctattgcttaccatttattagaagattatgaaatggcagcaaagattttagaagaatttaggaaaacacaacagacatcccctgacaaggtggattatgaatatagtgaactactcttatatcagaatcaagttcttcgggaagcaggtctctatagagaagctttggaacatctttgtacctatgaaaagcagatttgtgataaacttgctgtagaagaaaccaaaggggaacttctgttgcaactatgtcgtttggaagatgctgcagatgtttatagaggattgcaagagagaaatcctgaaaactgggcctattacaaaggcttggaaaaagcactcaagccagctaatatgttagaacggctaaaaatttatgaggaagcctggactaaatatcccaggggactggtgccaagaaggctgccgttaaactttttatctggtgagaagtttaaagaatgtttggataagttcctaaggatgaatttcagcaagggttgcccaccagtcttcaatactttaagatcattatacaaagacaaagaaaaggtggcaatcatagaagagttagtagtaggttatgaaacctctctaaaaagctgccggttatttaaccccaatgatgatggaaaggaggaaccaccaaccacattactttgggtccagtactacttggcacaacattatgacaaaattggtcagccatctattgctttggagtacataaatactgctattgaaagtacacctacattaatagaactctttctcgtgaaagctaaaatctataagcatgctggaaatattaaagaagctgcaaggtggatggatgaggcccaggccttggacacagcagacagatttatcaactccaaatgtgcaaaatacatgctaaaagccaacctgattaaagaagctgaagaaatgtgctcaaagtttacaagggaaggaacatcagcggtagagaatttgaatgaaatgcagtgcatgtggttccaaacagaatgtgcccaggcttataaagcaatgaataaatttggtgaagcacttaagaaatgtcatgagattgagagacattttatagaaatcactgatgaccagtttgactttcatacatactgtatgaggaagattacccttagatcatatgtggacttattaaaactagaagatgtacttcgacagcatccattttacttcaaggcagcaagaattgctatagagatctatttgaagcttcatgacaacccccttacagatgagaataaagaacacgaagctgatacagcaaacatgtctgacaaagagctaaagaagctacgtaataaacaaagaagagctcaaaagaaagcccagatagaagaagagaaaaaaaatgcagaaaaagaaaagcagcagagaaatcagaaaaagaagaaggatgatgatgatgaggagataggaggtccaaaagaagaacttattccagagaaactggccaaggttgaaactccattggaagaagctattaaatttttaacaccgttgaagaacttggtgaagaacaagatagagactcatctttttgcctttgagatttactttaggaaagaaaagtttcttttgatgctacaatcagtaaagagggcatttgctattgattctagtcatccctggcttcatgagtgtatgattcgtctctttaatactgtgtgtgaaagtaaagatttatctgatacagttagaacagtattaaaacaagaaatgaatcgtctttttggagcaacgaatccaaagaattttaatgaaacttttctgaaaaggaattctgattcattgccacacagattatcagctgccaaaatggtatattacttagatccttctagtcagaagcgagctatagagttggcaacaacacttgatgaatctctcactaacagaaacctccagacatgtatggaggtattggaagccttgtatgatggtagcctaggagactgtaaagaagctgctgaaatttatagagcaaattgtcataagcttttcccttatgctttggctttcatgcctcctggatatgaagaggatatgaagatcacagttaatggagatagttctgcagaagctgaagaactggccaatgaaatttgaacatcactaaacaagcaaatggaatgactttggaccatatctagtatataatatttttgtcacgcacctgctgcattgctctaacttacacagaatgagaggagtaaatgttcttgccttcaaatagtgttttacgttttttatcctgctgaaaaagtatatataaaatatctaacattacaggatagaggttcagtttcttaaaaaattaaagctgctaaaattgagtggttaaaaaagataccttatcctattcctccccacccacccatgtttttaaactaatttatataaaatctggaggctgttacagctaacaaagcaggtgtgtggcagaaatattactttaaatttgtcttgtgagattttactatatctcagacagcataaatgctgttttagcactggattctttcactgagcacaaagagttgttggggctttagcatctgactgattttgttacggggttgattctgaccataggaagtatgcaatgtgaatcactatttacagagaaacctacaacagatgcttgatgttgtagaaactgggacatatagataccaagcaaaattataagaaacctataaggtgttcaatacgcttgtgtttccaaaattcactgtacatgatcagtttggtgttcttgtaccacagtttttaactgaaggaaccagttgtaacagtctcaattttaactaaaacttgaagaactaaaacaacaatgcaaacctttcagcattgtttggccaaacttgttaaaactgtaatgcaagaaccaaatgcactgtgatgtggcaccaactaattagcaagcatgaatttttcacccaagagtgaaaaaaggaaaatctaccatggcttgaagttaaagagcagaactcctgactaccattctatgactgatcaaaagactaatagttaaaaacctcagcaggccttgttcacgatatgcagaaaaaaaagtgctgcagtttagatacctctggaatttttccacagtgtcacaggtttgtaatacttgaagccctacatttctaagaatatatttcttgctcagttgtttcaggcaagcccaagactttgtaatttttaaagggcccaagattttttttttttttttttttttcaaataacagaccagcttctttttcttgcagttacagatgtaatttcctttttgttgtcaaacataaggtaccaaatatgatgcaataaattgttttgaaaaacagttgtgtgaatatttcaactaatctgtgttgggcttctgtgaaatacacaggtggaaacagaggtgcaagccagaggcaatgtaatatgctgtaaggctagtgcagatgggagctttttagaaggggctaagtgctggtgtcagggaaattccataatgaagtagaatgctgctcctgcattaagatttcattgagggcaaggctggtggcaggtactatgaatgtaattcataatttaaaaggaaaactaaaaactattttgatttgggaaaatgagccttaatttgttaaacctatacactgagaactagcctcaggcttaatattctcattgcatttgcaagatctgagcaaataagattaagtaaaacaaatcaattgtatatataattgacctttttgtggaacatgtagtttatagaaagtatactctaaagggaatttgccgaagaccttttactgattgaacagttgtgctacaatcaacttttcatagtacatgacctgcattccacatctcagtctaacagtttagtagtgatgtaaagagaagtacaaaccgaactccagtgctttgttatgttttattaactggccctgtctcaggaacatcttaacagatggcaaaaaaacaaaaactttttttcaactcctatgagtggcaactgaagttcttattgttgggaaagaacactagtcctacctctgccactaatgaggtgtttggaggaggtaccagccatataatagggggtgtatgtgtgaattttgtttaaactctactgtatattgaaatgaaattcatttatttgtcttgacaatgttcaaatgatgtagattgtcttagaatgaatattcataagtactcagaactcttaagatgcagatgccacccgtgaggagctaaattcctaatgtgtattgtattccaacccaattttactggaactattgaataaatcttttattttctttcaggtttacttgatagtggatacattggtgtcagaggaccttgactgggttcattttatgtccagacatcacccctgaaacactgtactgtactatcttgctctgagtagtatcaactggatcgtctcatatttgcctcattcatcctattaatttcaaatgatactgtgggggaaaaacagggttagaaaaacaagtggaaaaaatggagtgatgttgtaatctaaacaagtgccttatgtttattgctaagaactggtgttaccaacccttttgagaagaaagggtctcttgacctgtattaacataggaaagtaaagttctttttgtttttctttatattcagctactcttgtcatttctcgttgaaaaactaaaatctgactaggttagtttactcagctttaattagatagttgagtcatatattttcaacatttttctgtatcgtatttattatgcacaaaaataaagtgtgatctctaatagcatggctaaaggtaatgccaatattagtgaatagctttgctgtgggctttatcaggcccttgtttttcacagtgttgtttgtactccatggtgtattgctattagagctgtgaaatgaaagctgtgactttatgaagagatcaaaaaaagtgtggtccagattcaggtaggttgtggtaagttcagggaagtcttgtatgatttctaagaatatttcagttaccatgtatagtatttgggaaaagctgtaatgtaaaatattggactttgttgcaagataggtatatacttgtgtcagataattaaagccttaaattttgaaatgaatctttgagatttcaaagaaagactgacctttcaaatagaaggcggtctttctattctagctaatgccccacttctttaagttataaacaaagtttcatgataccattctgctatcatctaaactttgctgaactctactgccaacctacattaaaaacaaagtcccacgaaatggctgtgttacaccatagtgagcagaaacttaaattttgttctaattttgatggttgaaaaatttcaacctgtagcaataaa

SEQ ID NO: 157158 - DNA, 2456 bp, Homo sapiens
  Payload ID: 10805
  Gene Symbol: NAA15
  Gene Name: N(alpha)-acetyltransferase 15, NatA auxiliary subunit
  ENST ID: ENST00000515576
  CDS Start-End: 76-372
cagaagcgagctatagagttggcaacaacacttgatgaatctctcactaacagaaacctccagtttgtcagaggaatggctgtgaatggatgcctggaaggaccatcctctaattttctcagttgcctgttcattgtggcattggttggcagtgaatctactcatcctttatgtcttgagcaaccagccacccagagatgtggtcttgctatgttgcccaagctgatcttcaactcctggcctcaagggatcctcccgcttcagcctcccaaagcattgggcttacagtcacagcaggatttccaagctcctggagattgcctgtccagtggcagcaacaccaaagacttagactgtaaagaaagcctctaaaattcccagtgttcctggatttaaataacacatccagagttcttcccagtcacaactccagctggattttagaggcacaaagagctgaatgtgatcctggtaaatctacccccgacccatcacaatatccacctgctttataaactgcctaacagaacaattccaagagattataataacacgctacaaactgcttaaaagaacaatcccaagaggctataatgagacctttttttaaaaaaatagaaataaccccatcatacctcatttccctatttgcatcttttaaagtccattgtatagaattgtaacaccatcatgctttgctctaatatagcctaatttcccattcctttttttttttttttttttgagacggagtcttgctctgtcacccatgctggagtgcagtggtgcgatcttgtctcactgcaaactctgcctcccggattcaagcaattctcctgcctcagcctcccaagtagctgggattacaggcatgagccaccacacccagctaatttttgtgttttagtagagacagggtttcaccatgttggccaggctggtctcgaactcctcacctcaggtgatctgcctggctcgacctcccaaggtgctgggattacaggcatgagcccctgtgcccaggctcccactcctcttaatctgtgttgacccttccactgtattgtcatcagtcaaatcccctaatccttaacaccttttctaaacattcctttcattttcttactctaaccaaaacctaaccatctcctaataatattgctttccttgcaatactctcaaattgtgtctgcttttaaaaattactcaacccacttaccaaaggagcctagagatgaggtaggtgtcctgcttattccccactgccaattccagaccttttttctcctttgaaaattctagttcccttgaccatatcatccattctcctttttttttttacagtcgtctactgtcttcctggtctctcaccctcattgcagaagagcttagcatgcagtgtcttgttttcctttccactgctactgctgtcattattcttttttttttagatggagtctcgctccgttgcccaggctggagtgagtgcagtgtcgcgatcttggctcactgcaagctccgcctcctgggttcaagcaattctcctgcctcagcctcccgagtagctaagactacaggtgcctgccaccacgccaggctaattttttgtatttttagtggagacagagtttcaccattttagccagggtggtctagatctcctgacctcgtgatccgcctgcctcggcctcctgaagtgctgggattacaggcatgagccaccgtgaccggccagctgtcattatttttaacattaacaattcatctattaccttagctatggatggtgctatgtaatttgccctgcctgctccttcaccttcacatcctgccactctcccctgttaagtcagaaactgtgaagtgtcttagagtttgtccttcttgcaagctaataggttagcttgccacagtttcatatacatatactgccagaagacaccagactgctgggctggtgccataaaagatttgctactgaaagcacaaagcatttacaacaccttgtgtcatttccccatgccccatttcccgtaaggcaacagatgtttcctgtgcagtgggttgcatcacaggagaagaatcttaaatttagaagcctccaagcttttatcaaagctgctggtgacctacccattcctcccattcaggagagaaattattcattatcttgaaatgtaagtgaatttcctctgggaagaggaagaaggcccctctaggtttatcaccctggaatgtaacacactctggggtttgggaggtggatattaatatcattatgcgctttctcacctacagaagactagtctgaacttgtggcaggaacctagccagcttgattgcctgctaaaacaaaaatatcaacattcttaataggatttaaataagatccagcatctcaaaacagaatattcaaaatatccatgatacggtccaaaattacaaagcaaacaaac

SEQ ID NO: 157159 - DNA, 4347 bp, Homo sapiens
  Payload ID: 10806
  Gene Symbol: NAA16
  Gene Name: N(alpha)-acetyltransferase 16, NatA auxiliary subunit
  Uniprot ID: Q6N069
  ENST ID: ENST00000379406
  CDS Start-End: 325-2919
aaagggcgctccgcgcatgcgcacaggatccggctcgggaggcggaccctggctgccatcttgcagtgcgcgggaaccgccgccgccgccgctggccaaaaagcggagcccaggggaagcgtgtcctgctcagaccgccttccttctccattgccacccgtgccgaacagccaggctgcccaattgcaactgtagaccaatgaactaatccatcgcccgcagcccgactctcagcagcggttcgtcccggtgcccacccccgcgaagcggagcgcccgggcacctagcctccctgccggccacctagcctccctgccggccacgatgccgaacgtgctgctgccgcccaaggagagcaacctcttcaaacgcatcttgaaatgttatgaacagaagcagtacaaaaatggcctcaagttttgcaagatgattctgtcgaacccaaaatttgctgaacatggagagactttggctatgaaaggattaacactgaactgtttaggaaaaaaagaagaagcttatgagtttgttcgtaaaggacttcgtaatgatgtcaagagtcatgtctgttggcatgtatatggactcttgcagcgttctgataaaaaatatgatgaagctataaaatgttaccgaaatgccctcaaattagataaagataacctgcaaattttgagggatctctcactgttgcagatccaaatgagagaccttgaaggttaccgagagacaagataccagcttcttcagttgcgccccacacagcgtgcctcctggattggatatgctattgcataccatttgctgaaagattatgatatggccctaaaactgttggaagaatttagacaaactcagcaagttcctccaaacaaaatagattatgaatatagtgaattgatattataccagaatcaagtgatgagagaggcagatctgttgcaggaatctttggaacatatagaaatgtatgagaaacaaatatgtgataaacttttggtggaagaaattaaaggggaaatactgttgaaattgggaagattaaaagaagccagtgaagtgttcaaaaacttgattgatcgaaatgcagaaaattggtgttattatgaaggcttggaaaaagctctacaaattagcactttagaagagaggcttcaaatttatgaagaaattagtaagcagcaccccaaagcaattacacccagaagattacctttgactcttgtcccaggtgaaagatttagagaactaatggataagttcctgagggttaacttcagtaaaggctgcccacccttgtttactactttgaaatctttatattacaatacagaaaaggtttctataatccaggaacttgttactaattatgaagcctctcttaaaacgtgtgacttttttagcccatatgagaatggggagaaggaacccccgacaacactactctgggttcagtatttcctggcacagcactttgataaacttggacagtattctttggctttggattatattaatgctgcaattgctagtactccaactctaatagaattattctatatgaaagcaaaaatttacaagcatataggtaatctcaaagaagctgcaaagtggatggatgaagcacagtctttggacacagctgatagattcatcaattccaaatgtgcaaaatacatgcttcgagcaaatatgataaaagaagcagaggaaatgtgctccaagttcacaagggaaggaacatctgccatggaaaatctaaatgaaatgcagtgtatgtggtttcagacagaatgcatttcagcttatcagcgtctggggagatacggggatgccttgaaaaaatgtcatgaagtagaaaggcatttttttgagataactgatgaccaattcgacttccatacatactgcatgagaaagatgacccttcgtgcctatgttgaccttttgagattagaagatatactcagaagacatgccttttatttcaaggctgctagatcagcgattgaaatatacttgaaattgtatgataatcccttaaccaatgaaagcaaacaacaagaaataaactcagaaaacttgtcagccaaagaattgaagaaaatgcttagcaagcagagaagagctcagaaaaaggctaaactagaagaagaaagaaagcatgcagaaagagaacgtcaacagaaaaatcaaaagaaaaaaagagatgaagaagaagaagaagccagtggccttaaggaagaacttatacctgaaaaattagaaagggtagaaaatccattagaggaagccgttaagttccttatacctcttaagaaccttgttgctgataacattgacactcatctgttagcatttgaaatatattttagaaaaggaaagtttctgttaatgctgcagtctgtcaaacgagcttttgccattaacagtaataacccatggttacatgaatgtttaattagattttctaaatctgtgtctaatcatagtaatcttccagacattgtgagcaaagttctatctcaagaaatgcagaaaatatttgtcaaaaaggatttggaaagttttaatgaggattttctgaaacgtaacgctacctctcttcagcatctactttcaggtgctaaaatgatgtattttctggacaagtcaaggcaggagaaagcaattgctatagccactagactagatgaaactataaaagataaagatgtaaagacattaataaaggtttctgaagcactgcttgatggcagctttgggaactgtagttcccaatatgaagaatataggatggcctgtcataacctgcttccttttacatctgccttcttgcctgctgtgaatgaagtcgacaatcctaatgtggcactgaaccatacagctaattatgatgtcttggcaaatgaaatttgaaatcttctagaaagtagactcctatagactcaaagctgaattgagatcagggtttcttttccagggtgcattttaatatacgtatgaaatgaaatatttggttaggatttttaaatggcatattctgtaagcttattttgttctttacccgacctgccaatttacataaccatctgttaaaattacctgtttattcttacacagttttgtggtagctccgatcgcttctgtataattataatttcttactaagctaagttgtatacaaccccactgtattattttctttagattctgatttcaggatctgtgctttgattccttgtctgttttatcgtatatttgcttgctttttaattaaagcacatcagttttaaagtgttaactatatgttaacaatatggaggctgggcgtggtggctcacacctgtaatcccagcactttgggaggcccagactggcggatcacctgaggtcaggagatcgagatcagcctggccaacatggtgaaaccccttctctactgaaaatacaaaaattagccagacgtgatggcacatacctgtaatccaagctgcccaggagctgaggccggagaatcgcttgaacctgggaggtggaggttgcagtgagccgagatcatgccactgcactccagcctgggcaacagagcaagactccatctcgaaaaaaaggaattcctcttggcagatattgaagtttatttgaaaatttaattcgtccttttttcattgtaatatttcatggtttactatttccttttagtattcatgaaaatggtattttctggttgaataagggtactctagttttatgtagatgatttcagaatgtgaaggctggtttgcctgtcagtcatggaaattcactggtaaaattgttgaatatttctctctcccagtcttaaaagcccacaggcaagaattaatgctttcttaactaagttactttgagtattaacaagtagcttatactgaggtgtgcttcaagggagcattatagggcagaaaacaaattaaaatgaaatgttgttgttatagccatgcattgaccattaaatgcattttaatatctcggcaaaatgagatttgaaactcattagtttaactcttaaaacatagtgttgttaaacagtattttttgggggcgggtggatagctttttgttctatcttgtacagaaaacagtaatggaatcactcatgttcagaaccttgtaaatatgtctgtaatattaatgcttccctttattaagacaaatatacattcaaaaagggagattttatttagacacacattttcttttcaccctaatctatttagattcatacttattgagacgggaaaaactcgctgtaaaataatgccaacctagataatgctataataaattattttgtacacagtt

SEQ ID NO: 157160 - DNA, 1751 bp, Homo sapiens
  Payload ID: 10806
  Gene Symbol: NAA16
  Gene Name: N(alpha)-acetyltransferase 16, NatA auxiliary subunit
  Uniprot ID: Q6N069
  ENST ID: ENST00000403412
  CDS Start-End: 250-1539
accgccgccgccgccgctggccaaaaagcggagcccaggggaagcgtgtcctgctcagaccgccttccttctccattgccacccgtgccgaacagccaggctgcccaattgcaactgtagaccaatgaactaatccatcgcccgcagcccgactctcagcagcggttcgtcccggtgcccacccccgcgaagcggagcgcccgggcacctagcctccctgccggccacctagcctccctgccggccacgatgccgaacgtgctgctgccgcccaaggagagcaacctcttcaaacgcatcttgaaatgttatgaacagaagcagtacaaaaatggcctcaagttttgcaagatgattctgtcgaacccaaaatttgctgaacatggagagactttggctatgaaaggattaacactgaactgtttaggaaaaaaagaagaagcttatgagtttgttcgtaaaggacttcgtaatgatgtcaagagtcatgtctgttggcatgtatatggactcttgcagcgttctgataaaaaatatgatgaagctataaaatgttaccgaaatgccctcaaattagataaagataacctgcaaattttgagggatctctcactgttgcagatccaaatgagagaccttgaaggttaccgagagacaagataccagcttcttcagttgcgccccacacagcgtgcctcctggattggatatgctattgcataccatttgctgaaagattatgatatggccctaaaactgttggaagaatttagacaaactcagcaagttcctccaaacaaaatagattatgaatatagtgaattgatattataccagaatcaagtgatgagagaggcagatctgttgcaggaatctttggaacatatagaaatgtatgagaaacaaatatgtgataaacttttggtggaagaaattaaaggggaaatactgttgaaattgggaagattaaaagaagccagtgaagtgttcaaaaacttgattgatcgaaatgcagaaaattggtgttattatgaaggcttggaaaaagctctacaaattagcactttagaagagaggcttcaaatttatgaagaaattagtaagcagcaccccaaagcaattacacccagaagattacctttgactcttgtcccaggtgaaagatttagagaactaatggataagttcctgagggttaacttcagtaaaggctgcccacccttgtttactactttgaaatctttatattacaatacagaaaaggtttctataatccaggaacttgttactaattatgaagcctctcttaaaacgtgtgacttttttagcccatatgagaatggggagaaggaacccccgacaacactactctgggttcagtatttcctggcacagcactttgataaacttggacagtattctttggctttggattatattaatgctgcaattgctagtactccaactctaatagaattattctatatgaaagcaaaaatttacaaggtaaaatctgaatcctgttttttgagtagttgaagaattcagctactttaagaatccttggagttttttctttgtggaaacaagttctagggcaccctgataatctttttctaataatcctgtgtagtttcatgttatattaattgtataatcaatgtgtaattagatgtgtaatcatttgagctcttagtaaatgtgaactgtaattttgatttctaaataaatttgacagaaatggtgacaga

SEQ ID NO: 157161 - DNA, 2816 bp, Homo sapiens
  Payload ID: 10806
  Gene Symbol: NAA16
  Gene Name: N(alpha)-acetyltransferase 16, NatA auxiliary subunit
  Uniprot ID: Q6N069
  ENST ID: ENST00000464857
  CDS Start-End: 235-1785
gctggccaaaaagcggagcccaggggaagcgtgtcctgctcagaccgccttccttctccattgccacccgtgccgaacagccaggctgcccaattgcaactgtagaccaatgaactaatccatcgcccgcagcccgactctcagcagcggttcgtcccggtgcccacccccgcgaagcggagcgcccgggcacctagcctccctgccggccacctagcctccctgccggccacgatgccgaacgtgctgctgccgcccaaggagagcaacctcttcaaacgcatcttgaaatgttatgaacagaagcagtacaaaaatggcctcaagttttgcaagatgattctgtcgaacccaaaatttgctgaacatggagagactttggctatgaaaggattaacactgaactgtttaggaaaaaaagaagaagcttatgagtttgttcgtaaaggacttcgtaatgatgtcaagagtcatgtctgttggcatgtatatggactcttgcagcgttctgataaaaaatatgatgaagctataaaatgttaccgaaatgccctcaaattagataaagataacctgcaaattttgagggatctctcactgttgcagatccaaatgagagaccttgaaggttaccgagagacaagataccagcttcttcagttgcgccccacacagcgtgcctcctggattggatatgctattgcataccatttgctgaaagattatgatatggccctaaaactgttggaagaatttagacaaactcagcaagttcctccaaacaaaatagattatgaatatagtgaattgatattataccagaatcaagtgatgagagaggcagatctgttgcaggaatctttggaacatatagaaatgtatgagaaacaaatatgtgataaacttttggtggaagaaattaaaggggaaatactgttgaaattgggaagattaaaagaagccagtgaagtgttcaaaaacttgattgatcgaaatgcagaaaattggtgttattatgaaggcttggaaaaagctctacaaattagcactttagaagagaggcttcaaatttatgaagaaattagtaagcagcaccccaaagcaattacacccagaagattacctttgactcttgtcccaggtgaaagatttagagaactaatggataagttcctgagggttaacttcagtaaaggctgcccacccttgtttactactttgaaatctttatattacaatacagaaaaggtttctataatccaggaacttgttactaattatgaagcctctcttaaaacgtgtgacttttttagcccatatgagaatggggagaaggaacccccgacaacactactctgggttcagtatttcctggcacagcactttgataaacttggacagtattctttggctttggattatattaatgctgcaattgctagtactccaactctaatagaattattctatatgaaagcaaaaatttacaagcatataggtaatctcaaagaagctgcaaagtggatggatgaagcacagtctttggacacagctgatagattcatcaattccaaatgtgcaaaatacatgcttcgagcaaatatgataaaagaagcagaggaaatgtgctccaagttcacaagggaaggaacatctgccatggaaaatctaaatgaaatgcagtgtatgtggtttcagacagaatgcatttcagcttatcagcgtctggggagatacggggatgccttgaaaaaatgtcatgaagtagaaagggtaagttgttagaatttcgacttcagttttcactgtaaggtgataaaaagcaggtagatttctacacaggatcatctgcctcttctaacttctctgggagcttcattgtgaaaaaaattcttgatctttaacctttacattcagaagttgtaaacaatggattgctttactgatcctcaagtgattatgcttttgacatgtctatatatttttgtctgaaggaaaaagattgttagtaaacaattattgctattaacataaattcaaaatttatgttccctaattaggccattattttgatattcatcaccaccctaagaggacacacagctgatggcaacctctttcccctttaaaacatcaggatctggtccgcagtcagcctctctccagtttgtcttcccaggatatttgctctcacattcagtattctgtataacaatctatggccagtttgcaggcttattttattgcttgcttttaggattatttgtgtgatgtgccttagtgaggggacttttcttttcctttgtgtgaatttttgttttcctgttctttgtcatctctgaagcactctccttccacatggaccacaggaggaaaagagccgcaaatgcacccctgaggcagtcctcagcagccctcagttgtgggggcaatcggcaccactgttcccatcctgacgcagtatagaaccacaggcatcgtagtcagcatttttttgagataactgatgaccaattcgacttccatacatactgcatgagaaagatgacccttcgtgcctatgttgaccttttgagattagaagatatactcagaagacatgccttttatttcaaggctgctagatcagcgattgaaatatacttgaaattgtatgataatcccttaaccaatgaaagcaaacaacaagaaataaactcagaaaacttgtcagccaaagaattgaagaaaatgcttagcaagcagagaagagctcagaaaaaggctaaactagaagaagaaagaaagcatgcagaaagagaacgtcaacagaaaaa

SEQ ID NO: 157162 - DNA, 920 bp, Homo sapiens
  Payload ID: 10807
  Gene Symbol: NAA20
  Gene Name: N(alpha)-acetyltransferase 20, NatB catalytic subunit
  Uniprot ID: P61599
  ENST ID: ENST00000310450
  CDS Start-End: 88-423
ggttccgcggcggccacgctccgggagacttccggcagggcgggcgcggggtcttggcgaacggtcttcggaagcggcggcggcgcgatgaccacgctacgggcctttacctgcgacgacctgttccgcttcaacaacattaacttggatccacttacagaaacttatgggattcctttctacctacaatacctcgcccactggccagagtatttcattgttgcagaggcacctggtggagaattaatgggttatattatgggtaaagcagaaggctcagtagctagggaagaatggcacgggcacgtcacagctctgtctgttgccccagaatttcgacgccttggtttggctgctaaacttatggagttactagaggagatttcagaaagatatgaggaaagcactttccagggatactgagaagaaatccatcataccattacctcatcctgtgaggcctgaagacattgaataaccctgggcagtggttcttaggcagatactctagatgctttatggacaatattattttcattggatgattctggagctctattaggagaaaagtaatcattttaggtcttaaagacttcaagaaaatacaggttatcaatttattttaaatctcattgtttccagttagcaatatcatacctattaaagctgttcattgtaacaaaattcaatcaaaaaggcagctaggtcagaaggaaacataccactctcatggttcatagtattcactgtatgtatgctagggaaaagacttgctccagtctcctcctcagttctgtgcctgagaaccactgctgcatatatttgtttttaaattttgtattgaactgttaattgaagctttaaaagcatatatgaaatgtataaatctaagatgtataatacattattgactctatgaa

SEQ ID NO: 157163 - DNA, 1260 bp, Homo sapiens
  Payload ID: 10807
  Gene Symbol: NAA20
  Gene Name: N(alpha)-acetyltransferase 20, NatB catalytic subunit
  Uniprot ID: P61599
  ENST ID: ENST00000334982
  CDS Start-End: 282-818
tttccttcccaggtgtcgccgcctgctttctgcagccgctgcctgggaggggttccgaggttctgggcagccacagccccggaggccttacaggagcgacctggcaattcccgccgccggccgccagaggaagctgctttgctgctgtcgttgcccagcaactcgtagcccggaagcagtaccccgtctcgctcggttccgcggcggccacgctccgggagacttccggcagggcgggcgcggggtcttggcgaacggtcttcggaagcggcggcggcgcgatgaccacgctacgggcctttacctgcgacgacctgttccgcttcaacaacattaacttggatccacttacagaaacttatgggattcctttctacctacaatacctcgcccactggccagagtatttcattgttgcagaggcacctggtggagaattaatgggttatattatgggtaaagcagaaggctcagtagctagggaagaatggcacgggcacgtcacagctctgtctgttgccccagaatttcgacgccttggtttggctgctaaacttatggagttactagaggagatttcagaaagaaagggtggattttttgtggatctctttgtaagagtatctaaccaagttgcagttaacatgtacaagcagttgggctacagtgtatataggacggtcatagagtactattcggccagcaacggggagcctgatgaggacgcttatgatatgaggaaagcactttccagggatactgagaagaaatccatcataccattacctcatcctgtgaggcctgaagacattgaataaccctgggcagtggttcttaggcagatactctagatgctttatggacaatattattttcattggatgattctggagctctattaggagaaaagtaatcattttaggtcttaaagacttcaagaaaatacaggttatcaatttattttaaatctcattgtttccagttagcaatatcatacctattaaagctgttcattgtaacaaaattcaatcaaaaaggcagctaggtcagaaggaaacataccactctcatggttcatagtattcactgtatgtatgctagggaaaagacttgctccagtctcctcctcagttctgtgcctgagaaccactgctgcatatatttgtttttaaattttgtattgaactgttaattgaagctttaaaagcatatatgaaatgtataaatctaagatgtataatacattattgactctatgaa

SEQ ID NO: 157164 - DNA, 1604 bp, Homo sapiens
  Payload ID: 10807
  Gene Symbol: NAA20
  Gene Name: N(alpha)-acetyltransferase 20, NatB catalytic subunit
  ENST ID: ENST00000398602
  CDS Start-End: 636-1136
cggcgcgatgaccacgctacgggcctttacctgcgacgacctgttccgcttcaacaacatgtgagtgacacgcgcctagggccagccgctcttggccgggcctcgcttcccggccccgccagctccggccccagccgcgccttcccggccggaccccaagcccggacggggacccgcgagaaccaccccccgccggccaacgtgggcgcctccctggggccacagggtccagggagaggtgggcctggagtcgacgcacgccggccttggcgaccttggccgaggtgctcaaactttgtctctggaccctgcgagctggcaggttctggggcagcgctcgggcctccgctcgtggtcgctgtcaggaggcgctggggtgatggggcgagctggagacgcggcctggagcccacgacctgggcttctcgccctgccctactgcttgctggttcgtggccgggccgcgcctcttctgggcagagggcaccgccgacggccaggccgcagagggggcttgcgaggatcggaagctggtcagcagctgttgggatgtgtacatcgtgaagcccacctggtggccgtggttaaattgtatccaaatgaaatgacactgatcactgcgtcccctgcagcagatgctgtctcagtcatgtaacttggatccacttacagaaacttatgggattcctttctacctacaatacctcgcccactggccagagtatttcattgttgcagaggcacctggtggagaattaatgggttatattatgggtaaagcagaaggctcagtagctagggaagaatggcacgggcacgtcacagctctgtctgttgccccagaatttcgacgccttggtttggctgctaaacttatggagttactagaggagatttcagaaagaaagggtggattttttgtggatctctttgtaagagtatctaaccaagttgcagttaacatgtacaagcagttgggctacagtgtatataggacggtcatagagtactattcggccagcaacggggagcctgatgaggacgcttatgatatgaggaaagcactttccagggatactgagaagaaatccatcataccattacctcatcctgtgaggcctgaagacattgaataaccctgggcagtggttcttaggcagatactctagatgctttatggacaatattattttcattggatgattctggagctctattaggagaaaagtaatcattttaggtcttaaagacttcaagaaaatacaggttatcaatttattttaaatctcattgtttccagttagcaatatcatacctattaaagctgttcattgtaacaaaattcaatcaaaaaggcagctaggtcagaaggaaacataccactctcatggttcatagtattcactgtatgtatgctagggaaaagacttgctccagtctcctcctcagttctgtgcctgagaaccactgctgcatatatttgtttttaaattttgtattgaactgttaattgaagctttaaaagcatatatgaaatgtataaatctaagatgtataatacattattgactctatgaatgttttctgaagtttgttagtcattt

SEQ ID NO: 157165 - DNA, 6010 bp, Homo sapiens
  Payload ID: 10808
  Gene Symbol: NAA25
  Gene Name: N(alpha)-acetyltransferase 25, NatB auxiliary subunit
  Uniprot ID: Q14CX7
  ENST ID: ENST00000261745
  CDS Start-End: 250-3168
agtgactcggaagactttaacagcaacagctgcctcctcttgccagcttgatcccacctgctaagtgaaggaacagcgtttaaagaggtggcaatcggcaagggtggatgcttccctttccgcgcaggcgcgttcagtcgcagcaccgcgactatcgtgatagacaagcgagatcgacgctggccctttaatagccctttcccggggtcctgccccgcgcgtgcgcactgtggttctgcgcttgtcatcatggcgacgcggggccatgtgcaggaccctaacgacaggcgcctccggcccatttacgattatcttgacaatggtaataataaaatggcaattcagcaagcagataaactgttgaagaaacataaggatcttcattgtgctaaggttttaaaggcaattggtttacagagaactggaaagcaagaggaagcctttactcttgcacaggaggtggcagcccttgaacccacagatgacaactcactgcaggcactgactatcctttaccgggagatgcaccgaccggagttagttacaaaactttatgaggcagctgtgaagaaagttcccaatagtgaggagtatcactctcacctcttcatggcctatgccagagtgggtgaatacaagaaaatgcaacaggctggcatggctctatataagattgtccccaaaaatccctactacttttggtctgtgatgagcttaattatgcaatctatatcggcacaggatgaaaacctctcaaaaacaatgtttctgccccttgctgagagaatggtcgaaaaaatggtgaaagaggacaagatagaagctgaggctgaagttgaactttattatatgatcctggaacgtttgggaaagtaccaggaggccttggatgtcatcagagggaaattaggagagaagttgacaagtgagattcagagtcgggaaaataaatgcatggctatgtacaagaagctgagcaggtggccagagtgcaatgccctttcccggcgcctcttactaaaaaactcagatgactggcagttctatctgacttatttcgattctgtctttcgactgattgaagaggcctggagtcctcctgctgaaggtgaacactctttagaaggagaagtacattattctgcagaaaaagctgtgaagtttatagaagatcggataacggaagaatctaaaagttctcgccatctccgaggaccacatctagctaaattggagctgattaggcgtttacgaagtcaaggttgtaacgatgagtacaaactgggtgatccagaagaattaatgttccagtattttaaaaagtttggcgataaaccttgttgttttacagaccttaaggtgtttgttgacctcttacctgctacacagtgtacaaaatttattaatcagttacttggagttgttcctttgtcgacaccaacagaggataagctggcactgcctgctgacatcagagctctgcagcaacatttgtgtgtggtgcagctgacgaggttacttggcttgtaccacaccatggataaaaatcagaaattgagtgtggtcagagaattgatgttaaggtaccagcatggactggaatttgggaaaacctgtttgaaaacagaattgcaattttctgactattactgtctccttgctgtccatgcgcttattgatgtatggagggaaacaggtgatgagaccactgtgtggcaggccctgactttgctggaagagggattaacccatagcccttccaatgctcagttcaaattgctgcttgttcgaatctactgtatgctgggtgcatttgaaccagtggtggatctttactccagcctcgatgctaagcatatccagcatgataccattggttatcttttgacccgatatgctgaatctctaggtcagtatgctgctgcgtcccaatcctgtaacttcgcactcaggttttttcactccaaccagaaagatacctcagaatatattattcaagcttacaaatatggtgcatttgagaagatcccagagtttatcgcttttaggaacaggctgaataattctcttcattttgcacaagtccgtactgaacggatgctgttagaccttctacttgaagcaaatatatcaaccagtttagcagaaagtataaagtcaatgaaccttaggccagaagaagatgacattccatgggaagatttgcgagacaacagagacttaaatgtttttttcagctgggatccaaaagacagggacgtttctgaagaacataagaaactttccttagaggaggagaccttgtggttaagaatccgatccttaacattgaggctgataagtggacttccaagtctcaaccaccctgtggagccaaagaactcggagaagactgccgagaatggggtatcctcccggattgatattcttcgtttgctccttcaacagctggaggcaaccctggagacaggaaagcgatttattgagaaggatattcagtatcctttccttggtcctgtacctaccagaatgggtggattctttaattctggctgttctcagtgccagataagctctttttatcttgtcaatgatatttatgagctggataccagtggtttagaggatacaatggagattcaggaacgaatagaaaatagttttaagtctttactagaccagttaaaagatgtcttcagtaaatgtaaaggtgacctcttagaagttaaagatggtaacttgaaaacacatcctactcttttagaaaatctagttttctttgttgagactatttctgttatcctttgggtatccagttactgtgagagtgtcctacgaccatacaaactaaatttacagaaaaagaaaaagaagaaaaaagaaaccagcatcatcatgccacctgtctttaccagtttccaagactatgttactgggcttcagactttaatttccaatgttgtggatcatattaaagggcttgaaacacatctaattgcacttaaacttgaagaacttattttagaagacacttctctctcaccggaagagagaaaattttcaaagactgtgcaagggaaggtgcagagcagttatctgcactcacttctggaaatgggggagctgctgaaaaaaagacttgagaccacaaagaaactaaaaatttaaggaagtatctatcatgggcactgatgactctgcaacagaatatgacaccatcttcccaggcaaaagcaacatctggttgaccatgattttaatccagaacttcctcataaaatgcatgaaggactttgatcgtgaatttttttaggtgttaaatatatacaactgattaaattattgtatataaaccagaagcgggaccctcatctgggtttgaccactttttatacatgttcatatgcatatggcagcaacaagagaaccctacttttcttcttcccatcaccagaaacatcttttcaggggagcggggggtctataaaaacagcaatagaaattaagcataaagcatcaacctcatagcaactgaatagcccttccattataaataacattgagagtttttggtctggtccttgagccacaagaagtggaggggagaccatgcctgggaacagacccccttttcacagcagtaagtttgttttgaggctttctcagctacttggctcccacagaacccaaggcaggtacacaaaggaccttagatgagatctggcatatgcacccgcaatagaagggcaccacttggatgaccacaggcacttagtttttggctagtttttgtctgatagttaagacatccccatcctagcttctgtgagagttaaaaatctcaggtaagaaggcaaggaaggctctgttaatttatagctgtttagaggggaaagcagtgcagaccacttattaagcccgctgaggactagctttctgtctttcatacatttgggaaagataggaatgactgtttcaaagaagagaggtgcacataatttatgcaggcaagtatgatacttatttcattggttttgtgagtcatatatatacatatatatatatacacatatatatatgacttgaaaattaagatttaatactttaatgttttaagtgtggggggtttgggaaggaaggaatgtaatattatggatttagccttaggctttaagttttaggctggcaaaagaaatgttattcagtgggtttgaggtttggactactttcttcaaacttagagaattataacaggatggtgtttactttgttcacctggatgtccccaagactctagcttcttctatcagtggttggtctgatagaagaggtaaaaattgctcttgaaaatgtcctacaatttatgcagtttctttgataatatttttctgtttaaatccctgcttctgtttttggtctgttacctaaatatagttcaagtttaattctgtaagagcaaagaaatgaatttgatgaggaaattaagcatccaatggaggattggtcttgaagaccttaaaggtgctttccaacctgcactgctccagtgaaatgtggtacttttttcttttaaaagcaaccaagagagctgggaatatctgtgtacgcaaagtaattgcattttgtcccttcattttgactttcttagattcataatttgatacagtgcttaaacttccaaggaaattttaaacaattactacattacctgttcaaaataaggcttgttggaaatcctagtccatcaactaatttcaaaaatttatttttgatatgagtagcaacagctggtcatataccctatcccaaaaggaagaactgtcttgaacaagatgaatggaaaattgtggttaattctgaatttcatgtaatgacaacatattctttcataaaactatggcctgtttaagatggaactttgtgtgtgtctgctggggagggtggggtacatgtgtatggcgtgtgttcttgaaatgatgtctctctgaatatccaaaaaagtactgtactgtagaaatgctctttgaaaaagtctatcgactgaccatgatcaatctagcatatgtatgttcagtgggctagccttggtcctcagggacagtgtgtgactctagtggtcttcctaaccagtctcttgcctaaagatatctgggacctctactggctttaatgacaaataatgttatgttgaggttatgcttcctttgttatttgctgattttcctactaaatgtagcatttcaattagatccagctttcacattttgagataattgtaaaaagaatgaaattatgcagaaatggccaatatctcttatcaatctgttcttttggaaaccctcatgtactataaattgtgtacagttaaaaaaatatatatatatatatattcttacatgagtaaaaagcaccctctcccagcaatcgtatgccattggtatttgaagagaattcccaaataacccattgctgctgctgctgtttttgatttgtatgggtttttttgttttgtttgtttttgtgtggtaaactgatatttaaaaaaggaaaggagaaaaatcacgactactgtttacagactgaaaaattattgctttttatactactgagatcctaagttaagactctccaaagcaaacatttggtttaaatcatttatctgatgtagataaaaggtagagaaacttgtagtgttctccacataatggaaaatgtacaaatgcctagttgtgttgcccatcaattttgtatattttcataattttaattgttgaaaattgcattatattttgcaatcactatgttcaatctggatttgtctttcattttaacttttaatataaaaaggggtttcaatgtatctacaggcttgttattgaaacttcctacttatttgatgtgatttattaatataggaagtatatattcttccttaagtaagtgaagcatagcaaatctactttaaactggatgggttaatttatataaacattttcattttaagttggca

SEQ ID NO: 157166 - DNA, 2815 bp, Homo sapiens
  Payload ID: 10808
  Gene Symbol: NAA25
  Gene Name: N(alpha)-acetyltransferase 25, NatB auxiliary subunit
  ENST ID: ENST00000551858
  CDS Start-End: 7-120
gtcatcatggcgacgcggggccatgtgcaggaccctaacgacaggcgcctccggcccatttacgtagagatgggctttcaccgtgttagccaggatggtctcgatctcctgacctcatgatccacccgcctcagcttcccaaagtgctgggattacagccgtgagccaccacgcctggccgagacaactctttttctttgctgcacatcaatcaacttgcatccccgaaagtgccttcaaaatagaaattctggagctgccactgattatcttgacaatggtaataataaaatggcaattcagcaagcagataaactgttgaagaaacataaggatcttcattgtgctaaggttttaaaggcaattggtttacagagaactggaaagcaagaggaagcctttactcttgcacaggaggtggcagcccttgaacccacagatgacaactcactgcaggcactgactatcctttaccgggagatgcaccgaccggagttagttacaaaactttatgaggcagctgtgaagaaagttcccaatagtgaggagtatcactctcacctcttcatggcctatgccagagtgggtgaatacaagaaaatgcaacaggctggcatggctctatataagattgtccccaaaaatccctactacttttggtctgtgatgagcttaattatgcaatctatatcggcacaggatgaaaacctctcaaaaacaatgtttctgccccttgctgagagaatggtcgaaaaaatggtgaaagaggacaagatagaagctgaggctgaagttgaactttattatatgatcctggaacgtttgggaaagtaccaggaggccttggatgtcatcagagggaaattaggagagaagttgacaagtgagattcagagtcgggaaaataaatgcatggctatgtacaagaagctgagcaggtggccagagtgcaatgccctttcccggcgcctcttactaaaaaactcagatgactggcagttctatctgacttatttcgattctgtctttcgactgattgaagaggcctggagtcctcctgctgaaggtgaacactctttagaaggagaagtacattattctgcagaaaaagctgtgaagtttatagaagatcggataacggaagaatctaaaagttctcgccatctccgaggaccacatctagctaaattggagctgattaggcgtttacgaagtcaaggttgtaacgatgagtacaaactgggtgatccagaagaattaatgttccagtattttaaaaagtttggcgataaaccttgttgttttacagaccttaaggtgtttgttgacctcttacctgctacacagtgtacaaaatttattaatcagttacttggagttgttcctttgtcgacaccaacagaggataagctggcactgcctgctgacatcagagctctgcagcaacatttgtgtgtggtgcagctgacgaggttacttggcttgtaccacaccatggataaaaatcagaaattgagtgtggtcagagaattgatgttaaggtaccagcatggactggaatttgggaaaacctgtttgaaaacagaattgcaattttctgactattactgtctccttgctgtccatgcgcttattgatgtatggagggaaacaggtgatgagaccactgtgtggcaggccctgactttgctggaagagggattaacccatagcccttccaatgctcagttcaaattgctgcttgttcgaatctactgtatgctgggtgcatttgaaccagtggtggatctttactccagcctcgatgctaagcatatccagcatgataccattggttatcttttgacccgatatgctgaatctctaggtcagtatgctgctgcgtcccaatcctgtaacttcgcactcaggttttttcactccaaccagaaagatacctcagaatatattattcaagcttacaaatatggtgcatttgagaagatcccagagtttatcgcttttaggaacaggctgaataattctcttcattttgcacaagtccgtactgaacggatgctgttagaccttctacttgaagcaaatatatcaaccagtttagcagaaagtataaagtcaatgaaccttaggccagaagaagatgacattccatgggaagatttgcgagacaacagagacttaaatgtttttttcagctgggatccaaaagacagggacgtttctgaagaacataagaaactttccttagaggaggagaccttgtggttaagaatccgatccttaacattgaggctgataagtggacttccaagtctcaaccaccctgtggagccaaagaactcggagaagactgccgagaatggggtatcctcccggattgatattcttcgtttgctccttcaacagctggaggcaaccctggagacaggaaagcgatttattgagaaggatattcagtatcctttccttggtcctgtacctaccagaatgggtggattctttaattctggctgttctcagtgccagataagctctttttatcttgtcaatgatatttatgagctggataccagtggtttagaggatacaatggagattcaggaacgaatagaaaatagttttaagtctttactagaccagttaaaagatgtcttcagtaaatgtaaaggtgacctcttagaagttaaagatggtaacttgaaaacacatcctactcttttagaaaatctagttttctttgttgagactatttctgttatcctttgggtatccagttactgtgagagtgtcctacgaccatacaaactaaatttac

SEQ ID NO: 157167 - DNA, 421 bp, Homo sapiens
  Payload ID: 10808
  Gene Symbol: NAA25
  Gene Name: N(alpha)-acetyltransferase 25, NatB auxiliary subunit
  ENST ID: ENST00000547133
  CDS Start-End: 1-421
aacgacaggcgcctccggcccatttacggttttaaaggcaattggtttacagagaactggaaagcaagaggaagcctttactcttgcacaggaggtggcagcccttgaacccacagatgacaactcactgcaggcactgactatcctttaccgggagatgcaccgaccggagttagttacaaaactttatgaggcagctgtgaagaaagttcccaatagtgaggagtatcactctcacctcttcatggcctatgccagagtgggtgaatacaagaaaatgcaacaggctggcatggctctatataagattgtccccaaaaatccctactacttttggtctgtgatgagcttaattatgcaatctatatcggcacaggatgaaaacctctcaaaaacaatgtttctgccccttgctgagaga

SEQ ID NO: 157168 - DNA, 2933 bp, Homo sapiens
  Payload ID: 10808
  Gene Symbol: NAA25
  Gene Name: N(alpha)-acetyltransferase 25, NatB auxiliary subunit
  ENST ID: ENST00000549711
  CDS Start-End: 24-326
actgtggttctgcgcttgtcatcatggcgacgcggggccatgtgcaggaccctaacgacaggcgcctccggcccatttacgattatcttgacaatggtaataataaaatggcaattcagcaagcagataaactgttgaagaaacataaggatcttcattgtgctaaggttttaaaggcaattggtttacagagaactggaaagcaagaggaagcctttactcttgcacaggaggtggcagcccttgaacccacagatgacaactcactgcaggcactgactatcctttaccgggagatgcaccgacgctggcatggctctatataagattgtccccaaaaatccctactacttttggtctgtgatgagcttaattatgcaatctatatcggcacaggatgaaaacctctcaaaaacaatgtttctgccccttgctgagagaatggtcgaaaaaatggtgaaagaggacaagatagaagctgaggctgaagttgaactttattatatgatcctggaacgtttgggaaagtaccaggaggccttggatgtcatcagagggaaattaggagagaagttgacaagtgagattcagagtcgggaaaataaatgcatggctatgtacaagaagctgagcaggtggccagagtgcaatgccctttcccggcgcctcttactaaaaaactcagatgactggcagttctatctgacttatttcgattctgtctttcgactgattgaagaggcctggagtcctcctgctgaaggtgaacactctttagaaggagaagtacattattctgcagaaaaagctgtgaagtttatagaagatcggataacggaagaatctaaaagttctcgccatctccgaggaccacatctagctaaattggagctgattaggcgtttacgaagtcaaggttgtaacgatgagtacaaactgggtgatccagaagaattaatgttccagtattttaaaaagtttggcgataaaccttgttgttttacagaccttaaggtgtttgttgacctcttacctgctacacagtgtacaaaatttattaatcagttacttggagttgttcctttgtcgacaccaacagaggataagctggcactgcctgctgacatcagagctctgcagcaacatttgtgtgtggtgcagctgacgaggttacttggcttgtaccacaccatggataaaaatcagaaattgagtgtggtcagagaattgatgttaaggtaccagcatggactggaatttgggaaaacctgtttgaaaacagaattgcaattttctgactattactgtctccttgctgtccatgcgcttattgatgtatggagggaaacaggtgatgagaccactgtgtggcaggccctgactttgctggaagagggattaacccatagcccttccaatgctcagttcaaattgctgcttgttcgaatctactgtatgctgggtgcatttgaaccagtggtggatctttactccagcctcgatgctaagcatatccagcatgataccattggttatcttttgacccgatatgctgaatctctaggtcagtatgctgctgcgtcccaatcctgtaacttcgcactcaggttttttcactccaaccagaaagatatactgcaggcaaacagctcgccgaggtgtcccatgggggtttaaaagccgcatcgaatgcagttgaattagcgcccgtggcgcaatcccgcggcctgaaatgaaccctgcaaggctgtatatcagaggacctcagaatatattattcaagcttacaaatatggtgcatttgagaagatcccagagtttatcgcttttaggaacaggctgaataattctcttcattttgcacaagtccgtactgaacggatgctgttagaccttctacttgaagcaaatatatcaaccagtttagcagaaagtataaagtcaatgaaccttaggccagaagaagatgacattccatgggaagatttgcgagacaacagagacttaaatgtttttttcagctgggatccaaaagacagggacgtttctgaagaacataagaaactttccttagaggaggagaccttgtggttaagaatccgatccttaacattgaggctgataagtggacttccaagtctcaaccaccctgtggagccaaagaactcggagaagactgccgagaatggggtatcctcccggattgatattcttcgtttgctccttcaacagctggaggcaaccctggagacaggaaagcgatttattgagaaggatattcagtatcctttccttggtcctgtacctaccagaatgggtggattctttaattctggctgttctcagtgccagataagctctttttatcttgtcaatgatatttatgagctggataccagtggtttagaggatacaatggagattcaggaacgaatagaaaatagttttaagtctttactagaccagttaaaagatgtcttcagtaaatgtaaaggtgacctcttagaagttaaagatggtaacttgaaaacacatcctactcttttagaaaatctagttttctttgttgagactatttctgttatcctttgggtatccagttactgtgagagtgtcctacgaccatacaaactaaatttacagaaaaagaaaaagaagaaaaaagaaaccagcatcatcatgccacctgtctttaccagtttccaagactatgttactgggcttcagactttaatttccaatgttgtggatcatattaaagggcttgaaacacatctaattgcacttaaacttgaagaacttattttagaagacacttctctctcaccggaagagagaaaattttcaaagactgtgcaagggaaggtgcagagcagttatctgcactcacttctggaaatgggggagctgctgaaaaaaagacttgagaccac

SEQ ID NO: 157169 - DNA, 3754 bp, Homo sapiens
  Payload ID: 10809
  Gene Symbol: NAA30
  Gene Name: N(alpha)-acetyltransferase 30, NatC catalytic subunit
  ENST ID: ENST00000298406
  CDS Start-End: 1-524
cagccacccctgacggaggccccagagcgactgcaacaaaaggagccggggtacactcgggcgagaggccccctcactccctctctagtaatgcaagaactgcggtccccagcccggtggaggcagcggcggcgagcgatcccgcggcggcccgcaatggactggccgagggcaccgagcaggaggaggaggaggaagacgagcaggccatggtaggggaggagtgtgtaggtgccatcgtttgcaagttggatatgcacaaaaagatgttccgcagaggttatatagccatgttagccgtggattccaaatacaggagaaatggcattggtactaacttggttaagaaagctatatatgccatggttgagggagactgtgatgaggttgttttggaaaccgaaataacaaataagtccgctttgaaactttatgaaaatcttggttttgttcgagataagaggctgttcagatactatttaaatggagttgatgcactgcgacttaaactgtggctgcgttgagaaactgacatcaaggaacaactatcatccgcacagaatcgacctttgcatgcaatgcaatttgtacagaattgctttgcaggtggatttagtaatttccatgcagctcttacctgtcagtgtctcattgagtgtcgcacaatatttgttgcactttggcatggcacatttgttctgaattaaaagattgttttaaacttcaggagttcttttggtaccaacaagatgtgccagttgatagccaagatttatgtgttcatttgcaaagtctgctgacaatgttatttacacagtgatcattttatcacagaaccagtaagtggaacataatttttgttccttaaaaaagccaatgtggattgtaaaagtctttaagtatactaacatttcacacaaaacctgccctagttttctgaagtgggtgagggagacgcttcagttttaggttttattttttcaatattaaattttccattcttgaatattggtacctcagtgattagtgaatgaaaaaaatgtagggtgggtatgtcttacaatgagtaaaggtaacaattaaattttgtctgccagtgcctgtgtagataagtatatttgtcttcatctctagtttttgaatgcatgctatcttttccttttctttaaggcctttgcaagcaaacttttgtttttatttaaattctaaatttgataaattatttcagatttttataatttggatacttttttcaggtgaatgaaagaatggtttactttagaagtccctttttccttacagtaacaagttgaatctacttggaaaattgagaaatggctcaaaagagataagaaaagttgatggagccgggaattgctggggtttagatgcactttttcttttgagagtaagggaagttttggaaaagaatagaaaattagtgtaagttgatatgattttatttaatcaaaattactgctacgctgcgaagaacagcttttacaaagtagctgaatttgtttttcccacttgatttggattcacattgctttcatttcttaaaatgcttcacttcaggttcttggtcttggaaataaatttcaaggtgcattgtatccattttaagctgctttattttattttcacttgtatgagcaaattcttgggggagctttgcttttcttctgccagaaaaacaaaagggggaaatgaaaatcttttttggaatgagttctgtgggttttcttaacagccaccatgtttattagttacattgtgttttggccaatcagtgcaatgtaacaaattttacagttaattgctttcaattgagtcagtaaacctgtgatagataatttatttaactggaaaacctaggtacccataagaaaaaagattcattctctgtgaaaactgtaggaatctgttgttgttttcatttgaatatgctctacttctgctctagtatttggtttggaatatattttgtggctctaattactgtatttttaaaaaccctacctccattaacagttggtaaaggccccttttcaggaaagtttgttgctttttttttttttttaaaggaaagctgctctttgctcagtatagtgttttgaaagtgaacatagtaacaaatactttaaaaataaagatacacaatttatatttgaaaataaaaactttctgctggtgggattatttatagttctttatttttaaagaaaatgttttcctttttatattgctcttgaaagtttaatgagcagaatacaatactggttataataaaaatatggtaaccacacagtactcagcctttcaatatgtttttggtcaaacttcatttaggcactagcatttagaagaataccaatcacagtgatgcttttgttatttaatatgaaggaaatggaactaaaacatttatgtcatcaaattttatttcacttctttatatttgacttgctggttgatacataatggttgatgaacatatatttgcttaaatcactaatagggatggttgtaaagtagatagatcattggttcaaccattttagtgtttttgccagattgtcaatgaaaccatcatactgaccttttcctccaaaattgccaaattgactgaactggttgggtgtttgtaaagatgacgttaactgtgtgactaaaaagtcagatggttgccatattgtttggaatatgttgaatgtcagtgtatgccttatgtctttaattgggtatgcaaaaaaatttttacttaagtagattaaaattttaacctctagcatgaaaacccagcaccaacactgaaagactccattcaggttgaagtagcctcaaacagtaatttactttttgataataggctgttgtttttcttaaataagcttaaaacaattctatctgaaattggtagcatgggttcacttggctacaactgagcaaaatagatgcaactttcttttaatggggtgctgcctctttaggactgactgtactatccactgacactggtttggcagttggtactgctgaacatttttatacatgctaccatgaagctatatatgttagtattgaagaagctaacgggtatactatcatttttgatgtgtgggctgattataatttcctgtatttcctgtacattgggatgaaactactttagcaaagtccacagatcagaaaccagacggtagtttttgaagttgaaaccagcaaaataagaaaaaataaaaaatcgattttaatattttctgcctctttcccaaattacccttcccacttgctcgacaaatctatgtaaagcagtttgttttttcatgttttaactttaccttgccctgtgttatggtactggctgacatgtctaagactggatgtgtatatttattatggtgtctaaaaatcatgaagttcatcacttttcaggagtatagataaaatcaaattggtagtacatcagagttacttttcagtgcaccatgacatcactaaaatgagtgctgtaatgttacagggctttcaggtttgtaaaaacataaccataaattatattgacgtcagatatgagttgagtatctataaaatatcacgtgtatctcaaaatattggactgctgtttgactggatattgctgcataattttcttctattgtcccatatccttttggagagagatttaatgggatttgaaatgtgcaagctgtctaaataagatgcagtcaaataaagtatggttaagttg

SEQ ID NO: 157170 - DNA, 1294 bp, Homo sapiens
  Payload ID: 10809
  Gene Symbol: NAA30
  Gene Name: N(alpha)-acetyltransferase 30, NatC catalytic subunit
  ENST ID: ENST00000555166
  CDS Start-End: 166-480
aggcccaggaaactttacccggcctaacagctgaggcgctttacggcgacggcggctgagtgagaaccttggcggctgtggaggctgccgcggctgcgaaggaggcggcggcggtggcggaggaagaggagtggcggcagcggcggcggggacccgtgcggggccatggtaggggaggagtgtgtaggtgccatcgtttgcaagttggatatgcacaaaaagatgttccgcagaggttatatagccatgttagccgtggattccaaatacaggagaaatggcattggtactaacttggttaagaaagctatatatgccatggttgagggagactgtgatgaggttgttttggaaaccgaaataacaaataagtccgctttgaaactttatgaaaatcttggttttgttcgagataagaggctgttcagatactatttaaatggagttgatgcactgcgacttaaactgtggctgcgttgagaaactgacatcaaggaacaactatcatccgcacagaatcgacctttgcatgcaatgcaatttgtacagaattgctttgcaggtggatttagtaatttccatgcagctcttacctgtcagtgtctcattgagtgtcgcacaatatttgttgcactttggcatggcacatttgttctgaattaaaagattgttttaaacttcaggagttcttttggtaccaacaagatgtgccagttgatagccaagatttatgtgttcatttgcaaagtctgctgacaatgttatttacacagtgatcattttatcacagaaccagtaagtggaacataatttttgttccttaaaaaagccaatgtggattgtaaaagtctttaagtatactaacatttcacacaaaacctgccctagttttctgaagtgggtgagggagacgcttcagttttaggttttattttttcaatattaaattttccattcttgaatattggtacctcagtgattagtgaatgaaaaaaatgtagggtgggtatgtcttacaatgagtaaaggtaacaattaaattttgtctgccagtgcctgtgtagataagtatatttgtcttcatctctagtttttgaatgcatgctatcttttccttttctttaaggcctttgcaagcaaacttttgtttttatttaaattctaaatttgataaattatttcagatttttataatttggatacttttttcaggtgaatgaaagaatggtttactttagaagtccctttttccttacagtaacaagttgaatctacttggaaaattgagaaatgg

SEQ ID NO: 157171 - DNA, 795 bp, Homo sapiens
  Payload ID: 10809
  Gene Symbol: NAA30
  Gene Name: N(alpha)-acetyltransferase 30, NatC catalytic subunit
  ENST ID: ENST00000554703
  CDS Start-End: 122-271
ggcgacggcggctgagtgagaaccttggcggctgtggaggctgccgcggctgcgaaggaggcggcggcggtggcggaggaagaggagtggcggcagcggcggcggggacccgtgcggggccatggtaggggaggagtgtgtaggtgccatcgtttgcaagttggatatgcacaaaaagatgttccgcagaggttatatagccatgttagccgtggattccaaatacaggagaaatggcattggttgttttggaaaccgaaataacaaataagtccgctttgaaactttatgaaaatcttggttttgttcgagataagaggctgttcagatactatttaaatggagttgatgcactgcgacttaaactgtggctgcgttgagaaactgacatcaaggaacaactatcatccgcacagaatcgacctttgcatgcaatgcaatttgtacagaattgctttgcaggtggatttagtaatttccatgcagctcttacctgtcagtgtctcattgagtgtcgcacaatatttgttgcactttggcatggcacatttgttctgaattaaaagattgttttaaacttcaggagttcttttggtaccaacaagatgtgccagttgatagccaagatttatgtgttcatttgcaaagtctgctgacaatgttatttacacagtgatcattttatcacagaaccagtaagtggaacataatttttgttccttaaaaaagccaatgtggattgtaaaagtctttaagtatactaacatttcacacaaaacctgccctagttttctg

SEQ ID NO: 157172 - DNA, 7644 bp, Homo sapiens
  Payload ID: 10809
  Gene Symbol: NAA30
  Gene Name: N(alpha)-acetyltransferase 30, NatC catalytic subunit
  Uniprot ID: Q147X3
  ENST ID: ENST00000556492
  CDS Start-End: 155-1243
aaactttacccggcctaacagctgaggcgctttacggcgacggcggctgagtgagaaccttggcggctgtggaggctgccgcggctgcgaaggaggcggcggcggtggcggaggaagaggagtggcggcagcggcggcggggacccgtgcggggatggcggaggtaccgcctgggcctagcagcctcctcccaccaccagcacctccggccccggcggcggtcgagccccgctgtcccttcccggcgggggccgccctcgcctgctgcagcgaggacgaggaggacgacgaagagcacgaaggcggcggcagcaggagcccggcgggcggagagtcggcgacggtggcggccaaggggcatccgtgcctccgctgccctcagccgccgcaggagcagcagcagctcaacggattgattagccccgaactgcggcacctccgggcggccgcctccctcaagagcaaggtcctgagcgtagcagaggtggccgcgaccacagccacccctgacggaggccccagagcgactgcaacaaaaggagccggggtacactcgggcgagaggccccctcactccctctctagtaatgcaagaactgcggtccccagcccggtggaggcagcggcggcgagcgatcccgcggcggcccgcaatggactggccgagggcaccgagcaggaggaggaggaggaagacgagcaggtgcggctgctgtcttcgtccctgaccgccgactgcagcttaagaagcccttcgggcagggaggttgagcctggggaggatcggacgatacgatatgtccgatatgaatccgagctacaaatgcccgatatcatgagactgatcaccaaagatctgtccgaaccctactccatttatacctatagatattttatccacaactggccacagctgtgcttcttggccatggtaggggaggagtgtgtaggtgccatcgtttgcaagttggatatgcacaaaaagatgttccgcagaggttatatagccatgttagccgtggattccaaatacaggagaaatggcattggtactaacttggttaagaaagctatatatgccatggttgagggagactgtgatgaggttgttttggaaaccgaaataacaaataagtccgctttgaaactttatgaaaatcttggttttgttcgagataagaggctgttcagatactatttaaatggagttgatgcactgcgacttaaactgtggctgcgttgagaaactgacatcaaggaacaactatcatccgcacagaatcgacctttgcatgcaatgcaatttgtacagaattgctttgcaggtggatttagtaatttccatgcagctcttacctgtcagtgtctcattgagtgtcgcacaatatttgttgcactttggcatggcacatttgttctgaattaaaagattgttttaaacttcaggagttcttttggtaccaacaagatgtgccagttgatagccaagatttatgtgttcatttgcaaagtctgctgacaatgttatttacacagtgatcattttatcacagaaccagtaagtggaacataatttttgttccttaaaaaagccaatgtggattgtaaaagtctttaagtatactaacatttcacacaaaacctgccctagttttctgaagtgggtgagggagacgcttcagttttaggttttattttttcaatattaaattttccattcttgaatattggtacctcagtgattagtgaatgaaaaaaatgtagggtgggtatgtcttacaatgagtaaaggtaacaattaaattttgtctgccagtgcctgtgtagataagtatatttgtcttcatctctagtttttgaatgcatgctatcttttccttttctttaaggcctttgcaagcaaacttttgtttttatttaaattctaaatttgataaattatttcagatttttataatttggatacttttttcaggtgaatgaaagaatggtttactttagaagtccctttttccttacagtaacaagttgaatctacttggaaaattgagaaatggctcaaaagagataagaaaagttgatggagccgggaattgctggggtttagatgcactttttcttttgagagtaagggaagttttggaaaagaatagaaaattagtgtaagttgatatgattttatttaatcaaaattactgctacgctgcgaagaacagcttttacaaagtagctgaatttgtttttcccacttgatttggattcacattgctttcatttcttaaaatgcttcacttcaggttcttggtcttggaaataaatttcaaggtgcattgtatccattttaagctgctttattttattttcacttgtatgagcaaattcttgggggagctttgcttttcttctgccagaaaaacaaaagggggaaatgaaaatcttttttggaatgagttctgtgggttttcttaacagccaccatgtttattagttacattgtgttttggccaatcagtgcaatgtaacaaattttacagttaattgctttcaattgagtcagtaaacctgtgatagataatttatttaactggaaaacctaggtacccataagaaaaaagattcattctctgtgaaaactgtaggaatctgttgttgttttcatttgaatatgctctacttctgctctagtatttggtttggaatatattttgtggctctaattactgtatttttaaaaaccctacctccattaacagttggtaaaggccccttttcaggaaagtttgttgctttttttttttttttaaaggaaagctgctctttgctcagtatagtgttttgaaagtgaacatagtaacaaatactttaaaaataaagatacacaatttatatttgaaaataaaaactttctgctggtgggattatttatagttctttatttttaaagaaaatgttttcctttttatattgctcttgaaagtttaatgagcagaatacaatactggttataataaaaatatggtaaccacacagtactcagcctttcaatatgtttttggtcaaacttcatttaggcactagcatttagaagaataccaatcacagtgatgcttttgttatttaatatgaaggaaatggaactaaaacatttatgtcatcaaattttatttcacttctttatatttgacttgctggttgatacataatggttgatgaacatatatttgcttaaatcactaatagggatggttgtaaagtagatagatcattggttcaaccattttagtgtttttgccagattgtcaatgaaaccatcatactgaccttttcctccaaaattgccaaattgactgaactggttgggtgtttgtaaagatgacgttaactgtgtgactaaaaagtcagatggttgccatattgtttggaatatgttgaatgtcagtgtatgccttatgtctttaattgggtatgcaaaaaaatttttacttaagtagattaaaattttaacctctagcatgaaaacccagcaccaacactgaaagactccattcaggttgaagtagcctcaaacagtaatttactttttgataataggctgttgtttttcttaaataagcttaaaacaattctatctgaaattggtagcatgggttcacttggctacaactgagcaaaatagatgcaactttcttttaatggggtgctgcctctttaggactgactgtactatccactgacactggtttggcagttggtactgctgaacatttttatacatgctaccatgaagctatatatgttagtattgaagaagctaacgggtatactatcatttttgatgtgtgggctgattataatttcctgtatttcctgtacattgggatgaaactactttagcaaagtccacagatcagaaaccagacggtagtttttgaagttgaaaccagcaaaataagaaaaaataaaaaatcgattttaatattttctgcctctttcccaaattacccttcccacttgctcgacaaatctatgtaaagcagtttgttttttcatgttttaactttaccttgccctgtgttatggtactggctgacatgtctaagactggatgtgtatatttattatggtgtctaaaaatcatgaagttcatcacttttcaggagtatagataaaatcaaattggtagtacatcagagttacttttcagtgcaccatgacatcactaaaatgagtgctgtaatgttacagggctttcaggtttgtaaaaacataaccataaattatattgacgtcagatatgagttgagtatctataaaatatcacgtgtatctcaaaatattggactgctgtttgactggatattgctgcataattttcttctattgtcccatatccttttggagagagatttaatgggatttgaaatgtgcaagctgtctaaataagatgcagtcaaataaagtatggttaagttgtgtttgcatttttcttttagatacagctgtgtgcattttatgattgggttgttttgcttttacctactaagtaaaacagcaacaaacaatatattgtttcccgcttcctgcctttcatctaagagttacggggaagaagtattacataattgtcatcactgttgtgtgttctgacaaagtaaatttgaaaataacatgaacttgatttttctaaaagtactcagtcaactcatatgtcagttatcggtacattttccatgtgttcagtcaaaagtttatctttttagtctgtttcatagcagtttatttctaagacagtttttattttaatttacttttttgtctgtacactgccactctgtaatgttccccccaccccatcccacccttggtaagacaccaaagtaaaatagagcaatatccaaagagctttttgcccctgtcttgtgaggagctttaaatagctgtgaatacttctgtatgtcaagattttcggattttagtggaaggatgaaatgatctgttttaatcatttaactgctaaattacttttatcatgcatgccaaatctttacattattctttagagtaatactgtaaaagtatctgagtttgttttatttgggccttatgtggaactcgaaatacttcataaattcactctaaggtctaaataagaaccagaaggttgataccattttttcacaccagtaaacacagatcagtattaacctgtagcccagaggtgttagatttattttttgagacagagtctcactctgttgcccaggctggagtgcggtggcacaatcttggctcactgcaacctctgccccctgggttcaagcaattcttgtgccttagcctcctgagtagctgggactacaggtgcatgccaccacgcccagccaatttcttgtattcttagtatgagacagggtttcaccatgttggccaggctggtctcaaactcctgacctcaagtgatctgcccgcctcggcctcccaaagtgttggaattacaggcgtgagccaccacgcccagcctatgatattctttttataagcaacttttaaaaagttttttaaaagatctcataagcatatagcactgctacactttagatcactactgtccagtcacactttatataaggatagatgtgtccttttcactccccagtatggtagttactagtcacatgtgtagctactgagcccctgaagtgtgggtgggatgattgagctgaatttgtaattttaatcaaagttagccacatgtggcttgtggctactgtattggacagcagagctttagataagcagtaataacaggaagggagtgtttgtataggttgaaagataaaatggaaggatcacaattaggccagatgtggtggctcacgcctattatcccagcgttttgggaggctgagatggtagtttgcaaccagccaggacagcatagcaagactgtttctgaaaaatcttttaaaataacacaactaaaaattacctctgagcaagagtatagctgaactgtttatactgacaatatatttcattaatacagtgtttgaccactttccaccccaccaaccactgcccttgttatgtagcctttctgagaaaagcagccctttcagattttattgttggaagttccttgggttgcagagatgcagattcaagtgccaaaagttgtttctgatgagacttacctttttagccttaaaatatttgtatagttggctctaataatttctcatttttgatgaatttgaaatcatttcacttctaaatgagattggtcatctcatgagtggtcaagttggaacatggaggtctatcatgtttttaacctccaagatccacttatggggatgaggccaaaggccaatgttacttctagaagaaccagattaatttttctgccttccatcaccgcagtgtattacctttgaccctcgctggtcatctggtaagtgtagttcatcaaaagagcagaaataggcatagtaaacacctggacacaaagacagtgccaggcttggtacaacctgttaacactgttgaggaaagagctcaaaacatgcattactttggggattaagtcagtgtttaatctcaatatgaaacagacctagaaataacaaagaccactgaagtgccaaatttatcttctaatactactatttaaactatgcaatatgggggttataatgaaatagttttagtctatgtaaggtttttataatgctaagaaataagcttatttttagatatggattttttatgactacctctttgctgtatgaatatcttaattttctaatacctcagtttcatgagaactgtatgtacatttttgtaaataaaataatttaccatatactaggagaaggacctgcttttaaagaaattgtgtaaagacatttgttattggatgtgttacatagtaaatcaatttgaaatttcttaaaaacgtttataagacttttctggtctccttgaccgagggattttagtataagtatttagtgagatttgtattctaggaagtgtgtgccgtcacttgttcatttacaactgcaaagattgtatgtctcctatgttttcctttcatgccaaagaaactcaccctttttaaaagccagcaggttgcacaaaccaaaaacaaaatattttgccccttaaataggcattttaagaagttttatttcctggtacttaaatattgtgtagagggaaagctagttgtaataatttgtaaaaatgcgtgtatttttaggaatgcgctatttccagtaagggaagtattgacatttttaaggaactgtgctgcattaaaatccacagttgcatgaaacttttaaaagtttaagatataaagtaattgctaaaatttgtgaactactcagaggactcaatgccctaacatgtaggggattgatcattgcgatgtttaggccaggatttctcatgattgtatatggttattgatcatttttaaggggctgaacctgctgcctttatacttttgacacctccctccctccctccctccaaactgtggctgtaaacagtgactctgcatagtcagcgttatacttgatttctttgtgaatgcaaataaaataaaatttgtaagtccaccaaatattgacttaa

SEQ ID NO: 157173 - DNA, 2649 bp, Homo sapiens
  Payload ID: 10810
  Gene Symbol: NAA35
  Gene Name: N(alpha)-acetyltransferase 35, NatC auxiliary subunit
  Uniprot ID: Q5VZE5
  ENST ID: ENST00000361671
  CDS Start-End: 134-2311
atacgcatgcgtgcacgctgccggtcgggctgggctgagaggggagggggcggcggcggccgaggcggcgtcgttatttccgtggtccggacagtgcgtggcggcgcgggtgaccacgggagaagtaggcataatggttatgaaagcttctgtagatgatgacgattcaggatgggagctcagtatgccagaaaaaatggagaaaagcaatacaaactgggtggacattacccaagattttgaagaagcttgtcgagaattaaagttgggagaactacttcatgataagctatttggtctttttgaagccatgtctgctattgaaatgatggatcccaagatggatgctggcatgattggaaaccaagttaatcgaaaagttctcaattttgaacaagctatcaaggatggcactattaaaattaaagatctcaccttgcctgaactgatagggattatggatacatgtttttgctgtttgataacgtggttagaaggccattcactggcacagacagtatttacgtgcctttacattcataatccagactttatagaagatcctgctatgaaggcttttgctctgggaatcttgaaaatctgtgacattgcaagggaaaaagtaaataaagctgctgtttttgaagaggaagattttcagtcaatgacttatggatttaaaatggctaacagtgtgacagatcttcgagttacaggcatgctaaaagatgtggaggatgacatgcaaagaagagtaaagagtactcgaagtcgacaaggagaagaaagagatccagaagttgaactagaacaccaacaatgtttagcagtattcagcagagtgaaatttactcgtgtgttactgacagtgcttatagcctttactaagaaagagaccagtgctgttgcagaagctcaaaaattgatggttcaagcagcagatcttctttctgccattcataattcattgcatcatggcatccaggcccagaatgatactacaaaaggagatcatccaattatgatgggttttgaaccccttgtgaaccagaggctacttccacctaccttccctcgatatgcaaaaataattaaaagggaagaaatggtgaactattttgcaagattaatagatagaataaaaactgtctgtgaggttgtgaatttaacaaatttacattgtatcctggattttttctgtgaatttagtgaacagtcaccatgtgttctttcaagatctctgttacaaaccactttcctggtggataacaaaaaggtctttggaactcatctcatgcaagacatggtgaaagatgcacttcggtcttttgtcagtcctccggtgctttcccccaagtgctacctatataataatcaccaggctaaggactgtatcgactcctttgttactcactgtgttcggccattctgtagtcttattcagatccatggacataacagggctcgacagagagataagcttggtcatattcttgaggaatttgccaccttgcaggatgaggcagagaaggttgatgcagcgcttcacaccatgctgttgaaacaggaaccccaaaggcaacatttggcctgtttaggtacctgggtcctttaccataaccttcgcattatgatacagtaccttctaagtggctttgaattggaactctacagtatgcacgagtactattacatatattggtatctctctgaattcctttacgcatggttgatgtcaacattgagtcgtgccgatggctctcaaatggcagaggaaaggataatggaagagcagcagaaaggccgtagtagtaaaaaaacaaagaaaaaaaagaaagttcgcccattgagccgagagatcacaatgagccaagcatatcagaacatgtgtgctggaatgtttaaaaccatggtagcatttgacatggacggcaaagtacgtaaaccgaagtttgagcttgatagtgaacaagttcggtatgaacacaggtttgctccattcaacagtgtgatgaccccgccgccagtgcactacttacagttcaaggaaatgtctgacctcaataaatatagccctcctcctcagtctcctgaactgtatgtggcagctagtaagcactttcaacaggcaaaaatgatattggaaaatattcctaacccggaccatgaggttaatagaattttaaaggttgccaaacccaactttgtggttatgaagttattggcaggaggacacaaaaaggaatctaaagttcctcctgaatttgatttctctgctcataaatattttcctgttgtgaaacttgtttgagagagactggggaggtggccataaaggggcagagtcttctttcagacccaactcttagagggcacatcaccaggctccacatcacgggaagtgagatggatttcttgggtaacaactcattataaggaatacttttagtttgacagccttatatgacatgaatgaaaactgctgttttaaagtggtttattatgttccatggaagaaactggtcttattgaatgcattgatgaacgttatatggttttattacagatttaatcacaaatcattttttatgaatgattgagtgaaaatagtgtttataaaggttaataaatttcttgacaaaaaaaaaa

SEQ ID NO: 157174 - DNA, 1797 bp, Homo sapiens
  Payload ID: 10810
  Gene Symbol: NAA35
  Gene Name: N(alpha)-acetyltransferase 35, NatC auxiliary subunit
  Uniprot ID: Q5VZE5
  ENST ID: ENST00000376040
  CDS Start-End: 352-1236
gcttatgcgcccagtgggaccggggctgggctgggctgacccgggcagggcggaagggaagcgtgtgcccgcctcaggtgtgcctcggccctaggcccggccggcgggaccctgcggtgcctgccggctcctcattgctcccggcgaggttctgcctgggtccgggccggctctggcccgggagaggtcccagcgagctctggccagatgaagggctaccttgattgacttcggtagctgccgcatggggtcctgggctgcgagaggggaccctgaatagtgccttggtcttttgtggctattattgaaagttggaagctctggagttgttcttttcgggccagaggcataatggttatgaaagcttctgtagatgatgacgattcaggatgggagctcagtatgccagaaaaaatggagaaaagcaatacaaactgggtggacattacccaagattttgaagaagcttgtcgagaattaaagttgggagaactacttcatgataagctatttggtctttttgaagccatgtctgctattgaaatgatggatcccaagatggatgctggcatgattggaaaccaagttaatcgaaaagttctcaattttgaacaagctatcaaggatggcactattaaaattaaagatctcaccttgcctgaactgatagggattatggatacatgtttttgctgtttgataacgtggttagaaggccattcactggcacagacagtatttacgtgcctttacattcataatccagactttatagaagatcctgctatgaaggcttttgctctgggaatcttgaaaatctgtgacattgcaagggaaaaagtaaataaagctgctgtttttgaagaggaagattttcagtcaatgacttatggatttaaaatggctaacagtgtgacagatcttcgagttacaggcatgctaaaagatgtggaggatgacatgcaaagaagagtaaagagtactcgaagtcgacaaggagaagaaagagatccagaagttgaactagaacaccaacaatgtttagcagtattcagcagagtgaaatttactcgtgtgttactgacagtgcttatagcctttactaagaaagagaccagtgctgttgcagaagctcaaaaattgatggttcaagcagcagatcttctttctgccattcataattcattgcatcatggcatccaggcccagaatgatactacaaaaggaggtctctgacatcttctagagatggaggtggaagtcagagataatgtgtaaaactgaaaagaaacgaaggagtactctaagcttgttttttgccaatgtgtagatcagaggtgtccaatcttttttttttgagacgaagtttcactattgttgcctaggctggagtgcaatggcgtgatctcggctcaatgcaacctctgcctcccgggttcaaatgattctcttacctcaccctcctgagtagctggaattacaggtgcctgtcaccatgcccggctaactttttgtattctttttttagtggagacggagtttcaccatgttggccaggctggtctcgaactcctgacctcaagtgatccgccctccttggccttccaaagtgctgggattacaggcgtgagccactgcgcctgaccggggtgtccaatcttttggcttcccagggccaccctggaagaagaattggtcttgcatcacacataaaatatgctaatgagagctgatgagccaaaaaaagaaaaaatcaccaaaacaaatctcataatgttttaataaagtttacaaact

SEQ ID NO: 157175 - DNA, 999 bp, Homo sapiens
  Payload ID: 10811
  Gene Symbol: NAA38
  Gene Name: N(alpha)-acetyltransferase 38, NatC auxiliary subunit
  Uniprot ID: Q9BRA0
  ENST ID: ENST00000333775
  CDS Start-End: 432-953
gcagagaacgaatacgctccgttttaattcagtggcctgggctacatgggatatttaggacagactatctctctgagacagaaaaacaagggaggaggcagtatgaaagaatgtattctcgctaaattccagtttctaaaggatgtgtaagaaaccagaggtaaaggtctcgcgatatcttaagacatccggcgtagtacgcttcagtgagccacagcgctagagaagtaggagaagctcgcgagatctgtgccgttgccgaggagactaggagggggaggagaggggatctcgcgaaaggaaagaggtcgggagcgctcgcgagatctcggaccacccaacctgaaaggtgcttaggaagttgaaaggcccagaggaggcctccgggcaaatggccggagctggaccgaccatgctgctacgagaagagaatggctgttgcagtcggcgtcagagcagctccagtgctggggttagcacgggctctggttctgggactgaggggcagtcaagcagcaagatggagggggtggggaactgcagctcccggcagcctctgggctttgtgtgagtgccccgcgggctgccgggagctgtggttccgcgggcgggcagcctgggctgcgcggtctgagcgcttgttacaccccgcgcaggattcggacggagagcgcgaggactcggcggctgagcgcgcccgacagcagctagaggcgctgctcaacaagactatgcgcattcgcatgacagatggacggacactggtcggctgcttcctctgcactgaccgtgactgcaatgtcatcctgggctcggcgcaggagttcctcaagccgtcggattccttctctgccggggagccccgtgtgctgggcctggccatggtacccggacaccacatcgtttccattgaggtgcagagggagagtctgaccgggcctccgtatctctgaccacgatggcgcttacctttcagacttcattaaacttatgaccgaa

SEQ ID NO: 157176 - DNA, 529 bp, Homo sapiens
  Payload ID: 10811
  Gene Symbol: NAA38
  Gene Name: N(alpha)-acetyltransferase 38, NatC auxiliary subunit
  ENST ID: ENST00000575208
  CDS Start-End: 262-483
gtactcactactactacgacctccgtcgcgtccgggagccgaggggagagcgtttatccgctgacatggaaaccattgtccttttccggccaccgtccactgagataaatatcaggggcggggtttggactgcacgtgttcacgggaaacgtagtatgagtcccgcgtggggcatataaggatcaagattcggacggagagcgcgaggactcggcggctgagcgcgcccgacagcagctagaggcgctgctcaacaagactatgcgcattcgcatgacagatggacggacactggtcggctgcttcctctgcactgaccgtgactgcaatgtcatcctgggctcggcgcaggagttcctcaagccgtcggattccttctctgccggggagccccgtgtgctgggcctggccatggtacccggacaccacatcgtttccattgaggtgcagagggagagtctgaccgggcctccgtatctctgaccacgatggcgcttacctttcagacttcattaaacttatgaccgaa

SEQ ID NO: 157177 - DNA, 424 bp, Homo sapiens
  Payload ID: 10811
  Gene Symbol: NAA38
  Gene Name: N(alpha)-acetyltransferase 38, NatC auxiliary subunit
  ENST ID: ENST00000576384
  CDS Start-End: 141-392
agctgtggttccgcgggcgggcagcctgggctgcgcggtctgagcgcttgttacaccccgcgcaggattcggacggagagcgcgaggactcggcggctgagcgcgcccgacagcagctagaggcgctgctcaacaagactatgcgcattcgcatgacagatggacggacactggtcggctgcttcctctgcactgaccgtgactgcaatgtcatcctgggctcggcgcaggagttcctcaagccgtcgggtcagtgcccggggaatgcacacccgcctgattccttctctgccggggagccccgtgtgctgggcctggccatggtacccggacaccacatcgtttccattgaggtgcagagggagagtctgaccgggcctccgtatctctgaccacgatggcgcttacctttcagacttcatta

SEQ ID NO: 157178 - DNA, 852 bp, Homo sapiens
  Payload ID: 10811
  Gene Symbol: NAA38
  Gene Name: N(alpha)-acetyltransferase 38, NatC auxiliary subunit
  Uniprot ID: Q9BRA0
  ENST ID: ENST00000575771
  CDS Start-End: 429-806
aattgagttgcgccgctttcaggagttgcggggtggggcagagaacgaatacgctccgttttaattcagtggcctgggctacatgggatatttaggacagactatctctctgagacagaaaaacaagggaggaggcagtatgaaagaatgtattctcgctaaattccagtttctaaaggatgtgtaagaaaccagaggtaaaggtctcgcgatatcttaagacatccggcgtagtacgcttcagtgagccacagcgctagagaagtaggagaagctcgcgagatctgtgccgttgccgaggagactaggagggggaggagaggggatctcgcgaaaggaaagaggtcgggagcgctcgcgagatctcggaccacccaacctgaaaggtgcttaggaagttgaaaggcccagaggaggcctccgggcaaatggccggagctggaccgaccatgctgctacgagaagagaatggctgttgcagtcggcgtcagagcagctccagtgctggggattcggacggagagcgcgaggactcggcggctgagcgcgcccgacagcagctagaggcgctgctcaacaagactatgcgcattcgcatgacagatggacggacactggtcggctgcttcctctgcactgaccgtgactgcaatgtcatcctgggctcggcgcaggagttcctcaagccgtcggattccttctctgccggggagccccgtgtgctgggcctggccatggtacccggacaccacatcgtttccattgaggtgcagagggagagtctgaccgggcctccgtatctctgaccacgatggcgcttacctttcagacttcattaaacttatgaccgaa

SEQ ID NO: 157179 - DNA, 553 bp, Homo sapiens
  Payload ID: 10811
  Gene Symbol: NAA38
  Gene Name: N(alpha)-acetyltransferase 38, NatC auxiliary subunit
  ENST ID: ENST00000575071
  CDS Start-End: 100-507
cgcgaaaggaaagaggtcgggagcgctcgcgagatctcggaccacccaacctgaaaggtgcttaggaagttgaaaggcccagaggaggcctccgggcaaatggccggagctggaccgaccatgctgctacgagaagagaatggctgttgcagtcggcgtcagagcagctccagtgctggggattcggacggagagcgcgaggactcggcggctgagcgcgcccgacagcagctagaggcgctgctcaacaagactatgcgcattcgcatgacagatggacggacactggtcggctgcttcctctgcactgaccgtgactgcaatgtcatcctgggctcggcgcaggagttcctcaagccgtcgggtcagtgcccggggaatgcacacccgcctgattccttctctgccggggagccccgtgtgctgggcctggccatggtacccggacaccacatcgtttccattgaggtgcagagggagagtctgaccgggcctccgtatctctgaccacgatggcgcttacctttcagacttcattaaacttatgaccgaa

SEQ ID NO: 157180 - DNA, 556 bp, Homo sapiens
  Payload ID: 10811
  Gene Symbol: NAA38
  Gene Name: N(alpha)-acetyltransferase 38, NatC auxiliary subunit
  ENST ID: ENST00000576861
  CDS Start-End: 212-511
gagccccggattcgcgctccggattcgcctcggctcggccgcgcgtatatttgccttccctccatgatctccaacactatccgataaagtagaagcaactgaggtaccgtgaaagagaaaggagctggaactgagaaaaagcagagaaactgaaaggccaacgtgggagacaaagaagagcctgaaagagccaaatcttaccttctggaccatggattcggacggagagcgcgaggactcggcggctgagcgcgcccgacagcagctagaggcgctgctcaacaagactatgcgcattcgcatgacagatggacggacactggtcggctgcttcctctgcactgaccgtgactgcaatgtcatcctgggctcggcgcaggagttcctcaagccgtcggattccttctctgccggggagccccgtgtgctgggcctggccatggtacccggacaccacatcgtttccattgaggtgcagagggagagtctgaccgggcctccgtatctctgaccacgatggcgcttacctttcagacttcattaaacttatgaccga

SEQ ID NO: 157181 - DNA, 3664 bp, Homo sapiens
  Payload ID: 10812
  Gene Symbol: NAA40
  Gene Name: N(alpha)-acetyltransferase 40, NatD catalytic subunit
  Uniprot ID: Q86UY6
  ENST ID: ENST00000377793
  CDS Start-End: 102-815
agggccgtccgctctgctgccgccgctgttgcagccaccgccgttgccgcctccctgccggcaagtgtgtgaagaagaagctgagcgttgtcgccgccgctatggggagaaagtcaagcaaagccaaggagaagaagcagaagcggttggaggagcgagcagccatggatgccgtttgtgccaaagtggacgctgccaacaggcttggagaccctctggaggctttcccagtgttcaagaaatatgatagaaacgggttgaatgtctccattgaatgtaagcgagtgtctggactggagccagccaccgtggattgggccttcgacctgaccaaaacgaatatgcaaaccatgtatgagcagagcgagtggggctggaaggaccgagagaaacgggaggaaatgacagatgaccgagcctggtacctcatcgcgtgggaaaacagctccgtccctgttgccttttctcacttccggtttgacgtggagtgtggggatgaagtcctgtactgctatgaagtgcagttggaaagcaaggtgcggcggaaaggcctggggaagttcctcatacagatcctgcagctcatggccaacagcacacagatgaagaaggttatgttaacagtatttaaacacaatcatggtgcctaccagttcttcagagaagcgttgcaatttgaaattgatgactcttcccccagcatgtccggttgctgtggggaggattgctcctatgagatcctgagccggaggaccaagtttggggacagccatcactcccacgcgggtgggcactgtggtggctgctgccactgaactctcagagccactttcaagtcacaatgctctctcctaaggcctttcctctttcctggtctcactgttcaccgggtgtcctcagagctgtggcctccccagccctgcacgtgccaggctgcgccctgagagcacagaaccctggggagaagtggtatcagctgctcctcctctcctaggagaccagagtgctagaagggaatgaaagggagagggaagagtaggtggggccgggcagtgaagctcatcctccacagtggctgcctcctcatttggctcctggggcctgcagtggaggttctcgcacctctgcagcccctagattcctggcaacctcccctcccctgacacatacacacttggacaaatggaatgtttatgtccacctttatgaaagttctggagtcctgggtctggggtttgctggtccccaaagaggaacacactgggtgtaagatctgggtgtagagggcggcttcagagagactcacgcttgcgcagttggaattgctgttaacggagactgggaagatcttttgtgccaagatgcagggaaatgaagaaagctctttccagctgtttttatggattcatggagtgggctcatgttgggaccagctgactctgggaggaagactgcctctccatcgctgtcagagagcctgaaaggaccaacaatgaggtgttcttgggacccgccatggggatgattgcttctctaggctcctggatgttgctgcattctaagcttaacctcctggtctcatggcagtgacttgagcttttgattcatagaagaaagccagaggttctgcttgttcttgtctgccagccctcgtcgttctttctcctctgcctctcacctctaccccaaatacctctgttcttagtctcaaggggagaataacatcagggagcccctcatcttccccagaaggacttctcgttcctcatgtagttaactccattgattttcctatcttggtgctgatagctctctaagggtagggcacacctccccacagccaccctccctcttcagagagcccccagccagcagcaggcccctctgcctgcactcctcaggcttgcccctcgctgcctcagtgaggcactagtgccactgccgtggcccagccgggccatagctcaggctgcagcagaaatgcctctcagtggccaacagttgcttttctctctggtgtcaccctgtggcaacaggctggagcaggggaaggagaaagccttcctcttctctcataggatagaaaggcaggctcagaactaatgctcatcctgatctctaggccttgttcctcttccagggaagaaaagccaaatccttatcaaggaaaaagcacctaacagctccctttggatatccctgagctctgctgtggggagtatcataaaggttctagccttcgtgaagttgttctcgtggaggtctgttggtccctctgacctcagcatctgctcacatcccaccctctgcccaactctggcagtctctcctggcagatctccccagagtggtccttgcttctcacctggattcctgcttgtgcaggagcctgtgtacacagggcctccctcacccagcctggcccctctgctgagcactttgcgctgctcttgatgggcagcagtgggactgggaactccttagagagggccttgcagctttacactggaataagtctgcctctgcctctgcctcaccctgctggctcctggtgggtttcatcccaggcagagttgacattgctggaggggtttggtggactcctaagaatcatgaaaccacaggagcatgtttaggaagagatttgtctctggtccctgtctctgaaaggacacagatgctaaatatttattgtcttagatcatggattcctgatacctctcactcaaggggaccaaaagggacccccccgtgttcatcccttgtaaggtgagttcagtctacgttgtctctttccagtcactggatacgtggcaccaactggtcaatgggtgcttggtgccataccctgctcaccctagtctctgcaggccatgtcctgaagggttcctcaggaggtcgggactagggtgggagaggcactatctgagacctgcaatcactcttgttggtcttgagcccattcatttccaaaacatccatctttctccacttcccccaggtcttggttttgagaaacagcaggcatggctgagtgcggtggcttacacctgtaatcccagcactttgggaggctgaggcaggcgggtcacctgaggtcaggagttcaagaccagcctggtcaacatggcaaaagcccatctctactaaaaaatacaaaaatcagccaggcgtggttgtggcctgtaatcccagctactcgggaggctgaggcaggagactcgcttgaacccaggaggtggaggttgtggtgagctgagatcacgccattgcactccagcctaggcgacagagtgagactccatctcaaaaaaaaaaaaaagagaaacatagcaggccttttttaccaggctttttgtgttttgtttgtttgtttggagcatgttaagatttttttaagatttttaaaattttagttatatccaccctatttcaggttatttttgttggtgtcaagtatgtataggacatgtgaatggttctttttaatttttttttaagaggaaatttggaagataaactccttgatatatatatatatatatatatttttttttttctttagcagcttgttatcactggaatcaaagggaaaaagtgatctcttcttgcattggttgtatttgtatgtcacaaataaaagacactttggtcagctgctgag

SEQ ID NO: 157182 - DNA, 577 bp, Homo sapiens
  Payload ID: 10812
  Gene Symbol: NAA40
  Gene Name: N(alpha)-acetyltransferase 40, NatD catalytic subunit
  ENST ID: ENST00000539656
  CDS Start-End: 96-470
gtccgctctgctgccgccgctgttgcagccaccgccgttgccgcctccctgccggcaagtgtgtgaagaagaagctgagcgttgtcgccgccgctatggggagaaagtcaagcaaagccaaggagaagaagcagaagcggttggaggagcgagcagccatggatgccgtttgtgccaaagtggacgctgccaacaggcttggagaccctctggaggctttcccagtgttcaagaaatatgatagaaacggcacacagatgaagaaggttatgttaacagtatttaaacacaatcatggtgcctaccagttcttcagagaagcgttgcaatttgaaattgatgactcttcccccagcatgtccggttgctgtggggaggattgctcctatgagatcctgagccggaggaccaagtttggggacagccatcactcccacgcgggtgggcactgtggtggctgctgccactgaactctcagagccactttcaagtcacaatgctctctcctaaggcctttcctctttcctggtctcactgttcaccgggtgtcctcagagctgtggcctccccagccctg

SEQ ID NO: 157183 - DNA, 958 bp, Homo sapiens
  Payload ID: 10812
  Gene Symbol: NAA40
  Gene Name: N(alpha)-acetyltransferase 40, NatD catalytic subunit
  ENST ID: ENST00000534965
  CDS Start-End: 102-221
agggccgtccgctctgctgccgccgctgttgcagccaccgccgttgccgcctccctgccggcaagtgtgtgaagaagaagctgagcgttgtcgccgccgctatggggagaaagtcaagcaaagccaaggagaagaagcagaagcggttggaggagcgagcagccatggatgccgtttgtgccaaagtggacgctgccaacagggttgaatgtctccattgaatgtaagcgagtgtctggactggagccagccaccgtggattgggccttcgacctgaccaaaacgaatatgcaaaccatgtatgagcagagcgagtggggctggaaggaccgagagaaacgggaggaaatgacagatgaccgagcctggtacctcatcgcgtgggaaaacagctccgtccctgttgccttttctcacttccggtttgacgtggagtgtggggatgaagtcctgtactgctatgaagtgcagttggaaagcaaggtgcggcggaaaggcctggggaagttcctcatacagatcctgcagctcatggccaacagcacacagatgaagaaggttatgttaacagtatttaaacacaatcatggtgcctaccagttcttcagagaagcgttgcaatttgaaattgatgactcttcccccagcatgtccggttgctgtggggaggattgctcctatgagatcctgagccggaggaccaagtttggggacagccatcactcccacgcgggtgggcactgtggtggctgctgccactgaactctcagagccactttcaagtcacaatgctctctcctaaggcctttcctctttcctggtctcactgttcaccgggtgtcctcagagctgtggcctccccagccctgcacgtgccaggctgcgccctgagagcacagaaccctggggagaagtggtatcagctgctcctcctctcctaggagaccagagtgctaga

SEQ ID NO: 157184 - DNA, 808 bp, Homo sapiens
  Payload ID: 10812
  Gene Symbol: NAA40
  Gene Name: N(alpha)-acetyltransferase 40, NatD catalytic subunit
  ENST ID: ENST00000544138
  CDS Start-End: 96-305
gtccgctctgctgccgccgctgttgcagccaccgccgttgccgcctccctgccggcaagtgtgtgaagaagaagctgagcgttgtcgccgccgctatggggagaaagtcaagcaaagccaaggagaagaagcagaagcggttggaggagcgagcagccatggatgccgtttgtgccaaagtggacgctgccaacagggtgatgccaaacttaactctcctgggcctttccaccaaagccttcctcgcacatgtgacttcagagctaggcaaatggtgggttttgggaggctgctcctggttctgaagttagtctcccgttgtgggtccccacagcatcccactccaagacaacagctcttgggataggatctgcacctccgccccacttgtctgtgctgttcctcttttctttccctccacagcttggagaccctctggaggctttcccagtgttcaagaaatatgatagaaacggcacacagatgaagaaggttatgttaacagtatttaaacacaatcatggtgcctaccagttcttcagagaagcgttgcaatttgaaattgatgactcttcccccagcatgtccggttgctgtggggaggattgctcctatgagatcctgagccggaggaccaagtttggggacagccatcactcccacgcgggtgggcactgtggtggctgctgccactgaactctcagagccactttcaagtcacaatgctctctcctaaggcctttcctctttcctggtctcactgttcaccgggtgtcctcagagctgtggcctccccagccctgcacgt

SEQ ID NO: 157185 - DNA, 1035 bp, Homo sapiens
  Payload ID: 10812
  Gene Symbol: NAA40
  Gene Name: N(alpha)-acetyltransferase 40, NatD catalytic subunit
  Uniprot ID: Q86UY6
  ENST ID: ENST00000542163
  CDS Start-End: 345-995
attctaagggtccctacgctaggcctagcccgggaatcctctggagagcccctggtccggggccccaccccctcggcgcccccagcgtcacgcccgccccttcctgcttcgcggacccgttactggcctccccaccaccgtcccccgcggggaccctggggttagcttcccgctcccccagggtcactcatcacctggctgtcaccagcttcgtcgcttttcacatccgaggtcaaccctggcttggagggaattgaggcccagaggaaagaaggcgcctagccaagagaaagtcaagcaaagccaaggagaagaagcagaagcggttggaggagcgagcagccatggatgccgtttgtgccaaagtggacgctgccaacaggcttggagaccctctggaggctttcccagtgttcaagaaatatgatagaaacgggttgaatgtctccattgaatgtaagcgagtgtctggactggagccagccaccgtggattgggccttcgacctgaccaaaacgaatatgcaaaccatgtatgagcagagcgagtggggctggaaggaccgagagaaacgggaggaaatgacagatgaccgagcctggtacctcatcgcgtgggaaaacagctccgtccctgttgccttttctcacttccggtttgacgtggagtgtggggatgaagtcctgtactgctatgaagtgcagttggaaagcaaggtgcggcggaaaggcctggggaagttcctcatacagatcctgcagctcatggccaacagcacacagatgaagaaggttatgttaacagtatttaaacacaatcatggtgcctaccagttcttcagagaagcgttgcaatttgaaattgatgactcttcccccagcatgtccggttgctgtggggaggattgctcctatgagatcctgagccggaggaccaagtttggggacagccatcactcccacgcgggtgggcactgtggtggctgctgccactgaactctcagagccactttcaagtcacaatgctctctcctaa

SEQ ID NO: 157186 - DNA, 6135 bp, Homo sapiens
  Payload ID: 10813
  Gene Symbol: NAA50
  Gene Name: N(alpha)-acetyltransferase 50, NatE catalytic subunit
  Uniprot ID: Q9GZZ1
  ENST ID: ENST00000240922
  CDS Start-End: 326-835
cgcgccggcgcgcgaggggcggggtgaaaggtcacagcgcggcagcgggtctggctggcggcagcggcgggagggagccgagagacccgagtgcacgtgtggagaagcggcggcacaagcgcggcggcgggagacactcccgcccccaccagactcaagccctcactcgactctcgcggccttcgttgctcgcacagctccctgcccaggctaggaggccggcttgcggggttgagtggcccgagctaagggtgcggagacctaagggcggcgactacgacggcgttgatatcggtggtaacgacggcctcagcaggcggggaagatgaaaggtagccggatcgagctgggagatgtgacaccacacaatattaaacagttgaaaagattgaatcaggtcatctttccagtcagctacaatgacaagttctacaaggatgtgctggaggttggcgagctagcaaaacttgcctatttcaatgatattgctgtaggtgcagtatgctgtagggtggatcattcacagaatcagaagagactttacatcatgacactaggatgtctggcaccttaccgaaggctaggaataggaactaaaatgttaaatcatgtcttaaacatctgtgaaaaagatggtacttttgacaacatttatctgcatgtccagatcagcaatgagtcggcaattgacttctacaggaagtttggctttgagattattgagacaaagaagaactactataagaggatagagcccgcagatgctcatgtgctgcagaaaaacctcaaagttccttctggtcagaatgcagatgtgcaaaagacagacaactgaacaaattacaaatgaactttcttgcacttgcttgtcgccaaataaaagagaggcccattgattcctcccccaccccaacacttttcttttaaagcttttctccctccttgttcttgtttttctttcttcctttccttttctctgagagttttaatactttcaaggactttaaaaaaataatcatgtttgaattgttttctcttatttttgtgaggtggtttgaaggaaggacaaggtagatctgtttagttttgcagttgaagttagatggtcctaaacatttaattgtcaaataatttcaaatttaatgtcctgctttcacattgaagggcagagcctacaaaacattgtatatttcaaaagacaaaaagaagcagcagcagtatcttgttctctaattcatagacaagttgagtgtgtttgtggtactttgggtttttaaacactttgggatactaatccctagacattgccttcactccacctttagtccttctgagcactctctcgggagttggaacattgttatccttgtaagaaatactaagcttatgttgatttttaagtaattatatcttctcttcttgctggtgggtggggcagtttggtttagtgttatactttggtctaagtatttgagttaaactgcttttttgctaatgagtgggctggttgttagcaggtttgtttttcctgctgttgattgttactagtggcattaacttttagaatttgggctggtgagattaattttttttaatatcccagctagagatatggcctttaactgacctaaagaggtgtgttgtgatttaattttttcccgttcctttttcttcagtaaacccaacaatagtctaaccttaaaaattgagttgatgtccttataggtcactacccctaaataaacctgaagcaggtgttttctcttggacatactaaaaaatacctaaaaggaagcttagatgggctgtgacacaaaaaattcaattactgtcatctaatgccagctgttaaaagtgtggccactgagcatttgattttataggaaaaaatagtatttttgagaataacatagctgtgctattgcacatctgttggaggacatcccagatttgcttatactcagtgcctgtgatattgagtttaaggatttgaggcaggggtaattattaaacatattgcttctattcttggaaaaatagaagtgtaaaatgttaataatacaaatgtcactgtgacctcctccactgagaggactggtttatgccagatcattttccggcacacacggagtggctttgacagattgataactttgtaagatgggagacatctgaaatattcatgttttccttttgtagtcccatctccactatttagaaatgttctcagactttaaaataatgcacagggcttgagctttctgtcatttgactttaaaaggaagtttcattcatatttatcctcttatgtaaaattgcggtataaagtctcatttccaaatatgttaaatgacaaaattattttataaaatgtttatgcacactttataaccttaagtttttatttgagaatgtgaaagtacaaagtgcagtagacttcaacaatcttgagtgccaagaataatacagaaaaagaagacagttgatgaatgagtttatagggttctaatcttaagatggtaaaaatgtagaaagaccttgctggttttttgggggtattcgtttcttaaacaatccaaatctaagcttagaagaaaagtttagcgttaagcacctttatcttcatgaataagcttcagcttgctcttggcaagagaagagtgcttgagttacagaaggcataagtagtttgaagaatgcagcagcctttttgtaaacttcccagatatcaaaatagactttgatatataaatggttttctgagatgacactgcctctatttctataaccatttcacctggactatctaatcagtcctatgaatgtatccctaaatgtggttattgaaaacctaatagctgcctcatgacaagtacatgttatttaaggaggaaaaaatattaaattttgaattgagtgtgtaggctccctatcattatatatagagtttctttttccacggtagtcagtgacttaacctgaattgtaaatgtttgtaaagggttaattgtcctacatcaaacttagttaaataattccatccacttatggaggaggaggagaatgtggaagaggtaaaaagctgggcacaagttcatatgcctatgagtcagtaaagactgaagtaatgtcctatgttgagctggttattttgatatatgataataattatctttgaagtagaacaattctgttaactggaaaatcacaggatatatccatcatatttttcaggacagatagtttttactgtggggcaaataggttaaaattacactatgttagttgcatttaggttttaaagcaaagaatctgtagagaaatctatgcaatatatagtttgtccagattagctttcatttggggaatgaagttctgaaatatctaaagcagtttactcatcaattgaaaagtcctccaaaaagagaactattgggaaaccatggtgtggtggtggaaaagaaaagctccctcagttttttggagggaataacttaaaaaaatacttaaatggctaagtttacttggtgcagttaagaattaaacttgtcaattttaacattgctgttacatctgaaataaacttatgtgatgttctggtagtgatctgtgatatctgtaaatgtcaaaactgtattgttgaattctgcagccagcaaccgtacatactcattgtgtagtgtttcccttactgcttttatttactttcacatttaagatctaattttaaaatcattaaaataggccaagtgtaattaaggcatcctaattcagatcttctgtgacttgctaggtacagtgcccaatatctacaattcagttccaatgagagggaaaaagtaagatccaaggaactgtcttgctgctgtatttttaatgtaattattagaaatacttgacactttaggctgcaatctagttagtaatgtttattggctacagacaacatattcaggtgttttgtttttcttccttgtaaggaaggagtacggtagttcaatgagttgggaattggcttttaagctttttatcaaacatgaatttaagattttttctttaacagaattcagtatttaatatttctagtcaaaattgttataattagatttttgcttttttcatttaagaagcaatgagtgatccttgtctagtgtgtctcagttattactgtagtttaaaacaacaaacaagtattaccttccacagttctggatcaggaatctaggagctgcttaactgggtggttctgtcttgagatctcagaaggttgcagtcaagctgttagccaggactgtaccatcttgaagcttgacaaggctagaggagccatttccaagatgtcttgcttacgtggctcttgggcttctgttcctcactgtgtgggtatcacacacagtgcctgatgctcacgtggctcttgggcttcagttccttgggcaccagttgcctggtggacaactggtatgtggcttcccctagagcaggtgatataagaaagtgagcagaaaccatacttttttatgacgtagcctcaggtgacattatttctgccatattccatgagtcacacagaccaaccattgaatcagcttggtatagtgtgggaggggactgcacaaggatgtgaatactgggaggtggatatcattgggccctctaggagactggctatcactgctcagagaagatgctgggcttcgttgactcccaaggtcagggtagttttggttaggttgtgttttattagtctctaaaaggagtagttttctaaatgagggttataaagcactgcactttacagttattcgggatataaaagaaatagtgggtctaaaggctgtgctcttgtggttgggttttcagtggggaggggagactagtctgtctcagactgatgctgttctcactgatttgaatatttctgggaaattggatactacagtcacaaataggaacagtaagcctatagaagtttttcagggagtaaatattttctatggcagtgtcctgaattggttctcccttgcaagactgaactgtaggaacttagtcctagtttatgatacagccaagtaacatagtcacatgggaaaaagagcttgagtcagatttcttaatgtgtgttgttaacttggtagaacattgagaattatttaagtcagagaacgatctgttactggggcagaaattctcaaccttttcagttctccaaaatttaagatacttgatttcttaggtaaaatgtttttgtttttgttttggagacagagtctcgctctgtcgcccaggctggagtgcagtggcgcgatcttggctcactgcaaactccgcctcccagattcaagcaattctgcctgagcctcccaagtagctgcgactagaaagcgcatgccaccacgcctggctaattttttgtattttagtagagatgggggtttcaccgtgttgcccaggctggtctcaaactcctgagcttaggcaatcctcctggggcagcctcccaaagtgctaggattacaggcgagccatggcgcctggccagtaaaatgttttctatctagaatgaatcaaggtattttccttgctcagtagcttctagaataagaaaaaaatagcagcaagatctgattcagaaatagttgggagcagaaagttaatatgaaggagttgctacttgttaacagcctagagttgagatctagaagaattattacctttttaaatttgtgatgaaagcttaaatccagcatttgggaagttactctattggctgaactattttggagtttgtaagctttgtattagatattcctgatttaactgaaactaatttgccacatagctttaatttcatcccagttttacttgttttactgtcctcaaaaactcaagacatctgaactcaaaggatctaagcagtataaattaaagcacatgttgaatcactgtagctttcgtaggacatctgattataatgcttttctttgtttctttgtccatactgaacttgtctagtttatctttgagaaacatttgctagtatcaaaaatcttctgtaaagatttgaacaatcttgaattctccttgtcactagccatctcttcccctaaagtataataaaactgtcaggtacta

SEQ ID NO: 157187 - DNA, 1945 bp, Homo sapiens
  Payload ID: 10813
  Gene Symbol: NAA50
  Gene Name: N(alpha)-acetyltransferase 50, NatE catalytic subunit
  ENST ID: ENST00000477813
  CDS Start-End: 111-500
aggccggcttgcggggttgagtggcccgagctaagggtgcggagacctaagggcggcgactacgacggcgttgatatcggtggtaacgacggcctcagcaggcggggaagatgaaaggtagccggatcgagctgggagatgtgacaccacacaatattaaacagttgaaaagattgaatcaggtcatctttccagtcagctacaatgacaagttctacaaggatgtgctggaggttggcgagctagcaaaacttggaactaaaatgttaaatcatgtcttaaacatctgtgaaaaagatggtacttttgacaacatttatctgcatgtccagatcagcaatgagtcggcaattgacttctacaggaagtttggctttgagattattgagacaaagaagaactactataagaggatagagcccgcagatgctcatgtgctgcagaaaaacctcaaagttccttctggtcagaatgcagatgtgcaaaagacagacaactgaacaaattacaaatgaactttcttgcacttgcttgtcgccaaataaaagagaggcccattgattcctcccccaccccaacacttttcttttaaagcttttctccctccttgttcttgtttttctttcttcctttccttttctctgagagttttaatactttcaaggactttaaaaaaataatcatgtttgaattgttttctcttatttttgtgaggtggtttgaaggaaggacaaggtagatctgtttagttttgcagttgaagttagatggtcctaaacatttaattgtcaaataatttcaaatttaatgtcctgctttcacattgaagggcagagcctacaaaacattgtatatttcaaaagacaaaaagaagcagcagcagtatcttgttctctaattcatagacaagttgagtgtgtttgtggtactttgggtttttaaacactttgggatactaatccctagacattgccttcactccacctttagtccttctgagcactctctcgggagttggaacattgttatccttgtaagaaatactaagcttatgttgatttttaagtaattatatcttctcttcttgctggtgggtggggcagtttggtttagtgttatactttggtctaagtatttgagttaaactgcttttttgctaatgagtgggctggttgttagcaggtttgtttttcctgctgttgattgttactagtggcattaacttttagaatttgggctggtgagattaattttttttaatatcccagctagagatatggcctttaactgacctaaagaggtgtgttgtgatttaattttttcccgttcctttttcttcagtaaacccaacaatagtctaaccttaaaaattgagttgatgtccttataggtcactacccctaaataaacctgaagcaggtgttttctcttggacatactaaaaaatacctaaaaggaagcttagatgggctgtgacacaaaaaattcaattactgtcatctaatgccagctgttaaaagtgtggccactgagcatttgattttataggaaaaaatagtatttttgagaataacatagctgtgctattgcacatctgttggaggacatcccagatttgcttatactcagtgcctgtgatattgagtttaaggatttgaggcaggggtaattattaaacatattgcttctattcttggaaaaatagaagtgtaaaatgttaataatacaaatgtcactgtgacctcctccactgagaggactggtttatgccagatcattttccggcacacacggagtggctttgacagattgataactttgtaagatgggagacatctgaaatattcatgttttccttttgtagtcccatctccactatttagaaatgttctcagactttaaaataatgcacagggcttgagctttctgtcatttgactttaaaa

SEQ ID NO: 157188 - DNA, 1385 bp, Homo sapiens
  Payload ID: 10813
  Gene Symbol: NAA50
  Gene Name: N(alpha)-acetyltransferase 50, NatE catalytic subunit
  ENST ID: ENST00000497525
  CDS Start-End: 268-555
ggagggggcggaggcgaggctcgggctgttggcgggctgaagggccagcggagtagccggatcgagctgggagatgtgacaccacacaatattaaacagttgaaaagattgaatcaggtcatctttccagtcagctacaatgacaagttctacaaggatgtgctggaggttggcgagctagcaaaacttgcctatttcaatgatattgctgtaggtgcagtatgctgtagggtggatcattcacagaatcagaagagactttacatcatgacactaggatgtctggcaccttaccgaaggctaggaataggaactaaaatgttaaatcatgtcttaaacatctgtgaaaaagatggtacttttgacaacatttatctgcatgtccagatcagcaatgagtcggcaattgacttctacaggaagtttggctttgagattattgagacaaagaagaactactataagaggatagagcccgcagatgctcatgtgctgcagaaaaacctcaaagttccttctggtcagaatgcagatgtgcaaaagacagacaactgaacaaattacaaatgaactttcttgcacttgcttgtcgccaaataaaagagaggcccattgattcctcccccaccccaacacttttcttttaaagcttttctccctccttgttcttgtttttctttcttcctttccttttctctgagagttttaatactttcaaggactttaaaaaaataatcatgtttgaattgttttctcttatttttgtgaggtggtttgaaggaaggacaaggtagatctgtttagttttgcagttgaagttagatggtcctaaacatttaattgtcaaataatttcaaatttaatgtcctgctttcacattgaagggcagagcctacaaaacattgtatatttcaaaagacaaaaagaagcagcagcagtatcttgttctctaattcatagacaagttgagtgtgtttgtggtactttgggtttttaaacactttgggatactaatccctagacattgccttcactccacctttagtccttctgagcactctctcgggagttggaacattgttatccttgtaagaaatactaagcttatgttgatttttaagtaattatatcttctcttcttgctggtgggtggggcagtttggtttagtgttatactttggtctaagtatttgagttaaactgcttttttgctaatgagtgggctggttgttagcaggtttgtttttcctgctgttgattgttactagtggcattaacttttagaatttgggctggtgagattaattttttttaatatcccagctagagatatggcctttaactgacctaaagaggtgtgttgtgatttaattttttcccgttcc

SEQ ID NO: 157189 - DNA, 962 bp, Homo sapiens
  Payload ID: 10813
  Gene Symbol: NAA50
  Gene Name: N(alpha)-acetyltransferase 50, NatE catalytic subunit
  ENST ID: ENST00000493900
  CDS Start-End: 352-858
cagtgcggctgcgcgtgaggcggcggcgcgccggcgcgcgaggggcggggtgaaaggtcacagcgcggcagcgggtctggctggcggcagcggcgggagggagccgagagacccgagtgcacgtgtggagaagcggcggcacaagcgcggcggcgggagacactcccgcccccaccagactcaagccctcactcgactctcgcggccttcgttgctcgcacagctccctgcccaggctaggaggccggcttgcggggttgagtggcccgagctaagggtgcggagacctaagggcggcgactacgacggcgttgatatcggtggtaacgacggcctcagcaggcggggaagatgaaaggccggatcgagctgggagatgtgacaccacacaatattaaacagttgaaaagattgaatcaggtcatctttccagtcagctacaatgacaagttctacaaggatgtgctggaggttggcgagctagcaaaacttgcctatttcaatgatattgctgtaggtgcagtatgctgtagggtggatcattcacagaatcagaagagactttacatcatgacactaggatgtctggcaccttaccgaaggctaggaataggaactaaaatgttaaatcatgtcttaaacatctgtgaaaaagatggtacttttgacaacatttatctgcatgtccagatcagcaatgagtcggcaattgacttctacaggaagtttggctttgagattattgagacaaagaagaactactataagaggatagagcccgcagatgctcatgtgctgcagaaaaacctcaaagttccttctggtcagaatgcagatgtgcaaaagacagacaactgaacaaattacaaatgaactttcttgcacttgcttgtcgccaaataaaagagaggcccattgattcctcccccaccccaacacttttcttttaaagcttttctccc

SEQ ID NO: 157190 - DNA, 958 bp, Homo sapiens
  Payload ID: 10813
  Gene Symbol: NAA50
  Gene Name: N(alpha)-acetyltransferase 50, NatE catalytic subunit
  ENST ID: ENST00000481432
  CDS Start-End: 301-447
gaaaggtcacagcgcggcagcgggtctggctggcggcagcggcgggagggagccgagagacccgagtgcacgtgtggagaagcggcggcacaagcgcggcggcgggagacactcccgcccccaccagactcaagccctcactcgactctcgcggccttcgttgctcgcacagctccctgcccaggctaggaggccggcttgcggggttgagtggcccgagctaagggtgcggagacctaagggcggcgactacgacggcgttgatatcggtggtaacgacggcctcagcaggcggggaagatgaaaggtagccggatcgagctgggagatgtgacaccacacaatattaaacagttgaaaagattgaatcaggtcatctttccagtcagctacaatgacaagttctacaaggatgtgctggagcctatttcaatgatattgctgtaggtgcagtatgctgtagggtggatcattcacagaatcagaagagactttacatcatgacactaggatgtctggcaccttaccgaaggctaggaataggaactaaaatgttaaatcatgtcttaaacatctgtgaaaaagatggtacttttgacaacatttatctgcatgtccagatcagcaatgagtcggcaattgacttctacaggaagtttggctttgagattattgagacaaagaagaactactataagaggatagagcccgcagatgctcatgtgctgcagaaaaacctcaaagttccttctggtcagaatgcagatgtgcaaaagacagacaactgaacaaattacaaatgaactttcttgcacttgcttgtcgccaaataaaagagaggcccattgattcctcccccaccccaacacttttcttttaaagcttttctccctccttgttcttgtttttctttcttcctttccttttctctgagagttttaatactttcaaggacttt

SEQ ID NO: 157191 - DNA, 964 bp, Homo sapiens
  Payload ID: 10813
  Gene Symbol: NAA50
  Gene Name: N(alpha)-acetyltransferase 50, NatE catalytic subunit
  ENST ID: ENST00000493454
  CDS Start-End: 374-661
tatattctgcctctgtcagaaacttgttctccaactccagaggcttcttacctcagtcccctatagtgctgtagtgaatgcttgttcataaaactacctgacacacatccttaattacttcttttggataatttcctaagaatgaattttctggatcaaaagccggatcgagctgggagatgtgacaccacacaatattaaacagttgaaaagattgaatcaggtcatctttccagtcagctacaatgacaagttctacaaggatgtgctggaggttggcgagctagcaaaacttgcctatttcaatgatattgctgtaggtgcagtatgctgtagggtggatcattcacagaatcagaagagactttacatcatgacactaggatgtctggcaccttaccgaaggctaggaataggaactaaaatgttaaatcatgtcttaaacatctgtgaaaaagatggtacttttgacaacatttatctgcatgtccagatcagcaatgagtcggcaattgacttctacaggaagtttggctttgagattattgagacaaagaagaactactataagaggatagagcccgcagatgctcatgtgctgcagaaaaacctcaaagttccttctggtcagaatgcagatgtgcaaaagacagacaactgaacaaattacaaatgaactttcttgcacttgcttgtcgccaaataaaagagaggcccattgattcctcccccaccccaacacttttcttttaaagcttttctccctccttgttcttgtttttctttcttcctttccttttctctgagagttttaatactttcaaggactttaaaaaaataatcatgtttgaattgttttctcttatttttgtgaggtggtttgaaggaaggacaaggtagatctgtttagttttgcagttgaagttagatggtcctaaacatttaattgtcaaataatttcaaa

SEQ ID NO: 157192 - DNA, 789 bp, Homo sapiens
  Payload ID: 10813
  Gene Symbol: NAA50
  Gene Name: N(alpha)-acetyltransferase 50, NatE catalytic subunit
  ENST ID: ENST00000497255
  CDS Start-End: 282-458
gcgggtctggctggcggcagcggcgggagggagccgagagacccgagtgcacgtgtggagaagcggcggcacaagcgcggcggcgggagacactcccgcccccaccagactcaagccctcactcgactctcgcggccttcgttgctcgcacagctccctgcccaggctaggaggccggcttgcggggttgagtggcccgagctaagggtgcggagacctaagggcggcgactacgacggcgttgatatcggtggtaacgacggcctcagcaggcggggaagatgaaaggccggatcgagctgggagatgtgacaccacacaatattaaacagttgaaaagattgaatcaggtcatctttccagtcagctacaatgacaagttctacaaggatgtgctggagaaaaacctcaaagttccttctggtcagaatgcagatgtgcaaaagacagacaactgaacaaattacaaatgaactttcttgcacttgcttgtcgccaaataaaagagaggcccattgattcctcccccaccccaacacttttcttttaaagcttttctccctccttgttcttgtttttctttcttcctttccttttctctgagagttttaatactttcaaggactttaaaaaaataatcatgtttgaattgttttctcttatttttgtgaggtggtttgaaggaaggacaaggtagatctgtttagttttgcagttgaagttagatggtcctaaacatttaattgtcaaataatttcaaatttaatgtcctgctttcacattgaaggg

SEQ ID NO: 157193 - DNA, 473 bp, Homo sapiens
  Payload ID: 10813
  Gene Symbol: NAA50
  Gene Name: N(alpha)-acetyltransferase 50, NatE catalytic subunit
  ENST ID: ENST00000478020
  CDS Start-End: 301-473
gaaaggtcacagcgcggcagcgggtctggctggcggcagcggcgggagggagccgagagacccgagtgcacgtgtggagaagcggcggcacaagcgcggcggcgggagacactcccgcccccaccagactcaagccctcactcgactctcgcggccttcgttgctcgcacagctccctgcccaggctaggaggccggcttgcggggttgagtggcccgagctaagggtgcggagacctaagggcggcgactacgacggcgttgatatcggtggtaacgacggcctcagcaggcggggaagatgaaaggccggatcgagctgggagatgtgacaccacacaatattaaacagttgaaaagattgaatcaggtcatctttccagtcagctacaatgacaagttctacaaggatgtgctggaggttggcgagctagcaaaacttggtgcagtatgctgtagggtggatcattcaca

SEQ ID NO: 157194 - DNA, 3257 bp, Homo sapiens
  Payload ID: 10813
  Gene Symbol: NAA50
  Gene Name: N(alpha)-acetyltransferase 50, NatE catalytic subunit
  ENST ID: ENST00000616174
  CDS Start-End: 246-491
agagacccgagtgcacgtgtggagaagcggcggcacaagcgcggcggcgggagacactcccgcccccaccagactcaagccctcactcgactctcgcggccttcgttgctcgcacagctccctgcccaggctaggaggccggcttgcggggttgagtggcccgagctaagggtgcggagacctaagggcggcgactacgacggcgttgatatcggtggtaacgacggcctcagcaggcggggaagatgaaaggtagccggatcgagctgggagatgtgacaccacacaatattaaacagttgaaaagattgaatcaggtcatctttccagtcagctacaatgacaagttctacaagaagtttggctttgagattattgagacaaagaagaactactataagaggatagagcccgcagatgctcatgtgctgcagaaaaacctcaaagttccttctggtcagaatgcagatgtgcaaaagacagacaactgaacaaattacaaatgaactttcttgcacttgcttgtcgccaaataaaagagaggcccattgattcctcccccaccccaacacttttcttttaaagcttttctccctccttgttcttgtttttctttcttcctttccttttctctgagagttttaatactttcaaggactttaaaaaaataatcatgtttgaattgttttctcttatttttgtgaggtggtttgaaggaaggacaaggtagatctgtttagttttgcagttgaagttagatggtcctaaacatttaattgtcaaataatttcaaatttaatgtcctgctttcacattgaagggcagagcctacaaaacattgtatatttcaaaagacaaaaagaagcagcagcagtatcttgttctctaattcatagacaagttgagtgtgtttgtggtactttgggtttttaaacactttgggatactaatccctagacattgccttcactccacctttagtccttctgagcactctctcgggagttggaacattgttatccttgtaagaaatactaagcttatgttgatttttaagtaattatatcttctcttcttgctggtgggtggggcagtttggtttagtgttatactttggtctaagtatttgagttaaactgcttttttgctaatgagtgggctggttgttagcaggtttgtttttcctgctgttgattgttactagtggcattaacttttagaatttgggctggtgagattaattttttttaatatcccagctagagatatggcctttaactgacctaaagaggtgtgttgtgatttaattttttcccgttcctttttcttcagtaaacccaacaatagtctaaccttaaaaattgagttgatgtccttataggtcactacccctaaataaacctgaagcaggtgttttctcttggacatactaaaaaatacctaaaaggaagcttagatgggctgtgacacaaaaaattcaattactgtcatctaatgccagctgttaaaagtgtggccactgagcatttgattttataggaaaaaatagtatttttgagaataacatagctgtgctattgcacatctgttggaggacatcccagatttgcttatactcagtgcctgtgatattgagtttaaggatttgaggcaggggtaattattaaacatattgcttctattcttggaaaaatagaagtgtaaaatgttaataatacaaatgtcactgtgacctcctccactgagaggactggtttatgccagatcattttccggcacacacggagtggctttgacagattgataactttgtaagatgggagacatctgaaatattcatgttttccttttgtagtcccatctccactatttagaaatgttctcagactttaaaataatgcacagggcttgagctttctgtcatttgactttaaaaggaagtttcattcatatttatcctcttatgtaaaattgcggtataaagtctcatttccaaatatgttaaatgacaaaattattttataaaatgtttatgcacactttataaccttaagtttttatttgagaatgtgaaagtacaaagtgcagtagacttcaacaatcttgagtgccaagaataatacagaaaaagaagacagttgatgaatgagtttatagggttctaatcttaagatggtaaaaatgtagaaagaccttgctggttttttgggggtattcgtttcttaaacaatccaaatctaagcttagaagaaaagtttagcgttaagcacctttatcttcatgaataagcttcagcttgctcttggcaagagaagagtgcttgagttacagaaggcataagtagtttgaagaatgcagcagcctttttgtaaacttcccagatatcaaaatagactttgatatataaatggttttctgagatgacactgcctctatttctataaccatttcacctggactatctaatcagtcctatgaatgtatccctaaatgtggttattgaaaacctaatagctgcctcatgacaagtacatgttatttaaggaggaaaaaatattaaattttgaattgagtgtgtaggctccctatcattatatatagagtttctttttccacggtagtcagtgacttaacctgaattgtaaatgtttgtaaagggttaattgtcctacatcaaacttagttaaataattccatccacttatggaggaggaggagaatgtggaagaggtaaaaagctgggcacaagttcatatgcctatgagtcagtaaagactgaagtaatgtcctatgttgagctggttattttgatatatgataataattatctttgaagtagaacaattctgttaactggaaaatcacaggatatatccatcatatttttcaggacagatagtttttactgtggggcaaataggttaaaattacactatgttagttgcatttaggttttaaagcaaagaatctgtagagaaatctatgcaatatatagtttgtccagattagctttcatttggggaatgaagttctgaaatatctaaagcagtttactcatcaattgaaaagtcctccaaaaagagaactattgggaaaccatggtgtggtggtggaaaagaaaagctccctcagttttttggagggaataacttaaaaaaatacttaaatggctaagtttacttggtgcagttaagaattaaacttgtcaattttaacattgctgttacatctgaaataaacttatgtgatgttctggt

SEQ ID NO: 157195 - DNA, 177 bp, Homo sapiens
  Payload ID: 10813
  Gene Symbol: NAA50
  Gene Name: N(alpha)-acetyltransferase 50, NatE catalytic subunit
  ENST ID: ENST00000630058
  CDS Start-End: 1-177
atgggtagccggatcgagctgggagatgtgacaccacacaatattaaacagttgaaaagattgaatcaggtcatctttccagtcagctacaatgacaagttctacaaggatgtgctggagaaaaacctcaaagttccttctggtcagaatgcagatgtgcaaaagacagacaactga

SEQ ID NO: 157196 - DNA, 2522 bp, Homo sapiens
  Payload ID: 10814
  Gene Symbol: NAA60
  Gene Name: N(alpha)-acetyltransferase 60, NatF catalytic subunit
  Uniprot ID: Q9H7X0
  ENST ID: ENST00000360862
  CDS Start-End: 275-808
tccgggctgcgctgccggcagggagcgggaggcggaagtgccgcgggctgccgcctccgtcccggctgcggcccctgccggttacataactcgttgcgggctccgcgcggtcccacttcccggctcccttcgcctccaggatgcgctgagccctacaacacccccagcggccgccggctcccccacgaggtacccagactcatggtatcgtgatatcacatccaacaagaagttcttttcccttgctgcaacctacagaggtgccattgtgggaatgatagtagctgaaattaagaacaggaccaaaatacataaagaggatggagatattctagcatccaacttctctgttgacacacaagtcgcgtacatcctaagtctgggcgtcgtgaaagagttcaggaagcacggcataggttccctcttacttgaaagtttaaaggatcacatatcaaccaccgcccaggaccactgcaaagccatttacctgcatgtcctcaccaccaacaacacagcaataaacttctatgaaaacagagacttcaagcagcaccactatctcccctattactactccattcgaggggtcctcaaagatggcttcacctatgtcctctacatcaacggcggccaccctccctggacgattttggactacatccagcacctgggctctgcactagccagcctgagcccctgctccattccgcacagagtctaccgccaggcccacagcctgctctgcagcttcctgccatggtcgggcatctcttccaagagtggcatcgagtacagccggaccatgtgatgtcggctgggcagccgccaccaggccccacccttcggccgcccgcagagcccgccttcctgtccatctgaccccttctgttttctgcaaggagctgccagccatctaactgggctcgtcggcctgccccagctgcaggcccggtgctacacgggctcgggaacagaacatcgtgggcatgcgcagagcatgcccatccgtggcaggtacgccacagcagacacaaaggctcttcagctcccctccctgcttctggaaacctctgcctgctgccctggccctgcccccctgcgcatgcaccgtccccagggctgacccagtgtggctgcattcactgggaggggcctgccctcactgggcctctcccactccgctgcctgttcttgcagctccttcctggaaagctggaggggactttctcctgcaagggaggaacgcaagtattatggacacacttgaccgtaaaggcacaggagcctcggaacaagggggcgcaataaagggaatggcccgtccccttccagaaccagcccaaagaagcctggggggtgaggagtggcccccactcctccatgaggggctgatgaggggtgggcagcctgggggaggctttcctcgcaagcacagagctctgaggctcagccccctggcacaggcggtcacgcatcaggacggttcctactcctcagcaccttccgtgcagttaccagtgccctgggaggtcacactgcccgtcggaccttggcatgctccattcagctgacctgctgaggacaggcatcgccgagactccttgggtcctccccgccctccctcatgctgccacaagctgctgctccaaggcctggccacatgcagacaggaggaagctgagctcgacattaggcctcaaggctgccatctgtcttgtagggcctggccttgtgggcagggggcagtcctgtgccttgtgggccctcagcctctgagggcagagatgctgtcagtgccgcaggtgcatcacatacttctagcatcctctccaccctgcattccaaatgctgcttgctgcctgccctgccctccgatgcaggggtggggtggggggcggagtcccgcccagcatagctgcagtgtcacaaagccatggcagagggtcctagcggcgccaccctgccccagcctgaggaggagggagagggaggaacaaccctgggcagacggggcctcagggacctgtgtccttccgcctccagagctgcccagccacgggctctcagggtgctggggcagccccaggtcccctcttgaactcagctggggccaggggccctcagaatgaaggcaggcaccaggcaggagcagcatccccctccttgacggtgctggcaggagggccgcgccatgctgactgcttgaacctctgctgacctgacagtgctggcgggagggccgcaccatgctgactgcctgaatctctgctgaggctgcctgcctgccgggcccagctcagcgccctctccactgcgaatcagtggcgatcatgtgatttctatttctgccccacagggtaagggacgagtcttctggaaggctctgccatggacatttgtcctcgggctcagaggccccaccctgccccacacctgcccctgatcactgcagtgtccagcccagtgttgaacagattgtagcgttctgtctcattacgagcaaataaatagactttcattgg

SEQ ID NO: 157197 - DNA, 2735 bp, Homo sapiens
  Payload ID: 10814
  Gene Symbol: NAA60
  Gene Name: N(alpha)-acetyltransferase 60, NatF catalytic subunit
  Uniprot ID: Q9H7X0
  ENST ID: ENST00000407558
  CDS Start-End: 304-1032
aaccgaggacctgtagccactgggcagctgcgagaggtagttttcctccttttctctaagcaaccatttccgcttccgctggcggggtctcctccgtgagctccgggcctgtttgcctgctgaagtagagtcttagggtgaccccagggggacgtaatgtttccgagaagaaggacagaaagaagactgggagacaccggaactcgaaagaaaatcggtaacaaaatcatacagaaaggctgtacctggaggaaggaagtgcggagccagcctgagttgggagaagagctccagagagtgtgaatgacagaggtggtgccatccagcgcgctcagcgaggtcagcctgcgcctcctctgccacgatgacatagacactgtgaagcacctgtgtggcgactggttccccatcgagtacccagactcatggtatcgtgatatcacatccaacaagaagttcttttcccttgctgcaacctacagaggtgccattgtgggaatgatagtagctgaaattaagaacaggaccaaaatacataaagaggatggagatattctagcatccaacttctctgttgacacacaagtcgcgtacatcctaagtctgggcgtcgtgaaagagttcaggaagcacggcataggttccctcttacttgaaagtttaaaggatcacatatcaaccaccgcccaggaccactgcaaagccatttacctgcatgtcctcaccaccaacaacacagcaataaacttctatgaaaacagagacttcaagcagcaccactatctcccctattactactccattcgaggggtcctcaaagatggcttcacctatgtcctctacatcaacggcggccaccctccctggacgattttggactacatccagcacctgggctctgcactagccagcctgagcccctgctccattccgcacagagtctaccgccaggcccacagcctgctctgcagcttcctgccatggtcgggcatctcttccaagagtggcatcgagtacagccggaccatgtgatgtcggctgggcagccgccaccaggccccacccttcggccgcccgcagagcccgccttcctgtccatctgaccccttctgttttctgcaaggagctgccagccatctaactgggctcgtcggcctgccccagctgcaggcccggtgctacacgggctcgggaacagaacatcgtgggcatgcgcagagcatgcccatccgtggcaggctcttcagctcccctccctgcttctggaaacctctgcctgctgccctggccctgcccccctgcgcatgcaccgtccccagggctgacccagtgtggctgcattcactgggaggggcctgccctcactgggcctctcccactccgctgcctgttcttgcagctccttcctggaaagctggaggggactttctcctgcaagggaggaacgcaagtattatggacacacttgaccgtaaaggcacaggagcctcggaacaagggggcgcaataaagggaatggcccgtccccttccagaaccagcccaaagaagcctggggggtgaggagtggcccccactcctccatgaggggctgatgaggggtgggcagcctgggggaggctttcctcgcaagcacagagctctgaggctcagccccctggcacaggcggtcacgcatcaggacggttcctactcctcagcaccttccgtgcagttaccagtgccctgggaggtcacactgcccgtcggaccttggcatgctccattcagctgacctgctgaggacaggcatcgccgagactccttgggtcctccccgccctccctcatgctgccacaagctgctgctccaaggcctggccacatgcagacaggaggaagctgagctcgacattaggcctcaaggctgccatctgtcttgtagggcctggccttgtgggcagggggcagtcctgtgccttgtgggccctcagcctctgagggcagagatgctgtcagtgccgcaggtgcatcacatacttctagcatcctctccaccctgcattccaaatgctgcttgctgcctgccctgccctccgatgcaggggtggggtggggggcggagtcccgcccagcatagctgcagtgtcacaaagccatggcagagggtcctagcggcgccaccctgccccagcctgaggaggagggagagggaggaacaaccctgggcagacggggcctcagggacctgtgtccttccgcctccagagctgcccagccacgggctctcagggtgctggggcagccccaggtcccctcttgaactcagctggggccaggggccctcagaatgaaggcaggcaccaggcaggagcagcatccccctccttgacggtgctggcaggagggccgcgccatgctgactgcttgaacctctgctgacctgacagtgctggcgggagggccgcaccatgctgactgcctgaatctctgctgaggctgcctgcctgccgggcccagctcagcgccctctccactgcgaatcagtggcgatcatgtgatttctatttctgccccacagggtaagggacgagtcttctggaaggctctgccatggacatttgtcctcgggctcagaggccccaccctgccccacacctgcccctgatcactgcagtgtccagcccagtgttgaacagattgtagcgttctgtctcattacgagcaaataaatagactttcattggagttcgtcaca

SEQ ID NO: 157198 - DNA, 2619 bp, Homo sapiens
  Payload ID: 10814
  Gene Symbol: NAA60
  Gene Name: N(alpha)-acetyltransferase 60, NatF catalytic subunit
  Uniprot ID: Q9H7X0
  ENST ID: ENST00000414063
  CDS Start-End: 177-905
agggagcgggaggcggaagtgccgcgggctgccgcctccgtcccggctgcggcccctgccggttacataactcgttgcgggctccgcgcggtcccacttcccggctcccttcgcctccaggatgcgctgagccctacaacacccccagcggccgccggctcccccacgaggtgtgaatgacagaggtggtgccatccagcgcgctcagcgaggtcagcctgcgcctcctctgccacgatgacatagacactgtgaagcacctgtgtggcgactggttccccatcgagtacccagactcatggtatcgtgatatcacatccaacaagaagttcttttcccttgctgcaacctacagaggtgccattgtgggaatgatagtagctgaaattaagaacaggaccaaaatacataaagaggatggagatattctagcatccaacttctctgttgacacacaagtcgcgtacatcctaagtctgggcgtcgtgaaagagttcaggaagcacggcataggttccctcttacttgaaagtttaaaggatcacatatcaaccaccgcccaggaccactgcaaagccatttacctgcatgtcctcaccaccaacaacacagcaataaacttctatgaaaacagagacttcaagcagcaccactatctcccctattactactccattcgaggggtcctcaaagatggcttcacctatgtcctctacatcaacggcggccaccctccctggacgattttggactacatccagcacctgggctctgcactagccagcctgagcccctgctccattccgcacagagtctaccgccaggcccacagcctgctctgcagcttcctgccatggtcgggcatctcttccaagagtggcatcgagtacagccggaccatgtgatgtcggctgggcagccgccaccaggccccacccttcggccgcccgcagagcccgccttcctgtccatctgaccccttctgttttctgcaaggagctgccagccatctaactgggctcgtcggcctgccccagctgcaggcccggtgctacacgggctcgggaacagaacatcgtgggcatgcgcagagcatgcccatccgtggcaggtacgccacagcagacacaaaggctcttcagctcccctccctgcttctggaaacctctgcctgctgccctggccctgcccccctgcgcatgcaccgtccccagggctgacccagtgtggctgcattcactgggaggggcctgccctcactgggcctctcccactccgctgcctgttcttgcagctccttcctggaaagctggaggggactttctcctgcaagggaggaacgcaagtattatggacacacttgaccgtaaaggcacaggagcctcggaacaagggggcgcaataaagggaatggcccgtccccttccagaaccagcccaaagaagcctggggggtgaggagtggcccccactcctccatgaggggctgatgaggggtgggcagcctgggggaggctttcctcgcaagcacagagctctgaggctcagccccctggcacaggcggtcacgcatcaggacggttcctactcctcagcaccttccgtgcagttaccagtgccctgggaggtcacactgcccgtcggaccttggcatgctccattcagctgacctgctgaggacaggcatcgccgagactccttgggtcctccccgccctccctcatgctgccacaagctgctgctccaaggcctggccacatgcagacaggaggaagctgagctcgacattaggcctcaaggctgccatctgtcttgtagggcctggccttgtgggcagggggcagtcctgtgccttgtgggccctcagcctctgagggcagagatgctgtcagtgccgcaggtgcatcacatacttctagcatcctctccaccctgcattccaaatgctgcttgctgcctgccctgccctccgatgcaggggtggggtggggggcggagtcccgcccagcatagctgcagtgtcacaaagccatggcagagggtcctagcggcgccaccctgccccagcctgaggaggagggagagggaggaacaaccctgggcagacggggcctcagggacctgtgtccttccgcctccagagctgcccagccacgggctctcagggtgctggggcagccccaggtcccctcttgaactcagctggggccaggggccctcagaatgaaggcaggcaccaggcaggagcagcatccccctccttgacggtgctggcaggagggccgcgccatgctgactgcttgaacctctgctgacctgacagtgctggcgggagggccgcaccatgctgactgcctgaatctctgctgaggctgcctgcctgccgggcccagctcagcgccctctccactgcgaatcagtggcgatcatgtgatttctatttctgccccacagggtaagggacgagtcttctggaaggctctgccatggacatttgtcctcgggctcagaggccccaccctgccccacacctgcccctgatcactgcagtgtccagcccagtgttgaacagattgtagcgttctgtctcattacgagcaaataaatagactttcattgg

SEQ ID NO: 157199 - DNA, 1149 bp, Homo sapiens
  Payload ID: 10814
  Gene Symbol: NAA60
  Gene Name: N(alpha)-acetyltransferase 60, NatF catalytic subunit
  Uniprot ID: Q9H7X0
  ENST ID: ENST00000424546
  CDS Start-End: 86-835
gcttccgctggcggggtctcctccgtgagctccgggcctgtttgcctgctgaagtagagtcttagggtgaccccagggggacgtaatgtttccgagaagaaggacagaaagaagactgggagacaccggaactcgaaagaaaatcgcatacagaaaggctgtacctggaggaaggaagtgcggagccagcctgagttgggagaagagctccagagagtacccagactcatggtatcgtgatatcacatccaacaagaagttcttttcccttgctgcaacctacagaggtgccattgtgggaatgatagtagctgaaattaagaacaggaccaaaatacataaagaggatggagatattctagcatccaacttctctgttgacacacaagtcgcgtacatcctaagtctgggcgtcgtgaaagagttcaggaagcacggcataggttccctcttacttgaaagtttaaaggatcacatatcaaccaccgcccaggaccactgcaaagccatttacctgcatgtcctcaccaccaacaacacagcaataaacttctatgaaaacagagacttcaagcagcaccactatctcccctattactactccattcgaggggtcctcaaagatggcttcacctatgtcctctacatcaacggcggccaccctccctggacgattttggactacatccagcacctgggctctgcactagccagcctgagcccctgctccattccgcacagagtctaccgccaggcccacagcctgctctgcagcttcctgccatggtcgggcatctcttccaagagtggcatcgagtacagccggaccatgtgatgtcggctgggcagccgccaccaggccccacccttcggccgcccgcagagcccgccttcctgtccatctgaccccttctgttttctgcaaggagctgccagccatctaactgggctcgtcggcctgccccagctgcaggcccggtgctacacgggctcgggaacagaacatcgtgggcatgcgcagagcatgcccatccgtggcaggctcttcagctcccctccctgcttctggaaacctctgcctgctgccctggccctgcccccctgcgcatgcaccgtccccagggctgacccagtgtggctgcattcact

SEQ ID NO: 157200 - DNA, 1045 bp, Homo sapiens
  Payload ID: 10814
  Gene Symbol: NAA60
  Gene Name: N(alpha)-acetyltransferase 60, NatF catalytic subunit
  Uniprot ID: Q9H7X0
  ENST ID: ENST00000421765
  CDS Start-End: 204-776
aatgggcttccgggctgcgctgccggcagggagcgggaggcggaagtgccgcgggctgccgcctccgtcccggctgcggcccctgccggttacataactcgttgcgggctccgcgcggtcccacttcccggctcccttcgcctccaggatgcgctgagccctacaacacccccagcggccgccggctcccccacgaggtgtgaatgacagaggtggtgccatccagcgcgctcagcgaggtcagcctgcgcctcctctgccacgatgacatagacactgtgaagcacctgtgtggcgactggttccccatcgagtacccagactcatggtatcgtgatatcacatccaacaagaagttcttttcccttgctgcaacctacagaggtgccattgtgggaatgatagtagctgaaattaagaacaggaccaaaatacataaagaggatggagatattctagcatccaacttctctgttgacacacaagtcgcgtacatcctaagtctgggcgtcgtgaaagagttcaggaagcacggcatagagccccacggactacatccagcacctgggctctgcactagccagcctgagcccctgctccattccgcacagagtctaccgccaggcccacagcctgctctgcagcttcctgccatggtcgggcatctcttccaagagtggcatcgagtacagccggaccatgtgatgtcggctgggcagccgccaccaggccccacccttcggccgcccgcagagcccgccttcctgtccatctgaccccttctgttttctgcaaggagctgccagccatctaactgggctcgtcggcctgccccagctgcaggcccggtgctacacgggctcgggaacagaacatcgtgggcatgcgcagagcatgcccatccgtggcaggtacgccacagcagacacaaaggctcttcagctcccctccctgcttctggaaacctctgcctgctgccctggccctgcccccctgcgcatgcaccgtccccagggctgacccagtgtggctgcattcactggga

SEQ ID NO: 157201 - DNA, 657 bp, Homo sapiens
  Payload ID: 10814
  Gene Symbol: NAA60
  Gene Name: N(alpha)-acetyltransferase 60, NatF catalytic subunit
  ENST ID: ENST00000573201
  CDS Start-End: 360-657
ggggtctcctccgtgagctccgggcctgtttgcctgctgaagtagagtcttagggtgaccccagggggacgtaatgtttccgagaagaaggacagaaagaagactgggagacaccggaactcgaaagaaaatcggtaacaaaatatggtactgccttttaaggtctattacttaaacataagtatggctctggttcttaccgcctttaccgtatccttcatgggaagttgatactgatcggaaactgacacagagccttctcacctacactaagggggcctagcatacagaaaggctgtacctggaggaaggaagtgcggagccagcctgagttgggagaagagctccagagagtgtgaatgacagaggtggtgccatccagcgcgctcagcgaggtcagcctgcgcctcctctgccacgatgacatagacactgtgaagcacctgtgtggcgactggttccccatcgagtacccagactcatggtatcgtgatatcacatccaacaagaagttcttttcccttgctgcaacctacagaggtgccattgtgggaatgatagtagctgaaattaagaacaggaccaaaatacataaagaggatggagatattctagcatccaacttctctgttgacacacaagtcgcgtacatcctaa

SEQ ID NO: 157202 - DNA, 575 bp, Homo sapiens
  Payload ID: 10814
  Gene Symbol: NAA60
  Gene Name: N(alpha)-acetyltransferase 60, NatF catalytic subunit
  ENST ID: ENST00000577013
  CDS Start-End: 59-463
aggatgcgctgagccctacaacacccccagcggccgccggctcccccacgaggtgtgaatgacagaggtggtgccatccagcgcgctcagcgaggtcagcctgcgcctcctctgccacgatgacatagacactgtgaagcacctgtgtggcgactggttccccatcgagtacccagactcatggtatcgtgatatcacatccaacaagaagttcttttcccttgctgcaacctacagaggtgccattgtgggaatgatagtagctgaaattaagaacaggaccaaaatacataaagagagccccacggactacatccagcacctgggctctgcactagccagcctgagcccctgctccattccgcacagagtctaccgccaggcccacagcctgctctgcagcttcctgccatggtcgggcatctcttccaagagtggcatcgagtacagccggaccatgtgatgtcggctgggcagccgccaccaggccccacccttcggccgcccgcagagcccgccttcctgtccatctgaccccttctgttttctgcaaggagctgccagccatctaactg

SEQ ID NO: 157203 - DNA, 2531 bp, Homo sapiens
  Payload ID: 10814
  Gene Symbol: NAA60
  Gene Name: N(alpha)-acetyltransferase 60, NatF catalytic subunit
  Uniprot ID: Q9H7X0
  ENST ID: ENST00000575076
  CDS Start-End: 111-839
ataactcgttgcgggctccgcgcggtcccacttcccggctcccttcgcctccaggatgcgctgagccctacaacacccccagcggccgccggctcccccacgaggtgtgaatgacagaggtggtgccatccagcgcgctcagcgaggtcagcctgcgcctcctctgccacgatgacatagacactgtgaagcacctgtgtggcgactggttccccatcgagtacccagactcatggtatcgtgatatcacatccaacaagaagttcttttcccttgctgcaacctacagaggtgccattgtgggaatgatagtagctgaaattaagaacaggaccaaaatacataaagaggatggagatattctagcatccaacttctctgttgacacacaagtcgcgtacatcctaagtctgggcgtcgtgaaagagttcaggaagcacggcataggttccctcttacttgaaagtttaaaggatcacatatcaaccaccgcccaggaccactgcaaagccatttacctgcatgtcctcaccaccaacaacacagcaataaacttctatgaaaacagagacttcaagcagcaccactatctcccctattactactccattcgaggggtcctcaaagatggcttcacctatgtcctctacatcaacggcggccaccctccctggacgattttggactacatccagcacctgggctctgcactagccagcctgagcccctgctccattccgcacagagtctaccgccaggcccacagcctgctctgcagcttcctgccatggtcgggcatctcttccaagagtggcatcgagtacagccggaccatgtgatgtcggctgggcagccgccaccaggccccacccttcggccgcccgcagagcccgccttcctgtccatctgaccccttctgttttctgcaaggagctgccagccatctaactgggctcgtcggcctgccccagctgcaggcccggtgctacacgggctcgggaacagaacatcgtgggcatgcgcagagcatgcccatccgtggcaggctcttcagctcccctccctgcttctggaaacctctgcctgctgccctggccctgcccccctgcgcatgcaccgtccccagggctgacccagtgtggctgcattcactgggaggggcctgccctcactgggcctctcccactccgctgcctgttcttgcagctccttcctggaaagctggaggggactttctcctgcaagggaggaacgcaagtattatggacacacttgaccgtaaaggcacaggagcctcggaacaagggggcgcaataaagggaatggcccgtccccttccagaaccagcccaaagaagcctggggggtgaggagtggcccccactcctccatgaggggctgatgaggggtgggcagcctgggggaggctttcctcgcaagcacagagctctgaggctcagccccctggcacaggcggtcacgcatcaggacggttcctactcctcagcaccttccgtgcagttaccagtgccctgggaggtcacactgcccgtcggaccttggcatgctccattcagctgacctgctgaggacaggcatcgccgagactccttgggtcctccccgccctccctcatgctgccacaagctgctgctccaaggcctggccacatgcagacaggaggaagctgagctcgacattaggcctcaaggctgccatctgtcttgtagggcctggccttgtgggcagggggcagtcctgtgccttgtgggccctcagcctctgagggcagagatgctgtcagtgccgcaggtgcatcacatacttctagcatcctctccaccctgcattccaaatgctgcttgctgcctgccctgccctccgatgcaggggtggggtggggggcggagtcccgcccagcatagctgcagtgtcacaaagccatggcagagggtcctagcggcgccaccctgccccagcctgaggaggagggagagggaggaacaaccctgggcagacggggcctcagggacctgtgtccttccgcctccagagctgcccagccacgggctctcagggtgctggggcagccccaggtcccctcttgaactcagctggggccaggggccctcagaatgaaggcaggcaccaggcaggagcagcatccccctccttgacggtgctggcaggagggccgcgccatgctgactgcttgaacctctgctgacctgacagtgctggcgggagggccgcaccatgctgactgcctgaatctctgctgaggctgcctgcctgccgggcccagctcagcgccctctccactgcgaatcagtggcgatcatgtgatttctatttctgccccacagggtaagggacgagtcttctggaaggctctgccatggacatttgtcctcgggctcagaggccccaccctgccccacacctgcccctgatcactgcagtgtccagcccagtgttgaacagattgtagcgttctgtctcattacgagcaaataaatagactttcattgg

SEQ ID NO: 157204 - DNA, 608 bp, Homo sapiens
  Payload ID: 10814
  Gene Symbol: NAA60
  Gene Name: N(alpha)-acetyltransferase 60, NatF catalytic subunit
  ENST ID: ENST00000573345
  CDS Start-End: 112-237
cataactcgttgcgggctccgcgcggtcccacttcccggctcccttcgcctccaggatgcgctgagccctacaacacccccagcggccgccggctcccccacgaggtgtgaatgacagaggtggtgccatccagcgcgctcagcgaggtcagcctgcgcctcctctgccacgatgacatagacactgtgaagcacctgtgtggcgactggttccccatcgagatggagatattctagcatccaacttctctgttgacacacaagtcgcgtacatcctaagtctgggcgtcgtgaaagagttcaggaagcacggcataggttccctcttacttgaaagtttaaaggatcacatatcaaccaccgcccaggaccactgcaaagccatttacctgcatgtcctcaccaccaacaacacagcaataaacttctatgaaaacagagacttcaagcagcaccactatctcccctattactactccattcgaggggtcctcaaagatggcttcacctatgtcctctacatcaacggcggccaccctccctggacgattttggactacatccagcacctgggctctgcactagccagcctgagcccctgctccatt

SEQ ID NO: 157205 - DNA, 582 bp, Homo sapiens
  Payload ID: 10814
  Gene Symbol: NAA60
  Gene Name: N(alpha)-acetyltransferase 60, NatF catalytic subunit
  ENST ID: ENST00000572169
  CDS Start-End: 256-582
agttttcctccttttctctaagcaaccatttccgcttccgctggcggggtctcctccgtgagctccgggcctgtttgcctgctgaagtagagtcttagggtgaccccagggggacgtaatgtttccgagaagaaggacagaaagaagactgggagacaccggaactcgaaagaaaatcgcatacagaaaggctgtacctggaggaaggaagtgcggagccagcctgagttgggagaagagctccagagagtgtgaatgacagaggtggtgccatccagcgcgctcagcgaggtcagcctgcgcctcctctgccacgatgacatagacactgtgaagcacctgtgtggcgactggttccccatcgagtacccagactcatggtatcgtgatatcacatccaacaagaagttcttttcccttgctgcaacctacagaggtgccattgtgggaatgatagtagctgaaattaagaacaggaccaaaatacataaagaggatggagatattctagcatccaacttctctgttgacacacaagtcgcgtacatcctaagtctgggcgtcgtgaaagagttcaggaag

SEQ ID NO: 157206 - DNA, 758 bp, Homo sapiens
  Payload ID: 10814
  Gene Symbol: NAA60
  Gene Name: N(alpha)-acetyltransferase 60, NatF catalytic subunit
  Uniprot ID: Q9H7X0
  ENST ID: ENST00000573580
  CDS Start-End: 208-741
gtgagctccgggcctgtttgcctgctgaagtagagtcttagggtgaccccagggggacgtaatgtttccgagaagaaggacagaaagaagactgggagacaccggaactcgaaagaaaatcggtacccagactcatggtatcgtgatatcacatccaacaagaagttcttttcccttgctgcaacctacagaggtgccattgtgggaatgatagtagctgaaattaagaacaggaccaaaatacataaagaggatggagatattctagcatccaacttctctgttgacacacaagtcgcgtacatcctaagtctgggcgtcgtgaaagagttcaggaagcacggcataggttccctcttacttgaaagtttaaaggatcacatatcaaccaccgcccaggaccactgcaaagccatttacctgcatgtcctcaccaccaacaacacagcaataaacttctatgaaaacagagacttcaagcagcaccactatctcccctattactactccattcgaggggtcctcaaagatggcttcacctatgtcctctacatcaacggcggccaccctccctggacgattttggactacatccagcacctgggctctgcactagccagcctgagcccctgctccattccgcacagagtctaccgccaggcccacagcctgctctgcagcttcctgccatggtcgggcatctcttccaagagtggcatcgagtacagccggaccatgtgatgtcggctgggcagccg

SEQ ID NO: 157207 - DNA, 2450 bp, Homo sapiens
  Payload ID: 10814
  Gene Symbol: NAA60
  Gene Name: N(alpha)-acetyltransferase 60, NatF catalytic subunit
  Uniprot ID: Q9H7X0
  ENST ID: ENST00000572584
  CDS Start-End: 53-781
aagaccaggctgtgaggtgacgcgtcccccccacccttccccacaggtgtgaatgacagaggtggtgccatccagcgcgctcagcgaggtcagcctgcgcctcctctgccacgatgacatagacactgtgaagcacctgtgtggcgactggttccccatcgagtacccagactcatggtatcgtgatatcacatccaacaagaagttcttttcccttgctgcaacctacagaggtgccattgtgggaatgatagtagctgaaattaagaacaggaccaaaatacataaagaggatggagatattctagcatccaacttctctgttgacacacaagtcgcgtacatcctaagtctgggcgtcgtgaaagagttcaggaagcacggcataggttccctcttacttgaaagtttaaaggatcacatatcaaccaccgcccaggaccactgcaaagccatttacctgcatgtcctcaccaccaacaacacagcaataaacttctatgaaaacagagacttcaagcagcaccactatctcccctattactactccattcgaggggtcctcaaagatggcttcacctatgtcctctacatcaacggcggccaccctccctggacgattttggactacatccagcacctgggctctgcactagccagcctgagcccctgctccattccgcacagagtctaccgccaggcccacagcctgctctgcagcttcctgccatggtcgggcatctcttccaagagtggcatcgagtacagccggaccatgtgatgtcggctgggcagccgccaccaggccccacccttcggccgcccgcagagcccgccttcctgtccatctgaccccttctgttttctgcaaggagctgccagccatctaactgggctcgtcggcctgccccagctgcaggcccggtgctacacgggctcgggaacagaacatcgtgggcatgcgcagagcatgcccatccgtggcaggctcttcagctcccctccctgcttctggaaacctctgcctgctgccctggccctgcccccctgcgcatgcaccgtccccagggctgacccagtgtggctgcattcactgggaggggcctgccctcactgggcctctcccactccgctgcctgttcttgcagctccttcctggaaagctggaggggactttctcctgcaagggaggaacgcaagtattatggacacacttgaccgtaaaggcacaggagcctcggaacaagggggcgcaataaagggaatggcccgtccccttccagaaccagcccaaagaagcctggggggtgaggagtggcccccactcctccatgaggggctgatgaggggtgggcagcctgggggaggctttcctcgcaagcacagagctctgaggctcagccccctggcacaggcggtcacgcatcaggacggttcctactcctcagcaccttccgtgcagttaccagtgccctgggaggtcacactgcccgtcggaccttggcatgctccattcagctgacctgctgaggacaggcatcgccgagactccttgggtcctccccgccctccctcatgctgccacaagctgctgctccaaggcctggccacatgcagacaggaggaagctgagctcgacattaggcctcaaggctgccatctgtcttgtagggcctggccttgtgggcagggggcagtcctgtgccttgtgggccctcagcctctgagggcagagatgctgtcagtgccgcaggtgcatcacatacttctagcatcctctccaccctgcattccaaatgctgcttgctgcctgccctgccctccgatgcaggggtggggtggggggcggagtcccgcccagcatagctgcagtgtcacaaagccatggcagagggtcctagcggcgccaccctgccccagcctgaggaggagggagagggaggaacaaccctgggcagacggggcctcagggacctgtgtccttccgcctccagagctgcccagccacgggctctcagggtgctggggcagccccaggtcccctcttgaactcagctggggccaggggccctcagaatgaaggcaggcaccaggcaggagcagcatccccctccttgacggtgctggcaggagggccgcgccatgctgactgcttgaacctctgctgacctgacagtgctggcgggagggccgcaccatgctgactgcctgaatctctgctgaggctgcctgcctgccgggcccagctcagcgccctctccactgcgaatcagtggcgatcatgtgatttctatttctgccccacagggtaagggacgagtcttctggaaggctctgccatggacatttgtcctcgggctcagaggccccaccctgccccacacctgcccctgatcactgcagtgtccagcccagtgttgaacagattgtagcgttctgtctcattacga

SEQ ID NO: 157208 - DNA, 565 bp, Homo sapiens
  Payload ID: 10814
  Gene Symbol: NAA60
  Gene Name: N(alpha)-acetyltransferase 60, NatF catalytic subunit
  ENST ID: ENST00000573593
  CDS Start-End: 177-565
aagcaaccatttccgcttccgctggcggggtctcctccgtgagctccgggcctgtttgcctgctgaagtagagtcttagggtgaccccagggggacgtaatgtttccgagaagaaggacagaaagaagactgggagacaccggaactcgaaagaaaatcggtaacaaaatgtgtgaatgacagaggtggtgccatccagcgcgctcagcgaggtcagcctgcgcctcctctgccacgatgacatagacactgtgaagcacctgtgtggcgactggttccccatcgagtacccagactcatggtatcgtgatatcacatccaacaagaagttcttttcccttgctgcaacctacagaggtgccattgtgggaatgatagtagctgaaattaagaacaggaccaaaatacataaagaggatggagatattctagcatccaacttctctgttgacacacaagtcgcgtacatcctaagtctgggcgtcgtgaaagagttcaggaagcacggcataggttccctcttacttgaaagtttaaaggatcacatatcaaccaccgcccagga

SEQ ID NO: 157209 - DNA, 570 bp, Homo sapiens
  Payload ID: 10814
  Gene Symbol: NAA60
  Gene Name: N(alpha)-acetyltransferase 60, NatF catalytic subunit
  ENST ID: ENST00000576787
  CDS Start-End: 340-570
acataactcgttgcgggctccgcgcggtcccacttcccggctcccttcgcctccaggatgcgctgagccctacaacacccccagcggccgccggctcccccacgagtgaaccagatgctgcccccctgcggttccagtgtatgtcagtgccagccacgtgcccaggacccaccgttcccagggatacaagatcccgtggcccatggtggcagctgcggcacacagcgctgctttccagagctctcagtgcggacaacagaggccttgcattcagtcacctggaaaacccaccatccacattggaaacccagtctctccggaatgagaaatttggtgtgaatgacagaggtggtgccatccagcgcgctcagcgaggtcagcctgcgcctcctctgccacgatgacatagacactgtgaagcacctgtgtggcgactggttccccatcgagtacccagactcatggtatcgtgatatcacatccaacaagaagttcttttcccttgctgcaacctacagaggtgccattgtgggaatgatagtagctgaaattaagaacaggaccaaaata

SEQ ID NO: 157210 - DNA, 584 bp, Homo sapiens
  Payload ID: 10814
  Gene Symbol: NAA60
  Gene Name: N(alpha)-acetyltransferase 60, NatF catalytic subunit
  ENST ID: ENST00000574950
  CDS Start-End: 265-584
gtgagctccgggcctgtttgcctgctgaagtagagtcttagggtgaccccagggggacgtaatgtttccgagaagaaggacagaaagaagactgggagacaccggaactcgaaagaaaatcggtaacaaaatgtgggttcggccaacagtgccctgtaggcctgaaatttcggtctggccagagcaagcatacagaaaggctgtacctggaggaaggaagtgcggagccagcctgagttgggagaagagctccagagagtgtgaatgacagaggtggtgccatccagcgcgctcagcgaggtcagcctgcgcctcctctgccacgatgacatagacactgtgaagcacctgtgtggcgactggttccccatcgagtacccagactcatggtatcgtgatatcacatccaacaagaagttcttttcccttgctgcaacctacagaggtgccattgtgggaatgatagtagctgaaattaagaacaggaccaaaatacataaagaggatggagatattctagcatccaacttctctgttgacacacaagtcgcgtacatcctaagtctgggcgtcgtgaaagagtt

SEQ ID NO: 157211 - DNA, 552 bp, Homo sapiens
  Payload ID: 10814
  Gene Symbol: NAA60
  Gene Name: N(alpha)-acetyltransferase 60, NatF catalytic subunit
  ENST ID: ENST00000574328
  CDS Start-End: 193-552
aaaaggagaagatggcagagtaggacaatggatactaggggacagtttgacacgcagactcaaatctttttttttttagatggagttttgcttttgtcgcgcaggctggagtgcagtggcgcaatctcggctcactgcagcctccacctccagggttcaaacgattctcctgcctcagcctcccaggtgtgaatgacagaggtggtgccatccagcgcgctcagcgaggtcagcctgcgcctcctctgccacgatgacatagacactgtgaagcacctgtgtggcgactggttccccatcgagtacccagactcatggtatcgtgatatcacatccaacaagaagttcttttcccttgctgcaacctacagaggtgccattgtgggaatgatagtagctgaaattaagaacaggaccaaaatacataaagaggatggagatattctagcatccaacttctctgttgacacacaagtcgcgtacatcctaagtctgggcgtcgtgaaagagttcaggaagcacggcataggttccctcttacttgaaagttta

SEQ ID NO: 157212 - DNA, 818 bp, Homo sapiens
  Payload ID: 10814
  Gene Symbol: NAA60
  Gene Name: N(alpha)-acetyltransferase 60, NatF catalytic subunit
  ENST ID: ENST00000572757
  CDS Start-End: 395-818
agttttcctccttttctctaagcaaccatttccgcttccgctggcggggtctcctccgtgagctccgggcctgtttgcctgctgaagtagagtcttagggtgaccccagggggacgtaatgtttccgagaagaaggacagaaagaagactgggagacaccggaactcgaaagaaaatcgatggtactgccttttaaggtctattacttaaacataagtatggctctggttcttaccgcctttaccgtatccttcatgggaagttgatactgatcggaaactgacacagagccttctcacctacactaagggggcctagcatacagaaaggctgtacctggaggaaggaagtgcggagccagcctgagttgggagaagagctccagagagtgtgaatgacagaggtggtgccatccagcgcgctcagcgaggtcagcctgcgcctcctctgccacgatgacatagacactgtgaagcacctgtgtggcgactggttccccatcgagtacccagactcatggtatcgtgatatcacatccaacaagaagttcttttcccttgctgcaacctacagaggtgccattgtgggaatgatagtagctgaaattaagaacaggaccaaaatacataaagaggatggagatattctagcatccaacttctctgttgacacacaagtcgcgtacatcctaagtctgggcgtcgtgaaagagttcaggaagcacggcataggttccctcttacttgaaagtttaaaggatcacatatcaaccaccgcccaggaccactgcaaagccatttacctgcatgtcctcacca

SEQ ID NO: 157213 - DNA, 558 bp, Homo sapiens
  Payload ID: 10814
  Gene Symbol: NAA60
  Gene Name: N(alpha)-acetyltransferase 60, NatF catalytic subunit
  ENST ID: ENST00000572131
  CDS Start-End: 196-558
taactcgttgcgggctccgcgcggtcccacttcccggctcccttcgcctccaggatgcgctgagccctacaacacccccagcggccgccggctcccccacgagaaaagtgcactgcttgatgagttgacatggcatgaacataacctgtacatccccaacgccagaagacccatgggcccccttaccaggtgtgaatgacagaggtggtgccatccagcgcgctcagcgaggtcagcctgcgcctcctctgccacgatgacatagacactgtgaagcacctgtgtggcgactggttccccatcgagtacccagactcatggtatcgtgatatcacatccaacaagaagttcttttcccttgctgcaacctacagaggtgccattgtgggaatgatagtagctgaaattaagaacaggaccaaaatacataaagaggatggagatattctagcatccaacttctctgttgacacacaagtcgcgtacatcctaagtctgggcgtcgtgaaagagttcaggaagcacggcataggttccctcttacttgaaagtttaaag

SEQ ID NO: 157214 - DNA, 833 bp, Homo sapiens
  Payload ID: 10814
  Gene Symbol: NAA60
  Gene Name: N(alpha)-acetyltransferase 60, NatF catalytic subunit
  Uniprot ID: Q9H7X0
  ENST ID: ENST00000570819
  CDS Start-End: 59-598
aggatgcgctgagccctacaacacccccagcggccgccggctcccccacgaggtgtgaatgacagaggtggtgccatccagcgcgctcagcgaggtcagcctgcgcctcctctgccacgatgacatagacactgtgaagcacctgtgtggcgactggttccccatcgagtacccagactcatggtatcgtgatatcacatccaacaagaagttcttttcccttgctgcaacctacagaggtgccattgtgggaatgatagtagctgaaattaagaacaggaccaaaatacataaagaggatggagatattctagcatccaacttctctgttgacacacaagtcgcgtacatcctaagtctgggcgtcgtgaaagagttcaggaagcacggcatagagtctaccgccaggcccacagcctgctctgcagcttcctgccatggtcgggcatctcttccaagagtggcatcgagtacagccggaccatgtgatgtcggctgggcagccgccaccaggccccacccttcggccgcccgcagagcccgccttcctgtccatctgaccccttctgttttctgcaaggagctgccagccatctaactgggctcgtcggcctgccccagctgcaggcccggtgctacacgggctcgggaacagaacatcgtgggcatgcgcagagcatgcccatccgtggcaggctcttcagctcccctccctgcttctggaaacctctgcctgctgccctggccctgcccccctgcgcatgcaccgtccccagggctgacccagtgtggctgcattcactgggaggggcctgccctcactgggcctctcc

SEQ ID NO: 157215 - DNA, 803 bp, Homo sapiens
  Payload ID: 10814
  Gene Symbol: NAA60
  Gene Name: N(alpha)-acetyltransferase 60, NatF catalytic subunit
  ENST ID: ENST00000572739
  CDS Start-End: 118-381
cggttacataactcgttgcgggctccgcgcggtcccacttcccggctcccttcgcctccaggatgcgctgagccctacaacacccccagcggccgccggctcccccacgaggtgtgaatgacagaggtggtgccatccagcgcgctcagcgaggtcagcctgcgcctcctctgccacgatgacatagacactgtgaagcacctgtgtggcgactggttccccatcgagtacccagactcatggtatcgtgatatcacatccaacaagaagttcttttcccttgctgcaacctacagaggtgccattgtgggaatgatagtagctgaaattaagaacaggaccaaaatacataaagaggttccctcttacttgaaagtttaaaggatcacatatcaaccaccgcccaggaccactgcaaagccatttacctgcatgtcctcaccaccaacaacacagcaataaacttctatgaaaacagagacttcaagcagcaccactatctcccctattactactccattcgaggggtcctcaaagatggcttcacctatgtcctctacatcaacggcggccaccctccctggacgattttggactacatccagcacctgggctctgcactagccagcctgagcccctgctccattccgcacagagtctaccgccaggcccacagcctgctctgcagcttcctgccatggtcgggcatctcttccaagagtggcatcgagtacagccggaccatgtgatgtcggctgggcagccgccaccaggccccacccttcggccgcccgcagagcccg

SEQ ID NO: 157216 - DNA, 700 bp, Homo sapiens
  Payload ID: 10814
  Gene Symbol: NAA60
  Gene Name: N(alpha)-acetyltransferase 60, NatF catalytic subunit
  ENST ID: ENST00000575733
  CDS Start-End: 422-700
gctggcggggtctcctccgtgagctccgggcctgtttgcctgctgaagtagagtcttagggtgaccccagggggacgtaatgtttccgagaagaaggacagaaagaagactgggagacaccggaactcgaaagaaaatcggtaacaaaatgtgggttcggccaacagtgccctgtaggcctgaaatttcggtctggccagagcaagatggtactgccttttaaggtctattacttaaacataagtatggctctggttcttaccgcctttaccgtatccttcatgggaagttgatactgatcggaaactgacacagagccttctcacctacactaagggggcctagcatacagaaaggctgtacctggaggaaggaagtgcggagccagcctgagttgggagaagagctccagagagtgtgaatgacagaggtggtgccatccagcgcgctcagcgaggtcagcctgcgcctcctctgccacgatgacatagacactgtgaagcacctgtgtggcgactggttccccatcgagtacccagactcatggtatcgtgatatcacatccaacaagaagttcttttcccttgctgcaacctacagaggtgccattgtgggaatgatagtagctgaaattaagaacaggaccaaaatacataaagaggatggagatattctagcatccaacttctctgttgacaca

SEQ ID NO: 157217 - DNA, 398 bp, Homo sapiens
  Payload ID: 10814
  Gene Symbol: NAA60
  Gene Name: N(alpha)-acetyltransferase 60, NatF catalytic subunit
  ENST ID: ENST00000570372
  CDS Start-End: 158-398
tttccgcttccgctggcggggtctcctccgtgagctccgggcctgtttgcctgctgaagtagagtcttagggtgaccccagggggacgtaatgtttccgagaagaaggacagaaagaagactgggagacaccggaactcgaaagaaaatcggtgtgaatgacagaggtggtgccatccagcgcgctcagcgaggtcagcctgcgcctcctctgccacgatgacatagacactgtgaagcacctgtgtggcgactggttccccatcgagtacccagactcatggtatcgtgatatcacatccaacaagaagttcttttcccttgctgcaacctacagaggtgccattgtgggaatgatagtagctgaaattaagaacaggaccaaaatacataaagagg

SEQ ID NO: 157218 - DNA, 1567 bp, Homo sapiens
  Payload ID: 10814
  Gene Symbol: NAA60
  Gene Name: N(alpha)-acetyltransferase 60, NatF catalytic subunit
  ENST ID: ENST00000576916
  CDS Start-End: 111-515
ataactcgttgcgggctccgcgcggtcccacttcccggctcccttcgcctccaggatgcgctgagccctacaacacccccagcggccgccggctcccccacgaggtgtgaatgacagaggtggtgccatccagcgcgctcagcgaggtcagcctgcgcctcctctgccacgatgacatagacactgtgaagcacctgtgtggcgactggttccccatcgagtacccagactcatggtatcgtgatatcacatccaacaagaagttcttttcccttgctgcaacctacagaggtgccattgtgggaatgatagtagctgaaattaagaacaggaccaaaatacataaagagagccccacggactacatccagcacctgggctctgcactagccagcctgagcccctgctccattccgcacagagtctaccgccaggcccacagcctgctctgcagcttcctgccatggtcgggcatctcttccaagagtggcatcgagtacagccggaccatgtgatgtcggctgggcagccgccaccaggccccacccttcggccgcccgcagagcccgccttcctgtccatctgaccccttctgttttctgcaaggagctgccagccatctaactgggctcgtcggcctgccccagctgcaggcccggtgctacacgggctcgggaacagaacatcgtgggcatgcgcagagcatgcccatccgtggcaggtacgccacagcagacacaaaggtatgggagcttggtgcctccagccacaaaagtggaaggccctggatgggcacagagaacggcagagccggaaggggccgtggggactgcagagtccaccaccttatgcaccagcacagcccagaggtttggtgacttgtgccaagctaacacagcaggctccatggcaactgggctgtgcacccgactttggatccatcagtgcctttatttgtgtggggaccgagaggcgcctagtggctgcaggcagacaccatggcctggagaagggctcatgctcctggagcacccaggcccagctgtgtggcccataggcagggtgtggggtgggcagagtgtctccgccgggccttcaccctgccctgctcttctctttcccacaggctcttcagctcccctccctgcttctggaaacctctgcctgctgccctggccctgcccccctgcgcatgcaccgtccccagggctgacccagtgtggctgcattcactgggaggggcctgccctcactgggcctctcccactccgctgcctgttcttgcagctccttcctggaaagctggaggggactttctcctgcaagggaggaacgcaagtattatggacacacttgaccgtaaaggcacaggagcctcggaacaagggggcgcaataaagggaatggcccgtccccttccagaaccagcccaaagaagcctggggggtgaggagtggcccccactcctccatgaggggctgatgaggggtgggcagcctgggggaggctttcctcgcaagcacagagctctgaggctcagccccctggcacaggcggtcacgcatca

SEQ ID NO: 157219 - DNA, 1089 bp, Homo sapiens
  Payload ID: 10814
  Gene Symbol: NAA60
  Gene Name: N(alpha)-acetyltransferase 60, NatF catalytic subunit
  Uniprot ID: Q9H7X0
  ENST ID: ENST00000572942
  CDS Start-End: 111-650
ataactcgttgcgggctccgcgcggtcccacttcccggctcccttcgcctccaggatgcgctgagccctacaacacccccagcggccgccggctcccccacgaggtgtgaatgacagaggtggtgccatccagcgcgctcagcgaggtcagcctgcgcctcctctgccacgatgacatagacactgtgaagcacctgtgtggcgactggttccccatcgagtacccagactcatggtatcgtgatatcacatccaacaagaagttcttttcccttgctgcaacctacagaggtgccattgtgggaatgatagtagctgaaattaagaacaggaccaaaatacataaagaggatggagatattctagcatccaacttctctgttgacacacaagtcgcgtacatcctaagtctgggcgtcgtgaaagagttcaggaagcacggcatagagtctaccgccaggcccacagcctgctctgcagcttcctgccatggtcgggcatctcttccaagagtggcatcgagtacagccggaccatgtgatgtcggctgggcagccgccaccaggccccacccttcggccgcccgcagagcccgccttcctgtccatctgaccccttctgttttctgcaaggagctgccagccatctaactgggctcgtcggcctgccccagctgcaggcccggtgctacacgggctcgggaacagaacatcgtgggcatgcgcagagcatgcccatccgtggcaggtacgccacagcagacacaaaggctcttcagctcccctccctgcttctggaaacctctgcctgctgccctggccctgcccccctgcgcatgcaccgtccccagggctgacccagtgtggctgcattcactgggaggggcctgccctcactgggcctctcccactccgctgcctgttcttgcagctccttcctggaaagctggaggggactttctcctgcaagggaggaacgcaagtattatggacacacttgaccgtaaaggcacaggagcctcggaacaagggggcgcaataaagggaatggcccgtccccttccagaaccagcccaaagaagcctggggg

SEQ ID NO: 157220 - DNA, 326 bp, Homo sapiens
  Payload ID: 10814
  Gene Symbol: NAA60
  Gene Name: N(alpha)-acetyltransferase 60, NatF catalytic subunit
  ENST ID: ENST00000615865
  CDS Start-End: 34-180
agtagagtcttagggtgaccccagggggacgtaatgtttccgagaagaaggacagaaagaagactgggagacaccggaactcgaaagaaaatcgcatacagaaaggctgtacctggaggaaggaagtgcggagccagcctgagttgggagaagagctccagagatgtgaaaacagactaatacatcgtctcaaaaaaagagaaaagaagaagaaggaactaaagaagaatttctttggaagcaaaatatttggaagcaaaatatttggctcctgactgaaagggttttgatccatgcatacattaataaacccttcagaaccatga

SEQ ID NO: 157221 - DNA, 4781 bp, Homo sapiens
  Payload ID: 10815
  Gene Symbol: N6AMT1
  Gene Name: N-6 adenine-specific DNA methyltransferase 1 (putative)
  Uniprot ID: Q9Y5N5
  ENST ID: ENST00000351429
  CDS Start-End: 27-587
acgcgcatggaacgcagcgaaggactatggcaggggagaacttcgctacgccgttccacgggcacgtgggccgcggcgccttcagcgacgtgtacgagcccgcggaggacacgtttctgcttttggacgcgctggaggcagcggctgccgaactggcaggagtggaaatatgcctggaagtagggtcagggtctggtgtagtatctgcattcctagcctctatgataggccctcaggctttgtacatgtgcactgatatcaaccctgaggcagcagcttgtaccctagagacagcacgctgtaacaaagttcacattcaaccagttattacagatttggtaggaagtcacggaatagaggcagcttgggctggtggcagaaatggtcgggaagtcatggacaggttttttcccctggttccagatctcctttcaccaagaggattattctatttagttaccattaaagaaaacaacccagaagaaattttgaaaataatgaagacaaaaggtctgcaaggaaccactgcactttccagacaagcaggccaagaaactctttcagtcctcaagttcaccaagtcttagcatacagtgtgtgcccagaactactggaaactgaatgcatttagcatattttgaaactgaagtcattcattaggtaacaaggaattttatcagaaatttgtcattaaaaaaaggtagaaaggtggaacattccctttcagtcaggcctatagaattatttgcacaagtacaagtaaatatgtgtattatatttatagtttgcattttaaatataaaaattatgtatgaaatatttatttcagcattatgtggtaaggcaatggaattgatctggcaaatgtcttttttttcataccagtccataaaggcagtttgctttcagatggcagggccagcaacacaccttcattgtcgtatctccggtgtgtatcagctctccaactctatgtcataattcagttcatggggatcttgattacctttcccttccacaaaatattacactgattggttatatcgatgacattatgctgatttgacctagtgagcaagaagtaggaactacattagacttagtggaaagacatttgcatcagagggtaggaaataaatatgactacaattcaagggccttctaccttagtgaaattggtagggatccagtgacatggggcatgttaggatatttcttctacggtgaaggataagtacttgcatcttgctgctcttaaaaccaagaaagaggcacaatacttagtgggcctctttgggttttggaggcaacattttccaatttcattatgttataccagcctgtttaccaattgactcaaaaagctgctagttttgagtagggcccagaacaagaaaagagtctgcaacaggtccaggctgctgtgcaagctgctctgccacttgggtcatatgatccagcagatccagtggtgtttcagtggcagtggcagatagggatgctgtttgaagcttctggcaggtccctataggtgaatcttggtttaggattttagagcaaagccgtgccattaccaacaaataactagtctctttttgagaaacagctcttggcctgctactgggccttagtagagactgatacttaatgagtcaccaagttaccgtgcaacctgagcttcccatcatgaactggatgttatctgagccaccaacgcacaaagttggatatgcacagcaacactctgtcatcagatggaagtggtatacacatgattgggcctgagaggccctgaaggcacaaggaagttacatgaagaagtaggccaaatttccgtagtccccacttctgctacctgccttctctcttccagcctgcatcggtggcttcatggggacttccctgtgatcagctgacagagaaagagaagacttaggcctggtttacagagtgttctgtatgatatgcaggtaccaccctaaagtggatagctgcagcactacatctcacctctgggctaccttgaaggacagtggtgaagggaaatcctcctggtggacacaactttgagcagtccccctgttgactttgcttagaaggaaaaatagccagatattcaattatatgccaattcataggccgtggccagtggtttggctggatggtcagggagttcaatataactggaaaattggtgacaaagaaatttggagatgaagtatgtggatagacactgaatgggcaaaaagggtgaagatatttgtgccccatgtgaatgctcaccaaagggttagcaaaaaaggattttaataaagtggacaagataacctgttctgtggatactagtaggcctctttctccagccacacctgtcatcacccaattgtttcatgagcaaagtagccatggtgacaagaatagaggttatgcatgggctcagcaacgtggacttctactcaccaaggctgacctggccaaggctatctctgagtgcccagtctgccagcaacagagaccaacactgagcccctgatatgacaccattccccagggtcatcagtcagttgcctagtggcaggttcattacattgatccacctctatcattgaagggatagtgttttatccttactgaaatagatcttactctggatacagattcactttcccttcgcgcagggtgtctgctaaaactaccatccgtggacttacagaatgtctcatctatgaccatggtattccacacagcattacaagaaactcagttcacagcaaaagtgtggcagtgggcccatgatcatggaattttcttaccatgttccctactatcttgaatcaactggctacatagagcagtggaatggcattttgaagacagtaataacaccagctatatagcagtgccttgtagggctgggacaaggttctctagaagactgtctatgctctgaatcaacatccagtatatggtgcatttctcttatgactgggattcacaggtccaggaatcaaggggtcagaataggaaggacaccattcgctattagccctggtgacccactagcaaaatttttgcttcctgttcccatgacttatgcactgctggcctagaggtcttacatagggtggaatattttccactgagagacgcaatcatgatttaattgaactggaagtttaagactgctcctcagccatttggggcttcttatgcctctaactcaatagacaaatgagttacagtgctggctgggtgattgttcctgactaccaagtagaaactggactaccccgaatggtggtaaggtaaagtatgttgggaatacacaggattccttagggcatctcttagtgttatcatgccctgtgattaaggtcaatggaaaactacagcctaattcagacaggaccactaatgatccagacctttcaggaatgaaggtttgggtcaccaccaggtaagtaccatgaccagatgaagtgcttgctgaaggcaaagggaatacagaataaatggtggaataaatactagctttgatcatatgaccagttacagaaacacagactgtgattgtcataagtatgtcctccatattttgctataactacattttgtgtgtgtgtagctttgttttcttctcatttccttattctgtaacataagatgcattgattttatagcatagtgtttaaatattgttaatttttttaactggctccagtgttcaaccttgattaattttacatcatagtatttaagttatgggatatcaaggagagagtaaacatcacatgaagactttaccacctcttctgggaaacgggttagagtgtttctggtggaatgctggattgttaatcgtgttagatggaattatgaccttgttgttgtctttatgtggcagttaagtatggtttaaagagatgtttatgggtgccaagttgacaagggtaaacttgtgatggttaattttatatgtcaacttgaataggccacagggtgccaaatatctgtttaaacattattctgaagtgtcttgagtgtgtttacagacaagatttgcatttgaactgggggactcagtaaaggagatagccatccccaaggtgggtggacatcatccagtttgttgagggcgtaaataaaataaaaggcagaggaaggaagaattccccccccttttttttcctgcctcattgtttgagctgtgacatctcatcttctgtcctcagatggatttacatcactggcttccctggttctcaagcctttggattcagactgaattataccacaggccttcctgggtctccagcttatagatgacagatcatgggacctcttagcctccataatcatgtaagccactttcttgtagtactggtaaaagatatattagaccaatctataaaacagctagctatgaaagagaaaggtgacaggcacaagcctaggcaaatagagaagggttcctggagagcctctgacttgcctaggtcattgtgcacacgtggcttgcctgaatgaacatgcccactgtgaaagattccatttctcaacacatgtgcagtaagggaaataaatcaatgtggctcagactaagcgcccacacatggggtggagccacgaggagtttgctccttatgcaggggagaagccgtgcctcttcagctcgtgtgtggtggcctggcattcaatttgtgaggtgtaaaacctgcatgaaggacccctctttttgtggagagctttccttttgcctaataaattctgccctcctcgcc

SEQ ID NO: 157222 - DNA, 4865 bp, Homo sapiens
  Payload ID: 10815
  Gene Symbol: N6AMT1
  Gene Name: N-6 adenine-specific DNA methyltransferase 1 (putative)
  ENST ID: ENST00000303775
  CDS Start-End: 27-671
acgcgcatggaacgcagcgaaggactatggcaggggagaacttcgctacgccgttccacgggcacgtgggccgcggcgccttcagcgacgtgtacgagcccgcggaggacacgtttctgcttttggacgcgctggaggcagcggctgccgaactggcaggagtggaaatatgcctggaagtagggtcagggtctggtgtagtatctgcattcctagcctctatgataggccctcaggctttgtacatgtgcactgatatcaaccctgaggcagcagcttgtaccctagagacagcacgctgtaacaaagttcacattcaaccagttattacagatttggtcaaaggcttgctaccaagattgaccgaaaaagttgatcttctggtgtttaatcccccctatgtagtgactccacctcaagaggtaggaagtcacggaatagaggcagcttgggctggtggcagaaatggtcgggaagtcatggacaggttttttcccctggttccagatctcctttcaccaagaggattattctatttagttaccattaaagaaaacaacccagaagaaattttgaaaataatgaagacaaaaggtctgcaaggaaccactgcactttccagacaagcaggccaagaaactctttcagtcctcaagttcaccaagtcttagcatacagtgtgtgcccagaactactggaaactgaatgcatttagcatattttgaaactgaagtcattcattaggtaacaaggaattttatcagaaatttgtcattaaaaaaaggtagaaaggtggaacattccctttcagtcaggcctatagaattatttgcacaagtacaagtaaatatgtgtattatatttatagtttgcattttaaatataaaaattatgtatgaaatatttatttcagcattatgtggtaaggcaatggaattgatctggcaaatgtcttttttttcataccagtccataaaggcagtttgctttcagatggcagggccagcaacacaccttcattgtcgtatctccggtgtgtatcagctctccaactctatgtcataattcagttcatggggatcttgattacctttcccttccacaaaatattacactgattggttatatcgatgacattatgctgatttgacctagtgagcaagaagtaggaactacattagacttagtggaaagacatttgcatcagagggtaggaaataaatatgactacaattcaagggccttctaccttagtgaaattggtagggatccagtgacatggggcatgttaggatatttcttctacggtgaaggataagtacttgcatcttgctgctcttaaaaccaagaaagaggcacaatacttagtgggcctctttgggttttggaggcaacattttccaatttcattatgttataccagcctgtttaccaattgactcaaaaagctgctagttttgagtagggcccagaacaagaaaagagtctgcaacaggtccaggctgctgtgcaagctgctctgccacttgggtcatatgatccagcagatccagtggtgtttcagtggcagtggcagatagggatgctgtttgaagcttctggcaggtccctataggtgaatcttggtttaggattttagagcaaagccgtgccattaccaacaaataactagtctctttttgagaaacagctcttggcctgctactgggccttagtagagactgatacttaatgagtcaccaagttaccgtgcaacctgagcttcccatcatgaactggatgttatctgagccaccaacgcacaaagttggatatgcacagcaacactctgtcatcagatggaagtggtatacacatgattgggcctgagaggccctgaaggcacaaggaagttacatgaagaagtaggccaaatttccgtagtccccacttctgctacctgccttctctcttccagcctgcatcggtggcttcatggggacttccctgtgatcagctgacagagaaagagaagacttaggcctggtttacagagtgttctgtatgatatgcaggtaccaccctaaagtggatagctgcagcactacatctcacctctgggctaccttgaaggacagtggtgaagggaaatcctcctggtggacacaactttgagcagtccccctgttgactttgcttagaaggaaaaatagccagatattcaattatatgccaattcataggccgtggccagtggtttggctggatggtcagggagttcaatataactggaaaattggtgacaaagaaatttggagatgaagtatgtggatagacactgaatgggcaaaaagggtgaagatatttgtgccccatgtgaatgctcaccaaagggttagcaaaaaaggattttaataaagtggacaagataacctgttctgtggatactagtaggcctctttctccagccacacctgtcatcacccaattgtttcatgagcaaagtagccatggtgacaagaatagaggttatgcatgggctcagcaacgtggacttctactcaccaaggctgacctggccaaggctatctctgagtgcccagtctgccagcaacagagaccaacactgagcccctgatatgacaccattccccagggtcatcagtcagttgcctagtggcaggttcattacattgatccacctctatcattgaagggatagtgttttatccttactgaaatagatcttactctggatacagattcactttcccttcgcgcagggtgtctgctaaaactaccatccgtggacttacagaatgtctcatctatgaccatggtattccacacagcattacaagaaactcagttcacagcaaaagtgtggcagtgggcccatgatcatggaattttcttaccatgttccctactatcttgaatcaactggctacatagagcagtggaatggcattttgaagacagtaataacaccagctatatagcagtgccttgtagggctgggacaaggttctctagaagactgtctatgctctgaatcaacatccagtatatggtgcatttctcttatgactgggattcacaggtccaggaatcaaggggtcagaataggaaggacaccattcgctattagccctggtgacccactagcaaaatttttgcttcctgttcccatgacttatgcactgctggcctagaggtcttacatagggtggaatattttccactgagagacgcaatcatgatttaattgaactggaagtttaagactgctcctcagccatttggggcttcttatgcctctaactcaatagacaaatgagttacagtgctggctgggtgattgttcctgactaccaagtagaaactggactaccccgaatggtggtaaggtaaagtatgttgggaatacacaggattccttagggcatctcttagtgttatcatgccctgtgattaaggtcaatggaaaactacagcctaattcagacaggaccactaatgatccagacctttcaggaatgaaggtttgggtcaccaccaggtaagtaccatgaccagatgaagtgcttgctgaaggcaaagggaatacagaataaatggtggaataaatactagctttgatcatatgaccagttacagaaacacagactgtgattgtcataagtatgtcctccatattttgctataactacattttgtgtgtgtgtagctttgttttcttctcatttccttattctgtaacataagatgcattgattttatagcatagtgtttaaatattgttaatttttttaactggctccagtgttcaaccttgattaattttacatcatagtatttaagttatgggatatcaaggagagagtaaacatcacatgaagactttaccacctcttctgggaaacgggttagagtgtttctggtggaatgctggattgttaatcgtgttagatggaattatgaccttgttgttgtctttatgtggcagttaagtatggtttaaagagatgtttatgggtgccaagttgacaagggtaaacttgtgatggttaattttatatgtcaacttgaataggccacagggtgccaaatatctgtttaaacattattctgaagtgtcttgagtgtgtttacagacaagatttgcatttgaactgggggactcagtaaaggagatagccatccccaaggtgggtggacatcatccagtttgttgagggcgtaaataaaataaaaggcagaggaaggaagaattccccccccttttttttcctgcctcattgtttgagctgtgacatctcatcttctgtcctcagatggatttacatcactggcttccctggttctcaagcctttggattcagactgaattataccacaggccttcctgggtctccagcttatagatgacagatcatgggacctcttagcctccataatcatgtaagccactttcttgtagtactggtaaaagatatattagaccaatctataaaacagctagctatgaaagagaaaggtgacaggcacaagcctaggcaaatagagaagggttcctggagagcctctgacttgcctaggtcattgtgcacacgtggcttgcctgaatgaacatgcccactgtgaaagattccatttctcaacacatgtgcagtaagggaaataaatcaatgtggctcagactaagcgcccacacatggggtggagccacgaggagtttgctccttatgcaggggagaagccgtgcctcttcagctcgtgtgtggtggcctggcattcaatttgtgaggtgtaaaacctgcatgaaggacccctctttttgtggagagctttccttttgcctaataaattctgccctcctcgcc

SEQ ID NO: 157223 - DNA, 1293 bp, Homo sapiens
  Payload ID: 10815
  Gene Symbol: N6AMT1
  Gene Name: N-6 adenine-specific DNA methyltransferase 1 (putative)
  ENST ID: ENST00000460212
  CDS Start-End: 27-671
acgcgcatggaacgcagcgaaggactatggcaggggagaacttcgctacgccgttccacgggcacgtgggccgcggcgccttcagcgacgtgtacgagcccgcggaggacacgtttctgcttttggacgcgctggaggcagcggctgccgaactggcaggagtggaaatatgcctggaagtagggtcagggtctggtgtagtatctgcattcctagcctctatgataggccctcaggctttgtacatgtgcactgatatcaaccctgaggcagcagcttgtaccctagagacagcacgctgtaacaaagttcacattcaaccagttattacagatttggtcaaaggcttgctaccaagattgaccgaaaaagttgatcttctggtgtttaatcccccctatgtagtgactccacctcaagaggtaggaagtcacggaatagaggcagcttgggctggtggcagaaatggtcgggaagtcatggacaggttttttcccctggttccagatctcctttcaccaagaggattattctatttagttaccattaaagaaaacaacccagaagaaattttgaaaataatgaagacaaaaggtctgcaaggaaccactgcactttccagacaagcaggccaagaaactctttcagtcctcaagttcaccaagtcttagcatacagtgtgtgcccagaactactggaaactgaatgcatttagcatattttgaaactgaagtcattcattagatggatttacatcactggcttccctggttctcaagcctttggattcagactgaattataccacaggccttcctgggtctccagcttatagatgacagatcatgggacctcttagcctccataatcatgtaagccactttcttgtagtactggtaaaagatatattagaccaatctataaaacagctagctatgaaagagaaaggtgacaggcacaagcctaggcaaatagagaagggttcctggagagcctctgacttgcctaggtcattgtgcacacgtggcttgcctgaatgaacatgcccactgtgaaagattccatttctcaacacatgtgcagtaagggaaataaatcaatgtggctcagactaagcgcccacacatggggtggagccacgaggagtttgctccttatgcaggggagaagccgtgcctcttcagctcgtgtgtggtggcctggcattcaatttgtgaggtgtaaaacctgcatgaaggacccctctttttgtggagagctttccttttgcctaataaattctgccctcctcgcc

SEQ ID NO: 157224 - DNA, 875 bp, Homo sapiens
  Payload ID: 10816
  Gene Symbol: N6AMT2
  Gene Name: N-6 adenine-specific DNA methyltransferase 2 (putative)
  Uniprot ID: Q8WVE0
  ENST ID: ENST00000382754
  CDS Start-End: 82-726
gagtggcgggttcgggcgcagctgtagggttggctgcgcgccgccgaggcgttttggactgggttataaacaacttgtgaaatgagtgatttggaagatgatgagacaccccagctttctgcccatgccttagcagctctccaggaattttatgctgagcaaaagcaacaaattgagccaggcgaggatgataaatataacattggaataatagaagagaattggcaactgagccagttttggtatagtcaggaaactgctctgcagctggcacaggaggcaattgcagctgtaggagaaggtggcagaatcgcatgtgtgagtgcccctagtgtttaccagaaactcagagagctgtgcagagaaaacttttcgatatacatctttgaatatgacaaaagatttgccatgtatggagaggagtttattttctatgattacaataatccattggacttacccgaaagaattgctgcacatagttttgacatcgtaatagcagatcctccctatctttcggaggaatgtctcagaaaaacatcggaaaccgtcaagtacctgacgcggggcaagattctgctgtgcacaggtgccatcatggaagaacaggcagcagaactccttggagtgaagatgtgcacgtttgttccaagacacacccggaacttggcaaatgagtttcgctgttatgtgaattatgattctgggctggactgtgggatctgattacagacggtgacataacacaggaaggaaccctgtcacattcctctttttgtattttcgtagtagatttaaaagttataatctcttcccctccccccaaactggagctgtccctggcctggttttcaaaataaagtgtgcgatcttca

SEQ ID NO: 157225 - DNA, 1042 bp, Homo sapiens
  Payload ID: 10816
  Gene Symbol: N6AMT2
  Gene Name: N-6 adenine-specific DNA methyltransferase 2 (putative)
  Uniprot ID: Q8WVE0
  ENST ID: ENST00000382758
  CDS Start-End: 49-693
gagtctgggcgactgcgcacgcgcggctggttataaacaacttgtgaaatgagtgatttggaagatgatgagacaccccagctttctgcccatgccttagcagctctccaggaattttatgctgagcaaaagcaacaaattgagccaggcgaggatgataaatataacattggaataatagaagagaattggcaactgagccagttttggtatagtcaggaaactgctctgcagctggcacaggaggcaattgcagctgtaggagaaggtggcagaatcgcatgtgtgagtgcccctagtgtttaccagaaactcagagagctgtgcagagaaaacttttcgatatacatctttgaatatgacaaaagatttgccatgtatggagaggagtttattttctatgattacaataatccattggacttacccgaaagaattgctgcacatagttttgacatcgtaatagcagatcctccctatctttcggaggaatgtctcagaaaaacatcggaaaccgtcaagtacctgacgcggggcaagattctgctgtgcacaggtgccatcatggaagaacaggcagcagaactccttggagtgaagatgtgcacgtttgttccaagacacacccggaacttggcaaatgagtttcgctgttatgtgaattatgattctgggctggactgtgggatctgattacagacggtgacataacacaggaaggaaccctgtcacattcctctttttgtattttcgtagtagatttaaaagttataatctcttcccctccccccaaactggagctgtccctggcctggttttcaaaataaagtgtgcgatcttcattattgtttccttagggagggcgtccctagagctcagtcttctgccaacctgaatccatggaattcgagttggaagaaaccttagaatctgcctgatcttctctcctcatttaacatgtgtaaaaacagaagaacagttgtgtggcttgcccaagggctcctgaatgagacaggaccttggcctctgcctcgggccagag

SEQ ID NO: 157226 - DNA, 2589 bp, Homo sapiens
  Payload ID: 10817
  Gene Symbol: NKAIN1
  Gene Name: Na+/K+ transporting ATPase interacting 1
  Uniprot ID: Q4KMZ8
  ENST ID: ENST00000373736
  CDS Start-End: 8-631
cggagccatgggcaagtgcagcgggcgctgcacgctggtcgccttctgctgcctgcagctggtggctgcgctggagcggcagatctttgacttcctgggctaccagtgggctcccatcctagccaacttcctgcacatcatggcagtcatcctgggcatctttggcaccgtgcagtaccgctcccggtacctcatcctgtatgcagcctggctggtgctctgggttggctggaatgcatttatcatctgcttctacttggaggttggacagctgtcccaggaccgggacttcatcatgaccttcaacacatccctgcaccgctcctggtggatggagaatgggccaggctgcctggtgacacctgttctgaactcccgcctggctctggaggaccaccatgtcatctctgtcactggctgcctgcttgactacccctacattgaagccctcagcagcgccctgcagatcttcctggcactgttcggcttcgtgttcgcctgctacgtgagcaaagtgttcctggaggaggaggacagctttgacttcatcggcggctttgactcctacggataccaggcgccccagaagacgtcgcatttacagctgcagcctctgtacacgtcggggtagcctctgccccgcgcccaccccggcgcctcgccctgggctgaccgcagctgccgcgagctcgggccaaggcgcaggcgtgtccccctggtggcccgcgcgctcactgcagcctgtgcccaaccccgcgtctgcatctggagatgcggacttggacgtggacttggacttggacttggatttgagcttggctcttcgcagcccggacttcggaggagtggggcggggcgggggaggggcaccacgggttttttgttttttgtttgtttgtttttaatctcagccttggcgtgagctggggccttcctctcttctccagcctctccctttcactcttcacccagcatcctgcccccctgtccaaaaacagcaggacatcagacccatcccatcccaccacactcactcaccagctctggggaaagctactgtgaactaggagcaggattcctgggttctaatcgcaggtccatcactgactgtgacgtctagcaaagcccttgccctctctgagcctcggtttccgcacctcaagtaattaatcccttagcaaatggactcttttagacttctcatttaactcaattccctgagctagactgggattaaaattctcattttgcagtacattaaaactgaggcccagagatgtgatttgcttgaggccacacagctagatttttggtggaagtgggccttgaacacagtgtactttctgcagtttctgactgtaaaacccagtgtctgctctctgagttccatttccaagcccccctccatcttggacctatgtggtctccaccatattcacacaccaccaccaccacttgccaatgcctctcttaaagcaatatacccattcgttctcttattgggaactggatggatgaagccccaaattcagccccacccacagagaagccttcctacactcagcctctgtccacccttggcaaatctttcaagctctctcctccaggaaagtggggccccaactcagtcactccacccccttccaggtccctgaggctggttctactgtatccccatcacctccacaactccactcacccctgacggctccatccacctcaccagttggaaggcttgtggtttcagagaggagcaatgctggtcagcgctgcccagactccagtgtttacagatcaccagcatttacaaccaatccaatggccagaagcctcctctaacaagcccagaaggagttctgaaggggcagatgggggtgtgagtagtcggggagtcgggattgccagcaccctcacccttccttgggggcaagtagaggtgagaacactttccccacctccctccacagacactcctgaggacgctgcatcccacgcactgcctggtgcgtccatagagagaggatcaggtctcagcatttcatctgtgaaagaggcatggccctgggttagaaaggagggcaggagacatggaggaactggggggcacccagatggtgcagatggtttgcacacctgagcctgtctgtggtgaccattccgctcctctcccactaccctccaatctatcattccctactctctaaggccaaaatatcctgagcaaggctggcaaccccaccccaccatcccaaatgcaagcagccaggcccaggagttcctctggcccccacaggcatggagctcccagctggtgggtacagcttgagaggggggcagctccctcaggctaagctactgcccttcactgggccagccctgcctccagccctcacctctctcaccccaactctcccccaagcccctttctactcaacgggtgtagccactggtgctttgaagccttttgtttttataagatggtttttgcaaggggaccaggttctcttttcactgggaccttgcaaggaggggagtgctctcctggtttctgtgcaggcgggttgattaaagatggtgttttcttctcta

SEQ ID NO: 157227 - DNA, 569 bp, Homo sapiens
  Payload ID: 10817
  Gene Symbol: NKAIN1
  Gene Name: Na+/K+ transporting ATPase interacting 1
  ENST ID: ENST00000526106
  CDS Start-End: 1-455
tgggctaccagtgggctcccatcctagccaacttcctgcacatcatggcagtcatcctgggcatctttggcaccgtgcagtaccgctcccggtacctcatcctggaccgggacttcatcatgaccttcaacacatccctgcaccgctcctggtggatggagaatgggccaggctgcctggtgacacctgttctgaactcccgcctggctctggaggaccaccatgtcatctctgtcactggctgcctgcttgactacccctacattgaagccctcagcagcgccctgcagatcttcctggcactgttcggcttcgtgttcgcctgctacgtgagcaaagtgttcctggaggaggaggacagctttgacttcatcggcggctttgactcctacggataccaggcgccccagaagacgtcgcatttacagctgcagcctctgtacacgtcggggtagcctctgccccgcgcccaccccggcgcctcgccctgggctgaccgcagctgccgcgagctcgggccaaggcgcaggcgtgtccccctggtggcccgcgcgctcactgcagcctgt

SEQ ID NO: 157228 - DNA, 562 bp, Homo sapiens
  Payload ID: 10817
  Gene Symbol: NKAIN1
  Gene Name: Na+/K+ transporting ATPase interacting 1
  ENST ID: ENST00000530145
  CDS Start-End: 184-562
ctctgcacagttcctgccttctaagtaacaaagacacagcaaggccggttatgatttacaatcaccacagccctcagattagtgtttcggagctgacgcaaccaggtggctgcgctggagcggcagatctttgacttcctgggctaccagtgggctcccatcctagccaacttcctgcacatcatggcagtcatcctgggcatctttggcaccgtgcagtaccgctcccggtacctcatcctgtatgcagcctggctggtgctctgggttggctggaatgcatttatcatctgcttctacttggaggttggacagctgtcccaggaccgggacttcatcatgaccttcaacacatccctgcaccgctcctggtggatggagaatgggccaggctgcctggtgacacctgttctgaactcccgcctggctctggaggaccaccatgtcatctctgtcactggctgcctgcttgactacccctacattgaagccctcagcagcgccctgcagatcttcctggcactgttcggcttcgtgttcgcctgctacgtgagcaaagtgt

SEQ ID NO: 157229 - DNA, 1106 bp, Homo sapiens
  Payload ID: 10818
  Gene Symbol: NKAIN2
  Gene Name: Na+/K+ transporting ATPase interacting 2
  Uniprot ID: Q5VXU1
  ENST ID: ENST00000368416
  CDS Start-End: 61-627
gtgggggctcgacggtggccgacgtgggacagtctggctgtggcaggggtctcggaaaccatgggttattgcagtggcaggtgcacgcttatctttatctgtggcatgcaactggtttgtgtgctggagaggcaaatatttgacttccttggatatcagtgggcacctatcctggcaaattttgtacatattattatcgtcattcttggtttgtttggaactattcaatatagacctcgttacataacaggatatgctgtctggctagtcctctgggttacgtggaatgtgtttgttatctgcttctatttggaggctggggacctctcaaaggaaacagaccttatcctgacttttaatatatcaatgcaccgatcttggtggatggagaatggaccaggatgtacggtgacgtcagtgacacctgccccagactgggccccagaagaccatcgctacatcacggtctcagggtgtttgctggagtaccagtacatagaagtggctcatagttccctccagattgtcctcgcagtaagtgttggcagccaaccgctccttctagtgcctctggggttgttttatttctgtgcgaactcagtgcacacaaatggaatctgtgggtaaagtgtggcctttttgctttttcctcattaatgcgacttttaacaggaaatcctcaggttaaactaaaccatcctctggacttagtgtgctgattttcttcgacaattagtaaataccctttgttatcatcagcattttacataggaaatccaatcagtcaagatgtgattacgtgacttttggtagacttttccaaggattctgaagggatgatcagagatttttttcataacgttctacagtactcaaaattataagatttccataagtgttttctcttttagtgcttcttttggctgtgctgctagccctgggatttctctttttcatttgccctatctccttcttccttcctagatttctcccaggcaccatccatcacctttaatctcccactttttttccagaaaaaatcacattttctatagattctaattctaagacattcatgcccccatttttcatagtactgtaacaat

SEQ ID NO: 157230 - DNA, 3115 bp, Homo sapiens
  Payload ID: 10818
  Gene Symbol: NKAIN2
  Gene Name: Na+/K+ transporting ATPase interacting 2
  Uniprot ID: Q5VXU1
  ENST ID: ENST00000368417
  CDS Start-End: 61-687
gtgggggctcgacggtggccgacgtgggacagtctggctgtggcaggggtctcggaaaccatgggttattgcagtggcaggtgcacgcttatctttatctgtggcatgcaactggtttgtgtgctggagaggcaaatatttgacttccttggatatcagtgggcacctatcctggcaaattttgtacatattattatcgtcattcttggtttgtttggaactattcaatatagacctcgttacataacaggatatgctgtctggctagtcctctgggttacgtggaatgtgtttgttatctgcttctatttggaggctggggacctctcaaaggaaacagaccttatcctgacttttaatatatcaatgcaccgatcttggtggatggagaatggaccaggatgtacggtgacgtcagtgacacctgccccagactgggccccagaagaccatcgctacatcacggtctcagggtgtttgctggagtaccagtacatagaagtggctcatagttccctccagattgtcctcgcactggcaggtttcatctacgcctgttatgttgtgaaatgtataactgaagaagaggacagctttgatttcataggtggctttgactcttatggctatcaagggcctcagaagacatctcatttacaactacagcctatgtacatgtcaaaataatacagatgacttcagtatgtcagcccatggacctttcaaagaacttttttcgcagtggcctcctgcatttcatgaagagcaagaagcaactgagtttaaatacatacacgtattaacaaaacaaatgcaaagcctctacatacaacactgacacacacacacacacacacgtgagcacgcacacaccaattccacttgacctcctctttctaactgaaacagacaaatatgcaggacacgcccatcttggatttcctgaaagcaggcccctttctcccaggccttcggaaagttcagaaggagatgtgttgatgcccaacggttgccggccattgctaactcctctgcagcccagcgggttggcctctgtgagctgggaagtcatccaaggcacattagtttgagagctctgtcttctgcactccatacatcttgacagcaccacggctacttaggcaatgtaattgcaaaaacaaacgaaacatgccatgatgaccttgtacccgaagtccgaaatggcagattgtttgccctaaaggctgtaccgtacatacttgccttaacccacctacattgtgtgcccaagaatcccagtgcagacagccccaagccacttcctttaggctaacacactgctattaattctaaatgagttcaagcctgtgtgtttcatgtcaaggaacaagactgaatagctcagcagctccagtgtgtctgtataagaaaagtgccagctgtcagcaaagtgctttaccatagagcctccatggtggcccaaaagagacaagtaacaataacaatatctgtcatctttataattctaaaatatggtcttctgatggggttgggggtgggacagagtaaaacattaatctactaaactcactaatctactggaagcagaaagcagaaatggcttaactcgctgattttatttattgcactctaggtgcttttataagtatctacaattgtcttttactaacacagaaacagctgtggatttctatcaacagaggccaactgaatatgtattagctatgtttactcttttatatctaattcaaattgaagactctacgtaggtgaacttttttttctaacttcagtgtacaagattatttttgggtgggtggggggagcaatagttaccttggtgaaatatttgagatctttttgtggtatttgggggatctgttgtgtgttagagtgtatttcaaccctcctgtattattgtggcagaaaaactgtgctgttaacgtagttggcaacaagatgcctttggaaacttaatagtaggtcaatgtgtttatggaatattctgaactcctaggaaattttgttctatattttaaagcattatttggttttcattagtggaaaacataattagctcaggcttatcaggaactcagatgagtcatattttttcttggatacacctgagacattaaactcaattttttaaaactaacacaccattctttagtgcagtgaaattcaaaagttataaattggcatggagcaagttttttctttgatttctatgaagtttcagttattggattaaactactttagaccttagcccattcggatctacatacaccagttccattactgtgtttgcatggatgtctgtaatatacacacacatatacatttgaaaatgatagaggaacaaagagttatcattggaacataaactataaaaaaagattccagcactcatgcttgaatttcctcagtgggttgtatgtttgtccatacatacatgtataaaataaacaattgcaaacatgtcagtgaaacctcatatgacgcttttatagtgacatgcatgtttaatgtatgagaaaaatatttaccaatgtattgtcctttgagtcctaaaatataaatactatacatgccagaaactattctaatgtgacttttaatgtgactattaaaaatgaggtttcactgtacattcatgctgtgatgcgatttcaccttatagtacatgtatatgggtacagaaaataaaccctcatattcctgctttaagttacagccaagttttcaccaaatcacaactatcatcaccaccaaaattttaaaaaacagtagttgactactaaaaagtaatcagtggacaggtcatttatgggatcagtaagcacagtagtgtgattatatctgggaaaacatctacagttgtacagctgtatcctcctcaaaatccggtgaagaatgctatttttctaggctgagcttttgttataaacttaatattcagaaggcaagggttatgatcctgatgtgtcctttttttttgcatttgttaattctgaatgtatttttaacagaatgatttttttgacttactagtgtaatttgcattttaaaaataaatggaaaaatacttaagtttctgagccatccct

SEQ ID NO: 157231 - DNA, 3052 bp, Homo sapiens
  Payload ID: 10818
  Gene Symbol: NKAIN2
  Gene Name: Na+/K+ transporting ATPase interacting 2
  Uniprot ID: Q5VXU1
  ENST ID: ENST00000545433
  CDS Start-End: 42-665
cttatttgtccctctggtatatttacaggtactgaagatggatggggatcattaggtttctcttattatattgtcccacaaatatcttaaccgtttgtgtgctggagaggcaaatatttgacttccttggatatcagtgggcacctatcctggcaaattttgtacatattattatcgtcattcttggtttgtttggaactattcaatatagacctcgttacataacaggatatgctgtctggctagtcctctgggttacgtggaatgtgtttgttatctgcttctatttggaggctggggacctctcaaaggaaacagaccttatcctgacttttaatatatcaatgcaccgatcttggtggatggagaatggaccaggatgtacggtgacgtcagtgacacctgccccagactgggccccagaagaccatcgctacatcacggtctcagggtgtttgctggagtaccagtacatagaagtggctcatagttccctccagattgtcctcgcactggcaggtttcatctacgcctgttatgttgtgaaatgtataactgaagaagaggacagctttgatttcataggtggctttgactcttatggctatcaagggcctcagaagacatctcatttacaactacagcctatgtacatgtcaaaataatacagatgacttcagtatgtcagcccatggacctttcaaagaacttttttcgcagtggcctcctgcatttcatgaagagcaagaagcaactgagtttaaatacatacacgtattaacaaaacaaatgcaaagcctctacatacaacactgacacacacacacacacacacgtgagcacgcacacaccaattccacttgacctcctctttctaactgaaacagacaaatatgcaggacacgcccatcttggatttcctgaaagcaggcccctttctcccaggccttcggaaagttcagaaggagatgtgttgatgcccaacggttgccggccattgctaactcctctgcagcccagcgggttggcctctgtgagctgggaagtcatccaaggcacattagtttgagagctctgtcttctgcactccatacatcttgacagcaccacggctacttaggcaatgtaattgcaaaaacaaacgaaacatgccatgatgaccttgtacccgaagtccgaaatggcagattgtttgccctaaaggctgtaccgtacatacttgccttaacccacctacattgtgtgcccaagaatcccagtgcagacagccccaagccacttcctttaggctaacacactgctattaattctaaatgagttcaagcctgtgtgtttcatgtcaaggaacaagactgaatagctcagcagctccagtgtgtctgtataagaaaagtgccagctgtcagcaaagtgctttaccatagagcctccatggtggcccaaaagagacaagtaacaataacaatatctgtcatctttataattctaaaatatggtcttctgatggggttgggggtgggacagagtaaaacattaatctactaaactcactaatctactggaagcagaaagcagaaatggcttaactcgctgattttatttattgcactctaggtgcttttataagtatctacaattgtcttttactaacacagaaacagctgtggatttctatcaacagaggccaactgaatatgtattagctatgtttactcttttatatctaattcaaattgaagactctacgtaggtgaacttttttttctaacttcagtgtacaagattatttttgggtgggtggggggagcaatagttaccttggtgaaatatttgagatctttttgtggtatttgggggatctgttgtgtgttagagtgtatttcaaccctcctgtattattgtggcagaaaaactgtgctgttaacgtagttggcaacaagatgcctttggaaacttaatagtaggtcaatgtgtttatggaatattctgaactcctaggaaattttgttctatattttaaagcattatttggttttcattagtggaaaacataattagctcaggcttatcaggaactcagatgagtcatattttttcttggatacacctgagacattaaactcaattttttaaaactaacacaccattctttagtgcagtgaaattcaaaagttataaattggcatggagcaagttttttctttgatttctatgaagtttcagttattggattaaactactttagaccttagcccattcggatctacatacaccagttccattactgtgtttgcatggatgtctgtaatatacacacacatatacatttgaaaatgatagaggaacaaagagttatcattggaacataaactataaaaaaagattccagcactcatgcttgaatttcctcagtgggttgtatgtttgtccatacatacatgtataaaataaacaattgcaaacatgtcagtgaaacctcatatgacgcttttatagtgacatgcatgtttaatgtatgagaaaaatatttaccaatgtattgtcctttgagtcctaaaatataaatactatacatgccagaaactattctaatgtgacttttaatgtgactattaaaaatgaggtttcactgtacattcatgctgtgatgcgatttcaccttatagtacatgtatatgggtacagaaaataaaccctcatattcctgctttaagttacagccaagttttcaccaaatcacaactatcatcaccaccaaaattttaaaaaacagtagttgactactaaaaagtaatcagtggacaggtcatttatgggatcagtaagcacagtagtgtgattatatctgggaaaacatctacagttgtacagctgtatcctcctcaaaatccggtgaagaatgctatttttctaggctgagcttttgttataaacttaatattcagaaggcaagggttatgatcctgatgtgtcctttttttttgcatttgttaattctgaatgtatttttaacagaatgatttttttgacttactagtgtaatttgcatttt

SEQ ID NO: 157232 - DNA, 148 bp, Homo sapiens
  Payload ID: 10818
  Gene Symbol: NKAIN2
  Gene Name: Na+/K+ transporting ATPase interacting 2
  ENST ID: ENST00000546092
  CDS Start-End: 2-148
ggtttgtgtgctggagaggcaaatatttgacttccttggatatcagtgggcacctatcctggcaaattttgtacatattattatcgtcattcttggtttgtttggaactattcaatatagacctcgttacataacaggataccatgtg

SEQ ID NO: 157233 - DNA, 1988 bp, Homo sapiens
  Payload ID: 10819
  Gene Symbol: NKAIN3
  Gene Name: Na+/K+ transporting ATPase interacting 3
  Uniprot ID: Q8N8D7
  ENST ID: ENST00000523211
  CDS Start-End: 133-726
agccgcgagcggcggccgcggggccgaggagcctgggccgggccgggcggggactactccggagtcaggaggcagcagcggcggaggacgaggatctctggcagtcagcgccgctcggacgccgccggcaccatgggctgctgcaccggacgctgctcgctcatctgcctctgcgcgctgcagttggtctcagcattagagaggcagatctttgacttccttggtttccagtgggcgcctattcttggaaattttctacacataatagttgtcatattgggtttgtttgggaccattcagtacagacctcgatacataatggtgtatacagtgtggactgccctctgggtcacctggaatgtgttcattatctgcttttatttggaagtaggtggactctcaaaggacaccgatctaatgacattcaatatctctgtacatcggtcatggtggagagaacatgggcctggttgtgtcagaagagtgctgcctccctcagcccatggcatgatggacgattacacgtacgtctctgtcacaggctgcatcgttgacttccagtacctggaggtcatccacagtgctgtccaaatactactctctttggtgggttttgtgtatgcctgttatgtgatcagtatttccatggaagaagaagacacatattcatgtgatctgcaagtatgcaaacatctttttatccagatgctgcaaattattgaataagcaagaattagtaagatattatcaccaaattgtcacatcagtcaagcctcatgtgcttcctaagaactgaggtgatgcattattttagagtgtcattctaaaccccagattcaacatcttcctaatctttctagtgcagtctaatatataaattttatgaaaagcataggtttttttttaaccagcagtgctctttgagaatttacattgattcctaaagattgccattgctttgtataaaatgttataaattatcttagcatcttacctggaatttccactaaattcaccaatttatgatttgtgaaatctgattttactttttgaaaattttcatgtgaatttcccattttcagtgttgtagcacctctctcttcctctaagatcctgcaagctcatcaaaagccatgatcttattataccagcagttttatttattcaatctttcaacaagtagttattgaacttctataatgtgccaggctctggagctcgccttacaccaaacagacacaatcgatccattcgaagtgtcgtaattacacattgagggaccaactagaccttttctcattgtaaacttggagcaaaagtaaattcattaaaataaatttacattatagtgccacaaaaaaatgaacagaaccagaaagcattttttacaaaaattaacagaacagtgtgatagaggggaaaaggatgtgagatcatggtgccctaccttcaatagggtggccagaaaacacctctctgaagaagcagcatttgagctgagacctgaagaacgaggagtcagtgatgcagagaacctcaggagatgccttccaatctgagaaaagaggtgtacaagcaacatggtgccggcacctgctcagcttttggaaaggactcaggaagcttttactcatgatggaaggcaaagcgggaggaggcacatcacatagcaagagtggaagcaagagagacgtcatgctcttttaagcaatcagctctcaggtgaactaatagagtgagaactcactcatttctgtggggagggcatcaagctatttataatggatccatcctcatgacacaaacactgctatctcccacctctaacactggagatgacacttgaacatgagatttggaggggacaaatatcaaaactatatcatatggtttgcagatattttcttccatccttgagttatcttttcattttgttaattgtttcctttgctgtgctgaagctttgtttaatgaaatcccatttgtct

SEQ ID NO: 157234 - DNA, 414 bp, Homo sapiens
  Payload ID: 10819
  Gene Symbol: NKAIN3
  Gene Name: Na+/K+ transporting ATPase interacting 3
  ENST ID: ENST00000524201
  CDS Start-End: 112-414
ggccgaggagcctgggccgggccgggcggggactactccggagtcaggaggcagcagcggcggaggacgaggatctctggcagtcagcgccgctcggacgccgccggcaccatgggctgctgcaccggacgctgctcgctcatctgcctctgcgcgctgcagttggtctcagcattagagaggcagatctttgacttccttggtttccagtgggcgcctattcttggaaattttctacacataatagttgtcatattgggtttgtttgggaccattcagtacagacctcgatacataatggtggacaccgatctaatgacattcaatatctctgtacatcggtcatggtggagagaacatgggcctggttgtgtcagaagagtgctgcctccctcagcccatggcatgatggac

SEQ ID NO: 157235 - DNA, 793 bp, Homo sapiens
  Payload ID: 10820
  Gene Symbol: NKAIN4
  Gene Name: Na+/K+ transporting ATPase interacting 4
  ENST ID: ENST00000370307
  CDS Start-End: 246-686
tccaactcccaccccgggccccggaccgcagctggtcgtagtggccgcggaggacggcagcttttgggggccgggcgggagaagcgtccgttcatccgcggaaccaagctgaggtcgccgccctggagaggcaggtgtttgacttcctgggctaccagtgggcgcccatcctggccaactttgtccacatcatcatcgtcatcctgggactcttcggcaccatccagtaccggctgcgctatgtcatggtgtacacgctgtgggcagccgtctgggtcacctggaacgtcttcatcatctgcttctacctggaagtcggtggcctcttaaaggacagcgagctactgaccttcagcctctcccggcatcgctcctggtggcgtgagcgctggccaggctgtctgcatgaggaggtgccagcagtgggcctcggggccccccatggccaggccctggtgtcaggtgctggctgtgccctggagcccagctatgtggaggccctacacagttgcctgcagatcctgatcgcgcttctgggctttgtctgtggctgccaggtggtcagcgtgtttacggaggaagaggacagctttgatttcattggtggatttgatccatttcctctctaccatgtcaatgaaaagccatccagtctcttgtccaagcaggtgtacttgcctgcgtaagtgaggaaacagctgatcctgctcctgtggcctccagcctcagcgaccgaccagtgacaatgacaggagctcccaggccttgggacgcgcccccacccagcaccccc

SEQ ID NO: 157236 - DNA, 1421 bp, Homo sapiens
  Payload ID: 10820
  Gene Symbol: NKAIN4
  Gene Name: Na+/K+ transporting ATPase interacting 4
  ENST ID: ENST00000370313
  CDS Start-End: 353-712
tccgtggctgtgcagcttgggtgtcctgtgctcggcttaggggcacaggcttgcgggcggacctagggacggcggaggcatcgtgtccttcctgcaggaaggaaggagcttccggcgctttcctgggaggctcgctggggccgcggagataacctgaggtcctgcaacaggctgggggcccaaggaccatcccaggccttggaacagttggtatctttcagtcgccgccctggagaggcaggtgtttgacttcctgggctaccagtgggcgcccatcctggccaactttgtccacatcatcatcgtcatcctgggactcttcggcaccatccagtaccggctgcgctatgtcatggtgtacacgctgtgggcagccgtctgggtcacctggaacgtcttcatcatctgcttctacctggaagtcggtggcctcttaaaggacagcgagctactgaccttcagcctctcccggcatcgctcctggtggcgtgagcgctggccaggctgtctgcatgaggaggtgccagcagtgggcctcggggccccccatggccaggccctggtgtcaggtgctggctgtgccctggagcccagctatgtggaggccctacacagttgcctgcagatcctgatcgcgcttctgggctttgtctgtggctgccaggtggtcagcgtgtttacggaggaagaggacagctgcctgcgtaagtgaggaaacagctgatcctgctcctgtggcctccagcctcagcgaccgaccagtgacaatgacaggagctcccaggccttgggacgcgcccccacccagcaccccccaggcggccggcagcacctgccctgggttctaagtactggacaccagccagggcggcagggcagtgccacggctggctgcagcgtcaagagagtttgtaatttcctttctcttaaaaaaaaaaaagaaaagaaaacatacaaaagaaaaggcaaaaccccacatgcccacctcctctggcaacatgggggtcacagctctgcccccaggctgtcgtctcgtcgaggagcccctccctcaggtgcccacctggggctgctggaccctcgggctgcaagcactgctgctgggatgcagcctccccaggaagtcaatgtgaggcccgagacccctcaagcggtgagggcccctgttgaacatggagggttcctaaccccaaactcgtgccagaagaacccccaccccacccaggagctgaggctgatggagccctagggtgggggctgggcttgaccaggaacagcagagccaggccccaaggcatagggcagggcacatggtggtgacgagcaggcagtactcttgtaaagggggctcttgggcaaacagtcccaaaggctcccccaggtatcatcaagttggtaaataaacaggaacatggccctca

SEQ ID NO: 157237 - DNA, 1430 bp, Homo sapiens
  Payload ID: 10820
  Gene Symbol: NKAIN4
  Gene Name: Na+/K+ transporting ATPase interacting 4
  Uniprot ID: Q8IVV8
  ENST ID: ENST00000370316
  CDS Start-End: 91-717
gggtccaggctgcggcgcgtggggagcgggcggagcgggggcgggggccgagcgcggggcacccgggggcctcctgtataggcgggcaccatgggctcctgctccggccgctgcgcgctcgtcgtcctctgcgcttttcagctggtcgccgccctggagaggcaggtgtttgacttcctgggctaccagtgggcgcccatcctggccaactttgtccacatcatcatcgtcatcctgggactcttcggcaccatccagtaccggctgcgctatgtcatggtgtacacgctgtgggcagccgtctgggtcacctggaacgtcttcatcatctgcttctacctggaagtcggtggcctcttaaaggacagcgagctactgaccttcagcctctcccggcatcgctcctggtggcgtgagcgctggccaggctgtctgcatgaggaggtgccagcagtgggcctcggggccccccatggccaggccctggtgtcaggtgctggctgtgccctggagcccagctatgtggaggccctacacagttgcctgcagatcctgatcgcgcttctgggctttgtctgtggctgccaggtggtcagcgtgtttacggaggaagaggacagctttgatttcattggtggatttgatccatttcctctctaccatgtcaatgaaaagccatccagtctcttgtccaagcaggtgtacttgcctgcgtaagtgaggaaacagctgatcctgctcctgtggcctccagcctcagcgaccgaccagtgacaatgacaggagctcccaggccttgggacgcgcccccacccagcaccccccaggcggccggcagcacctgccctgggttctaagtactggacaccagccagggcggcagggcagtgccacggctggctgcagcgtcaagagagtttgtaatttcctttctcttaaaaaaaaaaaagaaaagaaaacatacaaaagaaaaggcaaaaccccacatgcccacctcctctggcaacatgggggtcacagctctgcccccaggctgtcgtctcgtcgaggagcccctccctcaggtgcccacctggggctgctggaccctcgggctgcaagcactgctgctgggatgcagcctccccaggaagtcaatgtgaggcccgagacccctcaagcggtgagggcccctgttgaacatggagggttcctaaccccaaactcgtgccagaagaacccccaccccacccaggagctgaggctgatggagccctagggtgggggctgggcttgaccaggaacagcagagccaggccccaaggcatagggcagggcacatggtggtgacgagcaggcagtactcttgtaaagggggctcttgggcaaacagtcccaaaggctcccccaggtatcatcaagttggtaaataaacaggaacatggccctca

SEQ ID NO: 157238 - DNA, 506 bp, Homo sapiens
  Payload ID: 10820
  Gene Symbol: NKAIN4
  Gene Name: Na+/K+ transporting ATPase interacting 4
  ENST ID: ENST00000370317
  CDS Start-End: 1-504
gtctgggtcacctggaacgtcttcatcatctgcttctacctggaagtcggtggcctcttaaaggacagcgagctactgaccttcagcctctcccggcatcgctcctggtggcgtgagcgctggccaggctgtctgcatgaggaggtgccagcagtgggcctcggggccccccatggccaggccctggtgtcaggtgctggctgtgccctggagcccagctatgtggaggccctacacagttgcctgcagatcctgatcgcgaatcccagatggcttgctccacagaggaggaggaacccctggtggctgctggctggagtgggctggggccaaagcttctgggctttgtctgtggctgccaggtggtcagcgtgtttacggaggaagaggacagctttgatttcattggtggatttgatccatttcctctctaccatgtcaatgaaaagccatccagtctcttgtccaagcaggtgtacttccccacaggccagaccccactgaga

SEQ ID NO: 157239 - DNA, 4780 bp, Homo sapiens
  Payload ID: 10821
  Gene Symbol: NACAD
  Gene Name: NAC alpha domain containing
  Uniprot ID: O15069
  ENST ID: ENST00000490531
  CDS Start-End: 21-4709
ggcgggcgcacggccaggccatgcctggggaggctgcccgcgccgagctgctgctgcccgaggcggaccgacccgggccccgcacagatctgtcctgcgatgcggccgctgccaccaccatcctgggaggggaccggcgggagccctgtgctctgaccccagggcccagccacctggccctcacgttcctgcccagcaagccgggtgcccggccccagcccgagggagccagctgggatgcagggcctggtggggcaccctcggcctgggcggacccaggggagggcggcccaagccccatgctcctccctgagggcctgtcttcccaggctctgtccacggaggctcctctcccggccaccctggagccccggattgtgatgggagaggagacgtgccaggccctcctgtcacccagagctgcccggacagcgctcagggaccaggagggtgggcacgcaagcccagacccaccccccgagctgtgttctcagggtgatctttctgtgccttcccctcccccagaccctgattccttcttcacgcctccctccacccccaccaagaccacctatgccctgcttcctgcctgtgggccccacggggacgccagggactcagaggctgagctgcgggatgagctgctggactcgccccccgcctcaccctcgggctcctacattacggccgatggggacagctgggcctcttcaccctcctgttccctcagcctgctggctccggctgaagggctggacttcccctcaggctggggcctgtccccgcaggggtccatggtggatgaacgagagctgcacccagcagggaccccagagcccccgtcctctgagtccagcctctctgcagacagcagctcctcctggggccaggagggccacttcttcgacctggacttcctggccaatgacccaatgatccccgcagccctcctacccttccagggcagcctcatctttcaggtggaggcagtggaggtgacaccgctatccccagaggaagaagaagaggaggctgtggcggatcccgacccaggtggggacctggctggggagggtgaggaggacagcacgtctgcctccttcctgcagtcactgtctgacctgtccatcacggagggcatggacgaggcttttgccttccgggacgacacctctgcagcctcctctgattcagactcagcctcctacgcagaggcagatgatgagaggctgtacagcggggagccccatgcccaggccactttgctccaggacagtgtccagaagacagaggaggagagcggaggtggggccaaggggctgcaggctcaggatgggactgtgtcctgggccgtggaggctgctcctcagacctcagacagaggggcctatctgtcccagagacaggaattgatctcagaagtaacagaagagggccttgctttaggccaggagtccactgccactgtgacccctcacactctgcaggtagccccaggcctccaggtggaggtggctaccagagtgaccccacaggctggggaggaagaaacagactccaccgctggacaagaatctgctgccatggcaatgcctcagccctcccaggagggcatcagcgagatcttaggccaagagtctgtcactgcagaaaaacttccaactccacaggaagaaacaagcctcacattgtgtccagactctcctcagaacttgaaggaagaaggagggctggacctcccctctggcagaaagcctgtagctgcagccacgattgtccccaggcaggctaaagaggacctcaccttaccccaggactccgctatgacaccgcctctgcccctacaagacacagatctctcatcagccccaaagcctgtggctgcagccacgattgtgtcccagcaggctgaagagggcctcaccttaccccaggactccgttatgacaccgcctctgcccctacaagacacagaactctcgtcagccccaaagcctgtggctgcagccacgcttgtgtcccagcaggctgaagagggcctcaccttaccccaggactccgctatgacaccgcctctgcccctacaagacacagatctctcgtcagccccaaagcctgtggctgcagccacgcttgtgtcccagcaggctgaagagggcctcaccttaccccaggactccgctatgacaccgcctctgcccctacaagacacagatctctcgtcagccccaaagcctgtggctgcagccacgcttgtgtcccagcaggctgaagagggcctcaccttaccccaggactccgctatgacaccgcctctgcccctacaagacacagatctctcgtcagccccaaagcctgtggctgcagccacgattgtgtcccagcaggctgaagagggcctcaccttaccccaggactccgctatgacaccgcctctgcccctacaagacacagatctctcgtcagccccaaagcctgtggctgcagccacgattgtgtcccagcaggctgaagagggcctcaccttaccccaggactccgctatgacaccgcctctgcccctacaagacacagatctctcgtcagccccaaagcctgtggctgcagccacgcctgtgtcccagcaggctgaagagggcctcaccttaccccaggactccgctatgacaccgcctctgcccctacaagacacagatctctcgtcagccccaaagcctgtggctgcagccacgcctgtgtcccagcaggctgaagagggcctcaccttaccccaggactccgctatgacagcacctctgcctctgcaagacacaggccccacctcaggtccagagcctctggctgtggccacccctcaaaccttgcaggcagaagcaggctgtgccccagggacagagcctgtggccaccatggctcagcaggaagtaggtgaggccttaggccccaggccagcacctgaggagaagaatgcagccctccctacagtcccggagcctgcagccttggaccaggtccaacaggatgacccacagccagctgcagaagctgggacaccttgggccgcacaggaagatgcggattccactttgggcatggaggccctcagtctccctgagccggcctctggtgctggggaggaaatagcagaagccctttctaggcctggacgggaagcatgtctggaagcgcgagcgcacacaggtgatggggctaagcctgactcaccccaaaaggagaccctggaggttgagaaccagcaggaaggaggcctgaagccactggcacaggaacatggacccaggtcagcacttggaggtgcaagggaggtccccgatgcgcctcctgctgcctgccctgaggtcagccaggcccggctcctgagcccagccagggaggaaagaggcctgagtggcaagtccaccccggagcccacgcttccctcagctgtggccacagaggccagtctggactcctgcccagagtcttcagtaggggctgtgtccagtctggacagaggctgccctgacgcgcctgcccccacgtctgcaccaacctcccagcagccggagcctgtactgggtctgggcagtgttgagcaaccccacgaagtacccagtgtccttggcacccccttgctgcagcccccagaaaaccttgccaagggtcagcccagcacgcccgtggacaggcccctgggccctgacccttctgctcctggtacccttgctggggcagccctacccccactggagcccccagccccctgcctgtgccaggacccccaggaagactctgtggaagacgaggagcccccaggctctctgggcctcccaccgccccaggcaggagtccagcctgccgctgctgctgtctcaggaaccacacagcctctggggactgggccgcgagtcagcctctcgcctcactccccactcctcagccccaaggtggcctccatggatgccaaagacctggccttgcagatcttgccgccttgccaagtgcctcctccctctgggccccagagcccagctggccctcaagggctctcagcccccgagcagcaagaggatgaggacagcctggaggaagactcgcctcgggccctgggctcgggccagcattcggatagccacggggagtcatcagccgagctggacgagcaggacatcttggctcctcagaccgtgcagtgtccagcccaggccccagcaggcggcagtgaggagaccatcgccaaagccaagcagagtcgcagtgagaagaaggcccgaaaggcaatgtcaaagctgggcttgcggcagattcagggagtcaccaggatcaccatccagaagtccaagaacatcctctttgtcatcgccaagcctgatgtcttcaagagcccagcctcagacacttatgtggtctttggcgaggccaagattgaggacctgtcccagcaagtgcacaaagccgcagctgagaagtttaaggtgccctcagagccctcagccttggtccctgagtcagcacccaggccccgggtgaggctggagtgcaaggaagaggaagaggaggaggaggaagaggtggacgaggcggggctggaactgcgtgacattgagctggtgatggcgcaggccaatgtgtccagggccaaggccgtgcgggctctgagagacaaccacagtgacatcgtcaacgccatcatggaactgaccatgtagccactgaccggaagctggagccatcctacgccttccctcagctctgctactcaataaatcggtgtcccttc

SEQ ID NO: 157240 - DNA, 6899 bp, Homo sapiens
  Payload ID: 10822
  Gene Symbol: NACC2
  Gene Name: NACC family member 2, BEN and BTB (POZ) domain containing
  Uniprot ID: Q96BF6
  ENST ID: ENST00000277554
  CDS Start-End: 157-1920
aaagtccatgggagccggagcgccgggacgccaagcacttcctgccgcgggcggcgcgccgcagctgcccaggccggaccgggccgggcgcccgcagatgagccccgctagggccgccccgcgctgagagcccagccccgccgctgcccgcccgccatgtctcagatgctgcacatcgagatccccaacttcgggaacacagtgctgggctgcctgaacgagcagcgcctgctgggcctctactgcgatgtgtccatcgtggtcaagggccaggccttcaaggcccaccgggcggtgctggccgccagcagcctctacttccgcgacctgttcagcggcaacagcaagagcgccttcgagctgcccggctccgtgccgcccgcctgcttccagcagatcctgtccttctgctacacgggcaggctcaccatgacggccagcgagcagctcgtggtcatgtacacggccggcttcctgcagatccagcacatcgtggagcgcggcaccgacctcatgttcaaggtgagctcgccccactgcgactcgcagaccgctgtgatcgaggacgccggctccgagccccagagcccctgcaaccagctgcagccggccgccgccgccgcggccccctacgtcgtgtccccctcggtgcccatcccgctgctgacccgagtaaagcatgaagccatggagctgccgccggccggcccaggcctggcccccaagcgcccgctggagacggggccccgggacggcgtggcggtggccgcgggggctgcggtggcggcgggcacagcccctctcaaactgccccgtgtctcctactacggggtgcccagcctggccaccctcatccccggcatccagcagatgccctacccccagggggagcggaccagtccaggcgccagcagcctgcccaccaccgacagccccacctcgtaccacaacgaggaggacgaggaggacgacgaggcctacgacaccatggtggaggagcagtacggccagatgtacatcaaggcctccggcagctatgcagtgcaagagaagcctgagccagtgccgctggagagccgctcctgcgtcctcatccgccgcgacctcgtggccctacctgccagcctcatcagccagatcggataccgctgccatcccaagctctactcggaaggggaccccggggagaagctggagctggtggcaggctctggggtctacatcacacgcggccagctgatgaactgccacctgtgtgcaggggtgaagcataaggtcttgctgcggaggctcctggccaccttctttgacaggaacacgctggccaacagctgcgggactggcatccgctcgtccaccagcgaccccagccggaagccgctggacagccgggtcctgaacgctgtgaaattgtactgtcagaacttcgcccccagcttcaaggagagcgagatgaacgtgatcgccgcggacatgtgcaccaacgcccgccgcgttcgcaagcgctggctgcccaagatcaagtccatgctgccggagggcgtggagatgtaccgcacggtcatgggctccgccgccgccagcgtgcccctcgaccccgagttcccgcctgccgcggcacaggtgttcgagcaacgcatctacgccgagcggcggggcgacgccgccaccatcgtggctctgagaactgacgccgtgaatgttgacctgagtgccgccgccaaccccgccttcgacgccggcgaggaggtggacggggctggctcggtcatccaggaggtggccgcccccgagccgctgcccgccgatggccagagccccccacagccctttgagcagggcgggggcggccccagcaggccccagacgccggcggccgcggcccggaggccggagggcacctatgcagggaccttgtaagcggagctgggtggctgcgcgagggaccgagtactagagctgcttgcatgcgttactaatacaaacaaatgtgatcaagccacttacctactgaactgctactgttgcctgagaaaaatgtgatttttattctgcttgtatttaaaattgatgaaggaaacaaatgcattcattatactgtaaacaattaggccactggcagcctcctgcgaggaagttcccagggctcccttttgatattcacaaggtcagcctccaagtgtagcttccctcccccttcttggggagggtgggaggccgccaggcccctggtgcccagccctgccccttcctccctgcccttcctgctcctcctgcccggaagacgaagcaggggccggcggtggtctgtggcgagggggctgggctgtgcgtcactgacccttccttccttccccatggaacctctctggggcgacggggcagggctcaggctccagggcctaactcctcgtttttccttctttcggagactcggggccaggcccaccgggccttccacctgtgtggggtgtgtgcacgagtgtgtgtgtgtgcgtgtgtgtgcaggggtgtggtgagggggcagtgatggctgtggcccacccctcggggtggagaaaagggtactttactctgcccccacaccctgtccttgttctgcccgatccgtctcggctctgcagcccctcggtcccctgacccccagggcaccgctgaccccgcctggcctcccactgtcccgcccgggcccactgtgggacgtgcacagctgatgtagcacacgctgccctctgccgcctcagccactttgggattatgcttgtcttgttttttttaggttttgttgtaatttagatctatttcatatatggtttggaaactttcagactcaatagaacaaaaactttgggtgggatgggtgtccctgtccccagcccaccatggcttggggtgggtcatctgtggccgttagggtgcgtccccctgctcccccgcccagggccagggaccactcgtctcccactgggggaaaaagggggtcccgggtgggcgactagtacgtgtgaagctgagctcagggccggacctggggagcgggggactccgctcgggcaggaggcagcggccagggctgggccagggcgagagtcggtcctcccggtgctgggctccccgtctgccttgaggggtgtgcatggatggagggtgcctgaggctgcaggcaggggatgaccgggacaggcctgggctggggcagttggaggtatgggcactggtaggggacagagggttagggatcatgttggggggccagggacagtggaggaagggcccatggaagatggggctgtttggtttgaggctggagtgcttcctttgaaatttaattactgttttttaagtggtagggctcacagactgtgtgaagtcctgtgtgaagtgctggtgtggccacctacccaggtgtccctcccttttgttttggaggcctgtgtccttgtccaggggcagccctccttcccaggtgtggccagaagaaccccccatcccaagacttgaaatgtctgttgctcacctctgtccctccagaactcggcttccccatcttcacttgcaaaacaagtgcagccctgcgcccatcagcaccccctccggtgtgcacacaggccagtgagcggtggccgaccagcgcaccccactcccccaacctccacaacccatcaagcggaggccgcctccgctaggggaggaccatgtgctgcaccctggcctggggacctacagggtgtgggttagacgcattcccactgggcggctcctttctgccccgaagcccacccctgtggcgaggccctaggagacctcccgtggggccgcctctacagacagcactcagcctcctgggctgcctccagccaggcccagcacatgcctgccctccagaaaaatacgttgctttccagaaggaggtgggggaccatgggcaggcactgtggacgctaacctcggcccctccacccattcctcagggcccacgtccagggggaccaagacctgcattcctagggctgcaggtggctcagtggtgcagaggcatccagaccttctgctgaactaagaaccacccagcctagagggagcctttctctgcctcttcctcccctgtcttgggcacaggtggggttggagcccccatggggcccgctgggaacctggaccaagccttcctcggagatgggaggaagccgcggggtggagcaggggcaggtaggtgaggttgagctgcacttgagttccctctggagtttccttcatctgccccacacccaaatttgcactttaatttgaccatccctgggggcctggctgctgacagaagggctctctctgccctccactccaaagtgggtgcccccccacccttggccaggacagggagggagccgctggctgctgccggaggtggtggctgcacagaggacgcctgactgctgttcaggcccgcacaatgtcccgtgccccttcctcactcgtttgtaatcgccgtctgttttgttctgggtaaggaaggcaagagctatagataaaacttaaataataataatttaatgtgaatgggttctgagctctccctgcgccccgggcgggccaggccgagcattttgcactaatgtgtcccacggtgggcgtgagtcgggagtgtctgtggacgtgcgtggctgctgagcggacctgctgtgtgctccctccacgtcctgaatgtaccgtggggcgggggcggcggcccgggctcagaggggccttccagagtgccttagcatcctttgatcatttttcccaaggaaaccaattaagaaagccggacccttccctcctttgtttacaagatgactaattctagaatccggggttgtcctgtcctgtgagtgtgaccctgactcatccagaccctgtagagagagacgagccactcagtatttatgagatgtctgcacctttatccctaagcctgactattagcaatacgcatatcctatatagaatctattacagagctacgttatctccacaccttttgaggaggacagaagggactggaccgtgttggagctgccgcctggcaggtggtgggcctgggatctagccgcctctcctgccctgccttcctcttccccaaggggatgggcccaggaggcagctgggttgcatggagaggtccaggagggaccggaggtgtgacagatactgtgagcccggcgggccgcgcctggctgggtgcctcggtacttgaattctgtcttgttttccgcattgtgtctgtccacccgagttctctgtcgtcacttaactttgcattggatttggttgttgtactttgcccctgaatgtggacaaagctgtgggcaagaggtcagcaggacccgcctgggggtgccggcgttggtgactgcgggtcggggctcctagaacataggagccggctgcctggcctcctttctcctccaggaagagtcattctttggcatttgtgtttagagccaggaggaaggcggaaggtagggagggagggctggtccccctctgagggggctctagtgcctgaccctgacctgtcctcattcgacagctgaaactgttaagcgctggcccagtccccccaccccacccagccgtgtactgcctgggctcccctcaaagggaaatttttatggaaacatcttggcagcaagtggaaaaagatctatggcccatgaaccaactgaaaactccaagaaccctctgtctgcctctgccagcagcgagtcctaagcgcagaatccagagctcgtagctgtcctcagctgtaactactgtttcagaatgttgctgctgcatacttttgtcatgtcagccagccagctccgtgggtgagagtgtgcgtgtgcgcgtgtctgtgtgtgtgtgcgtgtctgtgtgtgcacgtctgtgcgtctgtgtgtgcgcgtctgtgcatgtgtgtgtctgtgcgtgtgtgcgtctgtgtgtgtgcgtctgtgtgcgcgtgtgtgtgcgcgtctgtgtgtatgtgtgcacgcgcgtctgtgtgcacgtgcgtgtctctgcacgcgtgtctgtgtatgtgtgcacgcgtgtgtctgtgtgtgtgcacgcgcgtgcacgtcaccaccggagcatttagggtttggtacaagatggttctaaaatggcaaaggtttttcgtgtttgtttgttttgtttctttggaaaaagaaaaggaaaggaaaatcatgcagaatcgcaagcattcagactggacgaccggctcgtattccgatcagtcgcttccattgttagcatcgtacacgattgtgatttttatgtcaaaagaagccaaaacttgcaatactatttttagcagacaaaaaaaagaactaagtataaaatgtataaatatttttgacttgaagatttggatggcactgggtgcaagtagagcatccatccttcggatggaatgtttggaaaaaagagacttttaaaaaggagacggttgttttaaagagtctgtttaggggttaaagtactgtaactcacgactgttaaaaaataaattttcctgtgctgtaaaggaaggtttcacagtaccactgagttagatttcagccacagatgcttagctttttttttttgtcttttttttaaggaggaagcctttgttttgttttcctgagccctcactctgtttttgtgctgttactcggtagagtcaagactgttactttttagccatggctgacattgtatcaataactaaaactgaaacattcaaaagcgaacagggaaaccgagggcttcaagcgtgctcagagccgtttcagacagtggaaatccatgacaaacaaaaggatgtgatcattaattgtaaagcgctttgtaaaattcacatttacaaaataataaagtcagttcaaacctaa

SEQ ID NO: 157241 - DNA, 6802 bp, Homo sapiens
  Payload ID: 10822
  Gene Symbol: NACC2
  Gene Name: NACC family member 2, BEN and BTB (POZ) domain containing
  Uniprot ID: Q96BF6
  ENST ID: ENST00000371753
  CDS Start-End: 60-1823
atgagccccgctagggccgccccgcgctgagagcccagccccgccgctgcccgcccgccatgtctcagatgctgcacatcgagatccccaacttcgggaacacagtgctgggctgcctgaacgagcagcgcctgctgggcctctactgcgatgtgtccatcgtggtcaagggccaggccttcaaggcccaccgggcggtgctggccgccagcagcctctacttccgcgacctgttcagcggcaacagcaagagcgccttcgagctgcccggctccgtgccgcccgcctgcttccagcagatcctgtccttctgctacacgggcaggctcaccatgacggccagcgagcagctcgtggtcatgtacacggccggcttcctgcagatccagcacatcgtggagcgcggcaccgacctcatgttcaaggtgagctcgccccactgcgactcgcagaccgctgtgatcgaggacgccggctccgagccccagagcccctgcaaccagctgcagccggccgccgccgccgcggccccctacgtcgtgtccccctcggtgcccatcccgctgctgacccgagtaaagcatgaagccatggagctgccgccggccggcccaggcctggcccccaagcgcccgctggagacggggccccgggacggcgtggcggtggccgcgggggctgcggtggcggcgggcacagcccctctcaaactgccccgtgtctcctactacggggtgcccagcctggccaccctcatccccggcatccagcagatgccctacccccagggggagcggaccagtccaggcgccagcagcctgcccaccaccgacagccccacctcgtaccacaacgaggaggacgaggaggacgacgaggcctacgacaccatggtggaggagcagtacggccagatgtacatcaaggcctccggcagctatgcagtgcaagagaagcctgagccagtgccgctggagagccgctcctgcgtcctcatccgccgcgacctcgtggccctacctgccagcctcatcagccagatcggataccgctgccatcccaagctctactcggaaggggaccccggggagaagctggagctggtggcaggctctggggtctacatcacacgcggccagctgatgaactgccacctgtgtgcaggggtgaagcataaggtcttgctgcggaggctcctggccaccttctttgacaggaacacgctggccaacagctgcgggactggcatccgctcgtccaccagcgaccccagccggaagccgctggacagccgggtcctgaacgctgtgaaattgtactgtcagaacttcgcccccagcttcaaggagagcgagatgaacgtgatcgccgcggacatgtgcaccaacgcccgccgcgttcgcaagcgctggctgcccaagatcaagtccatgctgccggagggcgtggagatgtaccgcacggtcatgggctccgccgccgccagcgtgcccctcgaccccgagttcccgcctgccgcggcacaggtgttcgagcaacgcatctacgccgagcggcggggcgacgccgccaccatcgtggctctgagaactgacgccgtgaatgttgacctgagtgccgccgccaaccccgccttcgacgccggcgaggaggtggacggggctggctcggtcatccaggaggtggccgcccccgagccgctgcccgccgatggccagagccccccacagccctttgagcagggcgggggcggccccagcaggccccagacgccggcggccgcggcccggaggccggagggcacctatgcagggaccttgtaagcggagctgggtggctgcgcgagggaccgagtactagagctgcttgcatgcgttactaatacaaacaaatgtgatcaagccacttacctactgaactgctactgttgcctgagaaaaatgtgatttttattctgcttgtatttaaaattgatgaaggaaacaaatgcattcattatactgtaaacaattaggccactggcagcctcctgcgaggaagttcccagggctcccttttgatattcacaaggtcagcctccaagtgtagcttccctcccccttcttggggagggtgggaggccgccaggcccctggtgcccagccctgccccttcctccctgcccttcctgctcctcctgcccggaagacgaagcaggggccggcggtggtctgtggcgagggggctgggctgtgcgtcactgacccttccttccttccccatggaacctctctggggcgacggggcagggctcaggctccagggcctaactcctcgtttttccttctttcggagactcggggccaggcccaccgggccttccacctgtgtggggtgtgtgcacgagtgtgtgtgtgtgcgtgtgtgtgcaggggtgtggtgagggggcagtgatggctgtggcccacccctcggggtggagaaaagggtactttactctgcccccacaccctgtccttgttctgcccgatccgtctcggctctgcagcccctcggtcccctgacccccagggcaccgctgaccccgcctggcctcccactgtcccgcccgggcccactgtgggacgtgcacagctgatgtagcacacgctgccctctgccgcctcagccactttgggattatgcttgtcttgttttttttaggttttgttgtaatttagatctatttcatatatggtttggaaactttcagactcaatagaacaaaaactttgggtgggatgggtgtccctgtccccagcccaccatggcttggggtgggtcatctgtggccgttagggtgcgtccccctgctcccccgcccagggccagggaccactcgtctcccactgggggaaaaagggggtcccgggtgggcgactagtacgtgtgaagctgagctcagggccggacctggggagcgggggactccgctcgggcaggaggcagcggccagggctgggccagggcgagagtcggtcctcccggtgctgggctccccgtctgccttgaggggtgtgcatggatggagggtgcctgaggctgcaggcaggggatgaccgggacaggcctgggctggggcagttggaggtatgggcactggtaggggacagagggttagggatcatgttggggggccagggacagtggaggaagggcccatggaagatggggctgtttggtttgaggctggagtgcttcctttgaaatttaattactgttttttaagtggtagggctcacagactgtgtgaagtcctgtgtgaagtgctggtgtggccacctacccaggtgtccctcccttttgttttggaggcctgtgtccttgtccaggggcagccctccttcccaggtgtggccagaagaaccccccatcccaagacttgaaatgtctgttgctcacctctgtccctccagaactcggcttccccatcttcacttgcaaaacaagtgcagccctgcgcccatcagcaccccctccggtgtgcacacaggccagtgagcggtggccgaccagcgcaccccactcccccaacctccacaacccatcaagcggaggccgcctccgctaggggaggaccatgtgctgcaccctggcctggggacctacagggtgtgggttagacgcattcccactgggcggctcctttctgccccgaagcccacccctgtggcgaggccctaggagacctcccgtggggccgcctctacagacagcactcagcctcctgggctgcctccagccaggcccagcacatgcctgccctccagaaaaatacgttgctttccagaaggaggtgggggaccatgggcaggcactgtggacgctaacctcggcccctccacccattcctcagggcccacgtccagggggaccaagacctgcattcctagggctgcaggtggctcagtggtgcagaggcatccagaccttctgctgaactaagaaccacccagcctagagggagcctttctctgcctcttcctcccctgtcttgggcacaggtggggttggagcccccatggggcccgctgggaacctggaccaagccttcctcggagatgggaggaagccgcggggtggagcaggggcaggtaggtgaggttgagctgcacttgagttccctctggagtttccttcatctgccccacacccaaatttgcactttaatttgaccatccctgggggcctggctgctgacagaagggctctctctgccctccactccaaagtgggtgcccccccacccttggccaggacagggagggagccgctggctgctgccggaggtggtggctgcacagaggacgcctgactgctgttcaggcccgcacaatgtcccgtgccccttcctcactcgtttgtaatcgccgtctgttttgttctgggtaaggaaggcaagagctatagataaaacttaaataataataatttaatgtgaatgggttctgagctctccctgcgccccgggcgggccaggccgagcattttgcactaatgtgtcccacggtgggcgtgagtcgggagtgtctgtggacgtgcgtggctgctgagcggacctgctgtgtgctccctccacgtcctgaatgtaccgtggggcgggggcggcggcccgggctcagaggggccttccagagtgccttagcatcctttgatcatttttcccaaggaaaccaattaagaaagccggacccttccctcctttgtttacaagatgactaattctagaatccggggttgtcctgtcctgtgagtgtgaccctgactcatccagaccctgtagagagagacgagccactcagtatttatgagatgtctgcacctttatccctaagcctgactattagcaatacgcatatcctatatagaatctattacagagctacgttatctccacaccttttgaggaggacagaagggactggaccgtgttggagctgccgcctggcaggtggtgggcctgggatctagccgcctctcctgccctgccttcctcttccccaaggggatgggcccaggaggcagctgggttgcatggagaggtccaggagggaccggaggtgtgacagatactgtgagcccggcgggccgcgcctggctgggtgcctcggtacttgaattctgtcttgttttccgcattgtgtctgtccacccgagttctctgtcgtcacttaactttgcattggatttggttgttgtactttgcccctgaatgtggacaaagctgtgggcaagaggtcagcaggacccgcctgggggtgccggcgttggtgactgcgggtcggggctcctagaacataggagccggctgcctggcctcctttctcctccaggaagagtcattctttggcatttgtgtttagagccaggaggaaggcggaaggtagggagggagggctggtccccctctgagggggctctagtgcctgaccctgacctgtcctcattcgacagctgaaactgttaagcgctggcccagtccccccaccccacccagccgtgtactgcctgggctcccctcaaagggaaatttttatggaaacatcttggcagcaagtggaaaaagatctatggcccatgaaccaactgaaaactccaagaaccctctgtctgcctctgccagcagcgagtcctaagcgcagaatccagagctcgtagctgtcctcagctgtaactactgtttcagaatgttgctgctgcatacttttgtcatgtcagccagccagctccgtgggtgagagtgtgcgtgtgcgcgtgtctgtgtgtgtgtgcgtgtctgtgtgtgcacgtctgtgcgtctgtgtgtgcgcgtctgtgcatgtgtgtgtctgtgcgtgtgtgcgtctgtgtgtgtgcgtctgtgtgcgcgtgtgtgtgcgcgtctgtgtgtatgtgtgcacgcgcgtctgtgtgcacgtgcgtgtctctgcacgcgtgtctgtgtatgtgtgcacgcgtgtgtctgtgtgtgtgcacgcgcgtgcacgtcaccaccggagcatttagggtttggtacaagatggttctaaaatggcaaaggtttttcgtgtttgtttgttttgtttctttggaaaaagaaaaggaaaggaaaatcatgcagaatcgcaagcattcagactggacgaccggctcgtattccgatcagtcgcttccattgttagcatcgtacacgattgtgatttttatgtcaaaagaagccaaaacttgcaatactatttttagcagacaaaaaaaagaactaagtataaaatgtataaatatttttgacttgaagatttggatggcactgggtgcaagtagagcatccatccttcggatggaatgtttggaaaaaagagacttttaaaaaggagacggttgttttaaagagtctgtttaggggttaaagtactgtaactcacgactgttaaaaaataaattttcctgtgctgtaaaggaaggtttcacagtaccactgagttagatttcagccacagatgcttagctttttttttttgtcttttttttaaggaggaagcctttgttttgttttcctgagccctcactctgtttttgtgctgttactcggtagagtcaagactgttactttttagccatggctgacattgtatcaataactaaaactgaaacattcaaaagcgaacagggaaaccgagggcttcaagcgtgctcagagccgtttcagacagtggaaatccatgacaaacaaaaggatgtgatcattaattgtaaagcgctttgtaaaattcacatttacaaaataataaagtcagttcaaacctaa

SEQ ID NO: 157242 - DNA, 3035 bp, Homo sapiens
  Payload ID: 10823
  Gene Symbol: NAALAD2
  Gene Name: N-acetylated alpha-linked acidic dipeptidase 2
  ENST ID: ENST00000321955
  CDS Start-End: 48-2171
aagctcgcgaatgtagcaggcgccccaagctcggtcctcaagaagccatggcggaatccaggggccgtctgtacctttggatgtgcttggctgctgcgctggcatctttcctgatgggatttatggtgggctggtttattaagcctctcaaagaaacgaccacttctgtgcgctatcatcaaagtatacggtggaaactggtatccgaaatgaaagctgaaaacatcaaatcatttcttcgttcttttacaaagcttcctcatctggcaggaacagaacaaaatttcttgcttgccaagaaaatccaaacccagtggaagaaatttggactagattcagccaagttggttcattatgatgtcctcttatcttaccccaatgagacaaatgccaactatatatcgattgtggatgaacatgaaactgagattttcaaaacatcataccttgaaccaccaccagatggctatgagaatgttacaaatattgtgccaccatataatgctttctcagcccaaggcatgccagagggagatcttgtatatgtgaactatgctcgcactgaagactttttcaaactagaaagagagatgggcatcaactgtactgggaagattgttattgcaagatatggaaaaatcttcagaggaaataaagttaaaaatgccatgttagcaggagccataggaatcatcttgtactcagatccagctgactactttgctcctgaggtacagccatatcccaaaggatggaatcttcctggaactgcagcccagagaggaaatgtgttaaatttgaatggtgctggtgacccactcactccaggctatccagcaaaagaatacactttcagacttgatgttgaagaaggagtgggaatcccccgaatacctgtacatcccattggatataatgatgcagaaatattattacggaaggttagaatgcatgtttataacatcaataaaattacaaggatttacaatgtagttggaactatcagaggatctgtggaacctgacaggtatgttattctgggaggtcaccgggactcctgggtatttggagctattgacccaaccagtggggttgctgttttgcaagaaattgcccggagttttggaaaactgatgagtaaaggctggagacctagaagaactatcatttttgccagctgggatgcagaagaatttggacttctgggttccacagaatgggctgaggagaatgtcaaaatactccaggagagaagcattgcttatatcaactcggattcatctatagaaggcaattatactctcagagttgactgtactccccttctttaccaattagtgtataaactgacaaaagagatccccagccctgatgatgggtttgagagtaaatcactgtatgaaagctggttggaaaaagacccttcacctgaaaataaaaatttgcctagaatcaataagctgggatctggaagtgactttgaagcttattttcagagacttggaattgcttcaggcagagcccgttacactaagaataagaaaacagataagtacagcagctacccagtgtaccacacaatttatgagacatttgaattggtagagaaattttatgaccccacatttaaaaaacaactttctgtggctcaattacgaggagcactggtatatgagcttgtggattctaaaatcattccttttaatattcaagactatgcagaagctttgaaaaactatgcagcaagtatctataatctatctaagaaacatgatcaacaattgacagaccatggagtatcatttgactccttattttctgctgtgaaaaacttctcagaggctgcttcagattttcataaacgacttatacaagttgatcttaacaatcccattgcagtgagaatgatgaatgaccaactgatgctcctggaaagagcattcatcgatcctcttggtttaccaggaaagctgttctataggcacatcatatttgctccaagtagccacaacaaatatgctggagaatcatttcctggaatctatgatgctatctttgatattgaaaataaagccaactctcgtttggcctggaaagaagtaaagaaacatatttctattgcagcttttacaattcaagcagcagcaggaactctgaaagaagtattatagaaggtctcaagtggctagccattaaaggtgttgctaaaagtctgaggataaaattcacctttctgataacttatgaagccagggtgttctaaactcttttcatgtcatgttttgattataggctttggtcttttcatctgcaaagccttttttttttgctctttaaaagttaataattatattagcaaagtgttaatctaatgaagtaaaaaactcctgtgtggcagaaagtaaaagaaaattccctaaattatagcaaggaacatgaattctcagacattgtgagtgtgggaatgtaaaatggtaaaatcacttttgaaaacagtttggcagtttcctataaagttaaacatacacttttactttaggactccagaattccacttctagttatttattcaagagaaggaaaaacaatgatcacagcaatacttgtatgcatgttcattgcaacttaaaagcgtaaaaaccccaaatgtccatccacagacgaatgtataaactgtggtatccattacacaatagactacttactactcagcaataaaaatgaagtaactttcaataaatgcaatattattggcagacattgttgaaggaaaaaagccagacaaacaactacataaaatatgtttctatttagatgaagtggcaaactaatctgtagtgttaaaaattagattagtgattgcctgggccaagtggcaggttggggaggatggctgcaaagaagtatgaggaaactttctccaatagatgagaattttccgtatcttgatctgagtggcaaattgtaaacttaaaatatatataaaatttattgtatgaaaattaagcctcaataaacgtgattataaaaaacaa

SEQ ID NO: 157243 - DNA, 1149 bp, Homo sapiens
  Payload ID: 10823
  Gene Symbol: NAALAD2
  Gene Name: N-acetylated alpha-linked acidic dipeptidase 2
  Uniprot ID: Q9Y3Q0
  ENST ID: ENST00000375944
  CDS Start-End: 22-939
aagctcggtcctcaagaagccatggcggaatccaggggccgtctgtacctttggatgtgcttggctgctgcgctggcatctttcctgatgggatttatggtgggctggtttattaagcctctcaaagaaacgaccacttctgtgcgctatcatcaaagtatacggtggaaactggtatccgaaatgaaagctgaaaacatcaaatcatttcttcgttcttttacaaagcttcctcatctggcaggaacagaacaaaatttcttgcttgccaagaaaatccaaacccagtggaagaaatttggactagattcagccaagttggttcattatgatgtcctcttatcttaccccaatgagacaaatgccaactatatatcgattgtggatgaacatgaaactgagattttcaaaacatcataccttgaaccaccaccagatggctatgagaatgttacaaatattgtgccaccatataatgctttctcagcccaaggcatgccagagggagatcttgtatatgtgaactatgctcgcactgaagactttttcaaactagaaagagagatgggcatcaactgtactgggaagattgttattgcaagatatggaaaaatcttcagaggaaataaagttaaaaatgccatgttagcaggagccataggaatcatcttgtactcagatccagctgactactttgctcctgaggtacagccatatcccaaaggatggaatcttcctggaactgcagcccagagaggaaatgtgttaaatttgaatggtgctggtgacccactcactccaggctatccagcaaaaggcacatcatatttgctccaagtagccacaacaaatatgctggagaatcatttcctggaatctatgatgctatctttgatattgaaaataaagccaactctcgtttggcctggaaagaagtaaagaaacatatttctattgcagcttttacaattcaagcagcagcaggaactctgaaagaagtattatagaaggtctcaagtggctagccattaaaggtgttgctaaaagtctgaggataaaattcacctttctgataacttatgaagccagggtgttctaaactcttttcatgtcatgttttgattataggctttggtcttttcatctgca

SEQ ID NO: 157244 - DNA, 730 bp, Homo sapiens
  Payload ID: 10823
  Gene Symbol: NAALAD2
  Gene Name: N-acetylated alpha-linked acidic dipeptidase 2
  ENST ID: ENST00000525497
  CDS Start-End: 466-730
aaaacctgaaattttgtggcacagcacctggtgagactgtgggtttgacaaatatctcaccactttatcatcaagttaaacattattcttttttattaaagcttaataattaaagcttaattctgcaagtgaaatttatatatactgctttattagtacatatatgacactttgttttcaaacattgccataacctgtttgaaggaacttgagcttcagggttacaaaactgcttctgctatgatggagaagaggaggaaaaaatgcttagataagagcaatttaacttaaatggaggaagtgtgtctatattgacaaaagtccaaagacttgttgagccagctaactgggctttttacaatggcttttcaagattgcagatgccgcctacagagacgacagtcatatttgagccccgaagctcgcgaatgtagcaggcgccccaagctcggtcctcaagaagccatggcggaatccaggggccgtctgtacctttggatgtgcttggctgctgcgctggcatctttcctgatgggatttatggtgggctggtttattaagcctctcaaagaaacgaccacttctgtgcgctatcatcaaagtatacggtggaaactggtatccgaaatgaaagctgaaaacatcaaatcatttcttcgttcttttacaaagcttcctcatctggcaggaacagaacaaaatttcttgcttgccaagaaaatccaaaccc

SEQ ID NO: 157245 - DNA, 3600 bp, Homo sapiens
  Payload ID: 10823
  Gene Symbol: NAALAD2
  Gene Name: N-acetylated alpha-linked acidic dipeptidase 2
  Uniprot ID: Q9Y3Q0
  ENST ID: ENST00000534061
  CDS Start-End: 231-2453
agttgcccgccaacaggaagaatgtctcctccctctgcagggcttcctttcccccatcgagggcccctggggaccacaggtccccagcgggtagggcggaggcgtggccttgcgaaggtcagcggaggccacccagagctcacagcctcctgccagcgcgctctctgtttctctgcagccccgaagctcgcgaatgtagcaggcgccccaagctcggtcctcaagaagccatggcggaatccaggggccgtctgtacctttggatgtgcttggctgctgcgctggcatctttcctgatgggatttatggtgggctggtttattaagcctctcaaagaaacgaccacttctgtgcgctatcatcaaagtatacggtggaaactggtatccgaaatgaaagctgaaaacatcaaatcatttcttcgttcttttacaaagcttcctcatctggcaggaacagaacaaaatttcttgcttgccaagaaaatccaaacccagtggaagaaatttggactagattcagccaagttggttcattatgatgtcctcttatcttaccccaatgagacaaatgccaactatatatcgattgtggatgaacatgaaactgagattttcaaaacatcataccttgaaccaccaccagatggctatgagaatgttacaaatattgtgccaccatataatgctttctcagcccaaggcatgccagagggagatcttgtatatgtgaactatgctcgcactgaagactttttcaaactagaaagagagatgggcatcaactgtactgggaagattgttattgcaagatatggaaaaatcttcagaggaaataaagttaaaaatgccatgttagcaggagccataggaatcatcttgtactcagatccagctgactactttgctcctgaggtacagccatatcccaaaggatggaatcttcctggaactgcagcccagagaggaaatgtgttaaatttgaatggtgctggtgacccactcactccaggctatccagcaaaagaatacactttcagacttgatgttgaagaaggagtgggaatcccccgaatacctgtacatcccattggatataatgatgcagaaatattattacgctacttgggaggaattgctccaccagataagagttggaagggagcccttaatgtgagttatagtatcggacctggctttacagggagtgattctttcaggaaggttagaatgcatgtttataacatcaataaaattacaaggatttacaatgtagttggaactatcagaggatctgtggaacctgacaggtatgttattctgggaggtcaccgggactcctgggtatttggagctattgacccaaccagtggggttgctgttttgcaagaaattgcccggagttttggaaaactgatgagtaaaggctggagacctagaagaactatcatttttgccagctgggatgcagaagaatttggacttctgggttccacagaatgggctgaggagaatgtcaaaatactccaggagagaagcattgcttatatcaactcggattcatctatagaaggcaattatactctcagagttgactgtactccccttctttaccaattagtgtataaactgacaaaagagatccccagccctgatgatgggtttgagagtaaatcactgtatgaaagctggttggaaaaagacccttcacctgaaaataaaaatttgcctagaatcaataagctgggatctggaagtgactttgaagcttattttcagagacttggaattgcttcaggcagagcccgttacactaagaataagaaaacagataagtacagcagctacccagtgtaccacacaatttatgagacatttgaattggtagagaaattttatgaccccacatttaaaaaacaactttctgtggctcaattacgaggagcactggtatatgagcttgtggattctaaaatcattccttttaatattcaagactatgcagaagctttgaaaaactatgcagcaagtatctataatctatctaagaaacatgatcaacaattgacagaccatggagtatcatttgactccttattttctgctgtgaaaaacttctcagaggctgcttcagattttcataaacgacttatacaagttgatcttaacaatcccattgcagtgagaatgatgaatgaccaactgatgctcctggaaagagcattcatcgatcctcttggtttaccaggaaagctgttctataggcacatcatatttgctccaagtagccacaacaaatatgctggagaatcatttcctggaatctatgatgctatctttgatattgaaaataaagccaactctcgtttggcctggaaagaagtaaagaaacatatttctattgcagcttttacaattcaagcagcagcaggaactctgaaagaagtattatagaaggtctcaagtggctagccattaaaggtgttgctaaaagtctgaggataaaattcacctttctgataacttatgaagccagggtgttctaaactcttttcatgtcatgttttgattataggctttggtcttttcatctgcaaagccttttttttttgctctttaaaagttaataattatattagcaaagtgttaatctaatgaagtaaaaaactcctgtgtggcagaaagtaaaagaaaattccctaaattatagcaaggaacatgaattctcagacattgtgagtgtgggaatgtaaaatggtaaaatcacttttgaaaacagtttggcagtttcctataaagttaaacatacacttttactttaggactccagaattccacttctagttatttattcaagagaaggaaaaacaatgatcacagcaatacttgtatgcatgttcattgcaacttaaaagcgtaaaaaccccaaatgtccatccacagacgaatgtataaactgtggtatccattacacaatagactacttactactcagcaataaaaatgaagtaactttcaataaatgcaatattattggcagacattgttgaaggaaaaaagccagacaaacaactacataaaatatgtttctatttagatgaagtggcaaactaatctgtagtgttaaaaattagattagtgattgcctgggccaagtggcaggttggggaggatggctgcaaagaagtatgaggaaactttctccaatagatgagaattttccgtatcttgatctgagtggcaaattgtaaacttaaaatatatataaaatttattgtatgaaaattaagcctcaataaacgtgattataaaaaacaagtctgcaaggaaaccagaatcatataccttctcttgtgaaatcaccatgaagtgtgaatggtcaggaaaaagccagtaatattcatacatttaataatttcagctctactgaataaacatataagtctgatgggtgatgaaaatagctactacaatcttcatattctaactcctataaagactgtatatcagaatctgcaaacttttatgcagatcccagtgactcaattacatgttcaactatgattaaagcttcaataaacttggttgttcatctacttca

SEQ ID NO: 157246 - DNA, 2061 bp, Homo sapiens
  Payload ID: 10823
  Gene Symbol: NAALAD2
  Gene Name: N-acetylated alpha-linked acidic dipeptidase 2
  ENST ID: ENST00000527493
  CDS Start-End: 145-996
gcgggtagggcggaggcgtggccttgcgaaggtcagcggaggccacccagagctcacagcctcctgccagcgcgctctctgtttctctgcagccccgaagctcgcgaatgtagcaggcgccccaagctcggtcctcaagaagccatggcggaatccaggggccgtctgtacctttggatgtgcttggctgctgcgctggcatctttcctgatgggatttatggtgggctggtttattaagcctctcaaagaaacgaccacttctgtgcgctatcatcaaagtatacggtggaaactggtatccgaaatgaaagctgaaaacatcaaatcatttcttcgttcttttacaaagcttcctcatctggcaggaacagaacaaaatttcttgcttgccaagaaaatccaaacccagtggaagaaatttggactagattcagccaagttggttcattatgatgtcctcttatcttaccccaatgagacaaatgccaactatatatcgattgtggatgaacatgaaactgagattttcaaaacatcataccttgaaccaccaccagatggctatgagaatgttacaaatattgtgccaccatataatgctttctcagcccaaggcatgccagagggagatcttgtatatgtgaactatgctcgcactgaagactttttcaaactagaaagagagatgggcatcaactgtactgggaagattgttattgcaagatatggaaaaatcttcagaggaaataaagttaaaaatgccatgttagcaggagccataggaatcatcttgtactcagatccagctgactactttgctcctgaggtacagccatatcccaaaggatggaatcttcctggaactgcagcccagagaggaaatgtgttaaatttgaatggtgctggtgacccactcactccaggctatccagcaaaagctacttgggaggaattgctccaccagataagagttggaagggagcccttaatgtgagttatagtatcggacctggctttacagggagtgattctttcaggaaggttagaatgcatgtttataacatcaataaaattacaaggatttacaatgtagttggaactatcagaggatctgtggaacctgacaggtatgttattctgggaggtcaccgggactcctgggtatttggagctattgacccaaccagtggggttgctgttttgcaagaaattgcccggagttttggaaaactgatgagtaaaggctggagacctagaagaactatcatttttgccagctgggatgcagaagaatttggacttctgggttccacagaatgggctgaggtaaataagacaaagaaggttcttattatttttttggtcaacagggaacaaatatgtatgtgtctcaggatgatcaaaaatatattccattacctaatatggttttgttttggagaatgactcaagacaatttaagaaatagtttatttttactttcacatcagtttggcaataaccttttagtactagactgcagacagagttattgcctcttgtcaaaatattttcgttgccatttgcatttgttttataaaaaataagaaaaatcagtaagctcagaaaataatcaaaattaatgagatatttttgatgataatttacttatctaaaaactgatacagatgcttagagctaattttcaagtttttgaagtttctttagagttcttccatctgagaaaatataagatgttctattaagatggccatatattgactatattttcacattgacagattccatttaaaatggcaaccataagtatactttagcatttacaacagatatgtgcttcattgttaagtataaagtgataattctgtgaattgaattactttaataaattgacctgctttacaatttcataggtggggttttttttcttcacatatgattgtcatttgtcactgactcttaattatttatatttaagtgtctctcctagggcccttttcttccaacttcttcctttagtctctctgtcaagtaatctctaagttcttaaatgtagaag

SEQ ID NO: 157247 - DNA, 1613 bp, Homo sapiens
  Payload ID: 10823
  Gene Symbol: NAALAD2
  Gene Name: N-acetylated alpha-linked acidic dipeptidase 2
  ENST ID: ENST00000525171
  CDS Start-End: 31-1149
aggcgccccaagctcggtcctcaagaagccatggcggaatccaggggccgtctgtacctttggatgtgcttggctgctgcgctggcatctttcctgatgggatttatggtgggctggtttattaagcctctcaaagaaacgaccacttctgtgcgctatcatcaaagtatacggtggaaactggtatccgaaatgaaagctgaaaacatcaaatcatttcttcgttcttttacaaagcttcctcatctggcaggaacagaacaaaatttcttgcttgccaagaaaatccaaacccagtggaagaaatttggactagattcagccaagttggttcattatgatgtcctcttatcttaccccaatgagacaaatgccaactatatatcgattgtggatgaacatgaaactgagattttcaaaacatcataccttgaaccaccaccagatggctatgagaatgttacaaatattgtgccaccatataatgctttctcagcccaaggcatgccagagggagatcttgtatatgtgaactatgctcgcactgaagactttttcaaactagaaagagagatgggcatcaactgtactgggaagattgttattgcaagatatggaaaaatcttcagaggaaataaagttaaaaatgccatgttagcaggagccataggaatcatcttgtactcagatccagctgactactttgctcctgaggtacagccatatcccaaaggatggaatcttcctggaactgcagcccagagaggaaatgtgttaaatttgaatggtgctggtgacccactcactccaggctatccagcaaaagacaggtatgttattctgggaggtcaccgggactcctgggtatttggagctattgacccaaccagtggggttgctgttttgcaagaaattgcccggagttttggaaaactgatgagtaaaggctggagacctagaagaactatcatttttgccagctgggatgcagaagaatttggacttctgggttccacagaatgggctgaggtaaataagacaaagaaggttcttattatttttttggtcaacagggaacaaatatgtatgtgtctcaggatgatcaaaaatatattccattacctaatatggttttgttttggagaatgactcaagacaatttaagaaatagtttatttttactttcacatcagtttggcaataaccttttagtactagactgcagacagagttattgcctcttgtcaaaatattttcgttgccatttgcatttgttttataaaaaataagaaaaatcagtaagctcagaaaataatcaaaattaatgagatatttttgatgataatttacttatctaaaaactgatacagatgcttagagctaattttcaagtttttgaagtttctttagagttcttccatctgagaaaatataagatgttctattaagatggccatatattgactatattttcacattgacagattccatttaaaatggcaaccataagtatactttagcatttacaacagatatgtgcttcattgttaagtataaagtgataattctgtgaattgaattactttaataaattgacctgctttacaatttca

SEQ ID NO: 157248 - DNA, 484 bp, Homo sapiens
  Payload ID: 10823
  Gene Symbol: NAALAD2
  Gene Name: N-acetylated alpha-linked acidic dipeptidase 2
  ENST ID: ENST00000526637
  CDS Start-End: 164-484
ttcactgagttcactaaagacaacctacagctgtcactgtctgcagggatgaaaaaaaatcgttttatttccaagcaacattagctggtttattaagcctctcaaagaaacgaccacttctgtgcgctatcatcaaagtatacggtggaaactggtatccgaaatgaaagctgaaaacatcaaatcatttcttcgttcttttacaaagcttcctcatctggcaggaacagaacaaaatttcttgcttgccaagaaaatccaaacccagtggaagaaatttggactagattcagccaagttggttcattatgatgtcctcttatcttaccccaatgagacaaatgccaactatatatcgattgtggatgaacatgaaactgagattttcaaaacatcataccttgaaccaccaccagatggctatgagaatgttacaaatattgtgccaccatataatgctttctcagcccaaggcatgccagag

SEQ ID NO: 157249 - DNA, 2271 bp, Homo sapiens
  Payload ID: 10824
  Gene Symbol: NAALADL1
  Gene Name: N-acetylated alpha-linked acidic dipeptidase-like 1
  ENST ID: ENST00000339885
  CDS Start-End: 17-2236
gccaagagtccgcaggatgcagtggacgaaggtgttggggctggggctgggggctgctgccctcttggggctggggatcatcctcggccactttgccatccccaaaaaagccaactcactggccccccaggacctggacctggagatcctggagaccgtcatggggcagctggatgcccacaggatccgggagaacctcagagaactctccagggagccacacctggcctccagccctcgggatgaggacctggtgcagctgctgctgcagcgctggaaggacccagagtcaggcctggactcggccgaggcctccacgtacgaagtgctgctgtccttccctagccaggagcagcccaacgtcgtggacatcgtgggccccactgggggcatcatccactcctgccaccggactgaggagaacgtgaccggggagcaaggggggccagatgtggtacaaccctatgctgcctatgctccttctggaaccccacagggcctcctcgtctatgccaaccggggcgcggaagaagactttaaggagctacagactcagggcatcaaacttgaaggcaccattgccctgactcgatatgggggtgtagggcgtggggccaaggctgtgaacgctgccaagcacggggtagctggggtgctggtgtacacagaccctgccgacatcaacgatgggctgagctcacccgacgaaacctttcccaactcctggtacctgcccccctcaggagtggagcgaggctcctactacgagtattttggggaccctctgactccctaccttccagccgtcccctcttccttccgcgtggaccttgccaatgtctccggatttcccccaattcctacacagcccattggcttccaggatgcaagagacctgctctgtaacctcaacggaactttggccccagccacctggcagggagcactgggctgccactacaggttgggtcccggcttccggcctgacggagacttcccagcagacagccaggtgaatgtgagcgtctacaaccgcctggagctgaggaactcttccaacgtcctgggcatcatccgtggggctgtggagcctgatcgctacgtgctgtatgggaaccaccgagacagctgggtgcacggggctgtggaccccagcagtggcaccgccgtcctcctggagctctcccgtgtcctggggaccctgctgaagaagggcacctggcgtcctcgcagatcaatcgtgtttgcgagctggggggctgaggagtttgggctcattggctccacggaattcacagaagagttcttcaacaagctgcaggagcgcacggtggcctacatcaacgtggacatctcggtgtttgccaacgctacccttagggtgcaggggacgccccctgtccagagcgtcgtcttctctgcaaccaaagagatccgctcaccaggccctggcgacctgagcatctacgacaactggatccggtacttcaaccgcagcagcccggtgtacggcctggtccccagcttgggttctctgggtgctggcagcgactatgcacccttcgttcacttcctgggcatctcctccatggacattgcctatacctatgaccggagcaagacttcagccaggatctaccccacctaccacacagcctttgacacctttgactatgtggacaagtttttggacccgggcttcagcagccatcaggctgtggcccggacagcggggagtgtgattctccggctcagtgacagcttcttcctgcccctcaaagtcagtgactacagtgagacactccgcagcttcctgcaggcagcccagcaagatcttggggccctgctggagcagcacagcatcagcctggggcctctggtgactgcagtggagaagtttgaggcagaagctgcagccttgggccaacgcatatcaacactgcagaagggcagccctgaccccctgcaggtccggatgctcaatgaccagttgatgctcttggaacggacctttctgaaccctagagccttcccagaggaacgctactacagccatgtgctctgggcacctcgcgggctccgtagtcacattccgggcctatccaatgcctgctccagggccagggacacagcttctggatctgaagcttgggctgaggtccagagacagctcagcattgtggtgacagccctggagggtgcggcagccaccctgaggcctgtggctgacctctgaccccagccctctttcttcagccctccctttactcc

SEQ ID NO: 157250 - DNA, 2376 bp, Homo sapiens
  Payload ID: 10824
  Gene Symbol: NAALADL1
  Gene Name: N-acetylated alpha-linked acidic dipeptidase-like 1
  Uniprot ID: Q9UQQ1
  ENST ID: ENST00000340252
  CDS Start-End: 1-2376
atgcagtggacgaaggtgttggggctggggctgggggctgctgccctcttggggctggggatcatcctcggccactttgccatccccaaaaaagccaactcactggccccccaggacctggacctggagatcctggagaccgtcatggggcagctggatgcccacaggatccgggagaacctcagagaactctccagggagccacacctggcctccagccctcgggatgaggacctggtgcagctgctgctgcagcgctggaaggacccagagtcaggcctggactcggccgaggcctccacgtacgaagtgctgctgtccttccctagccaggagcagcccaacgtcgtggacatcgtgggccccactgggggcatcatccactcctgccaccggactgaggagaacgtgaccggggagcaaggggggccagatgtggtacaaccctatgctgcctatgctccttctggaaccccacagggcctcctcgtctatgccaaccggggcgcggaagaagactttaaggagctacagactcagggcatcaaacttgaaggcaccattgccctgactcgatatgggggtgtagggcgtggggccaaggctgtgaacgctgccaagcacggggtagctggggtgctggtgtacacagaccctgccgacatcaacgatgggctgagctcacccgacgaaacctttcccaactcctggtacctgcccccctcaggagtggagcgaggctcctactacgagtattttggggaccctctgactccctaccttccagccgtcccctcttccttccgcgtggaccttgccaatgtctccggatttcccccaattcctacacagcccattggcttccaggatgcaagagacctgctctgtaacctcaacggaactttggccccagccacctggcagggagcactgggctgccactacaggttgggtcccggcttccggcctgacggagacttcccagcagacagccaggtgaatgtgagcgtctacaaccgcctggagctgaggaactcttccaacgtcctgggcatcatccgtggggctgtggagcctggtgagccctcctcttgctgcctgcaccccaggcccctgctctgctctggatgccgctgtcctcatccagccctgcccttgccaccacccagcccagctccccctgcccacctctccctctcctctggttctctgccccttttcctctggccagatcgctacgtgctgtatgggaaccaccgagacagctgggtgcacggggctgtggaccccagcagtggcaccgccgtcctcctggagctctcccgtgtcctggggaccctgctgaagaagggcacctggcgtcctcgcagatcaatcgtgtttgcgagctggggggctgaggagtttgggctcattggctccacggaattcacagaagagttcttcaacaagctgcaggagcgcacggtggcctacatcaacgtggacatctcggtgtttgccaacgctacccttagggtgcaggggacgccccctgtccagagcgtcgtcttctctgcaaccaaagagatccgctcaccaggccctggcgacctgagcatctacgacaactggatccggtacttcaaccgcagcagcccggtgtacggcctggtccccagcttgggttctctgggtgctggcagcgactatgcacccttcgttcacttcctgggcatctcctccatggacattgcctatacctatgaccggagcaagacttcagccaggatctaccccacctaccacacagcctttgacacctttgactatgtggacaagtttttggacccgggcttcagcagccatcaggctgtggcccggacagcggggagtgtgattctccggctcagtgacagcttcttcctgcccctcaaagtcagtgactacagtgagacactccgcagcttcctgcaggcagcccagcaagatcttggggccctgctggagcagcacagcatcagcctggggcctctggtgactgcagtggagaagtttgaggcagaagctgcagccttgggccaacgcatatcaacactgcagaagggcagccctgaccccctgcaggtccggatgctcaatgaccagttgatgctcttggaacggacctttctgaaccctagagccttcccagaggaacgctactacagccatgtgctctgggcacctcgcacgggctccgtagtcacattcccgggcctatccaatgcctgctccagggccagggacacagcttctggatctgaagcttgggctgaggtccagagacagctcagcattgtggtgacagccctggagggtgcggcagccaccctgaggcctgtggctgacctctga

SEQ ID NO: 157251 - DNA, 2100 bp, Homo sapiens
  Payload ID: 10824
  Gene Symbol: NAALADL1
  Gene Name: N-acetylated alpha-linked acidic dipeptidase-like 1
  Uniprot ID: Q9UQQ1
  ENST ID: ENST00000355721
  CDS Start-End: 1-2100
atgcagtggacgaaggtgttggggctggggctgggggctgctgccctcttggggctggggatcatcctcggccactttgccatccccaaaaaagccaactcactggccccccaggacctggacctggagatcctggagaccgtcatggggcagctggatgcccacaggatccgggagaacctcagagaactctccagggagccacacctggcctccagccctcgggatgaggacctggtgcagctgctgctgcagcgctggaaggacccagagtcaggcctggactcggccgaggcctccacgtacgaagtgctgctgtccttccctagccaggagcagcccaacgtcgtggacatcgtgggccccactgggggcatcatccactcctgccaccggactgaggagaacgtgaccggggagcaaggggggccagatgtggtacaaccctatgctgcctatgctccttctggaaccccacaggctgtgaacgctgccaagcacggggtagctggggtgctggtgtacacagaccctgccgacatcaacgatgggctgagctcacccgacgaaacctttcccaactcctggtacctgcccccctcaggagtggagcgaggctcctactacgagtattttggggaccctctgactccctaccttccagccgtcccctcttccttccgcgtggaccttgccaatgtctccggatttcccccaattcctacacagcccattggcttccaggatgcaagagacctgctctgtaacctcaacggaactttggccccagccacctggcagggagcactgggctgccactacaggttgggtcccggcttccggcctgacggagacttcccagcagacagccaggtgaatgtgagcgtctacaaccgcctggagctgaggaactcttccaacgtcctgggcatcatccgtggggctgtggagcctgatcgctacgtgctgtatgggaaccaccgagacagctgggtgcacggggctgtggaccccagcagtggcaccgccgtcctcctggagctctcccgtgtcctggggaccctgctgaagaagggcacctggcgtcctcgcagatcaatcgtgtttgcgagctggggggctgaggagtttgggctcattggctccacggaattcacagaagagttcttcaacaagctgcaggagcgcacggtggcctacatcaacgtggacatctcggtgtttgccaacgctacccttagggtgcaggggacgccccctgtccagagcgtcgtcttctctgcaaccaaagagatccgctcaccaggccctggcgacctgagcatctacgacaactggatccggtacttcaaccgcagcagcccggtgtacggcctggtccccagcttgggttctctgggtgctggcagcgactatgcacccttcgttcacttcctgggcatctcctccatggacattgcctatacctatgaccggagcaagacttcagccaggatctaccccacctaccacacagcctttgacacctttgactatgtggacaagtttttggacccgggcttcagcagccatcaggctgtggcccggacagcggggagtgtgattctccggctcagtgacagcttcttcctgcccctcaaagtcagtgactacagtgagacactccgcagcttcctgcaggcagcccagcaagatcttggggccctgctggagcagcacagcatcagcctggggcctctggtgactgcagtggagaagtttgaggcagaagctgcagccttgggccaacgcatatcaacactgcagaagggcagccctgaccccctgcaggtccggatgctcaatgaccagttgatgctcttggaacggacctttctgaaccctagagccttcccagaggaacgctactacagccatgtgctctgggcacctcgcacgggctccgtagtcacattcccgggcctatccaatgcctgctccagggccagggacacagcttctggatctgaagcttgggctgaggtccagagacagctcagcattgtggtgacagccctggagggtgcggcagccaccctgaggcctgtggctgacctctga

SEQ ID NO: 157252 - DNA, 2118 bp, Homo sapiens
  Payload ID: 10824
  Gene Symbol: NAALADL1
  Gene Name: N-acetylated alpha-linked acidic dipeptidase-like 1
  ENST ID: ENST00000356632
  CDS Start-End: 1-2118
atgcagtggacgaaggtgttggggctggggctgggggctgctgccctcttggggctggggatcatcctcggccactttgccatccccaaaaaagccaactcactggccccccaggacctggacctggagatcctggagaccgtcatggggcagctggatgcccacaggatccgggagaacctcagagaactctccagggagccacacctggcctccagccctcgggatgaggacctggtgcagctgctgctgcagcgctggaaggacccagagtcaggcctggactcggccgaggcctccacgtacgaagtgctgctgtccttccctagccaggagcagcccaacgtcgtggacatcgtgggccccactgggggcatcatccactcctgccaccggactgaggagaacgtgaccggggagcaaggggggccagatgtggtacaaccctatgctgcctatgctccttctggaaccccacagggcctcctcgtctatgccaaccggggcgcggaagaagactttaaggagctacagactcagggcatcaaacttgaaggcaccattgccctgactcgatatgggggtgtagggcgtggggccaaggctgtgaacgctgccaagcacggggtagctggggtgctggtgtacacagaccctgccgacatcaacgatgggctgagctcacccgacgaaacctttcccaactcctggtacctgcccccctcaggagtggagcgaggctcctactacgagtattttggggaccctctgactccctaccttccagccgtcccctcttccttccgcgtggaccttgccaatgtctccggatttcccccaattcctacacagcccattggcttccaggatgcaagagacctgctctgccaggtgaatgtgagcgtctacaaccgcctggagctgaggaactcttccaacgtcctgggcatcatccgtggggctgtggagcctgatcgctacgtgctgtatgggaaccaccgagacagctgggtgcacggggctgtggaccccagcagtggcaccgccgtcctcctggagctctcccgtgtcctggggaccctgctgaagaagggcacctggcgtcctcgcagatcaatcgtgtttgcgagctggggggctgaggagtttgggctcattggctccacggaattcacagaagagttcttcaacaagctgcaggagcgcacggtggcctacatcaacgtggacatctcggtgtttgccaacgctacccttagggtgcaggggacgccccctgtccagagcgtcgtcttctctgcaaccaaagagatccgctcaccaggccctggcgacctgagcatctacgacaactggatccggtacttcaaccgcagcagcccggtgtacggcctggtccccagcttgggttctctgggtgctggcagcgactatgcacccttcgttcacttcctgggcatctcctccatggacattgcctatacctatgaccggagcaagacttcagccaggatctaccccacctaccacacagcctttgacacctttgactatgtggacaagtttttggacccgggcttcagcagccatcaggctgtggcccggacagcggggagtgtgattctccggctcagtgacagcttcttcctgcccctcaaagtcagtgactacagtgagacactccgcagcttcctgcaggcagcccagcaagatcttggggccctgctggagcagcacagcatcagcctggggcctctggtgactgcagtggagaagtttgaggcagaagctgcagccttgggccaacgcatatcaacactgcagaagggcagccctgaccccctgcaggtccggatgctcaatgaccagttgatgctcttggaacggacctttctgaaccctagagccttcccagaggaacgctactacagccatgtgctctgggcacctcgcacgggctccgtagtcacattcccgggcctatccaatgcctgctccagggccagggacacagcttctggatctgaagcttgggctgaggtccagagacagctcagcattgtggtgacagccctggagggtgcggcagccaccctgaggcctgtggctgacctctga

SEQ ID NO: 157253 - DNA, 2699 bp, Homo sapiens
  Payload ID: 10824
  Gene Symbol: NAALADL1
  Gene Name: N-acetylated alpha-linked acidic dipeptidase-like 1
  Uniprot ID: Q9UQQ1
  ENST ID: ENST00000358658
  CDS Start-End: 29-2251
ctaccccagctggccaagagtccgcaggatgcagtggacgaaggtgttggggctggggctgggggctgctgccctcttggggctggggatcatcctcggccactttgccatccccaaaaaagccaactcactggccccccaggacctggacctggagatcctggagaccgtcatggggcagctggatgcccacaggatccgggagaacctcagagaactctccagggagccacacctggcctccagccctcgggatgaggacctggtgcagctgctgctgcagcgctggaaggacccagagtcaggcctggactcggccgaggcctccacgtacgaagtgctgctgtccttccctagccaggagcagcccaacgtcgtggacatcgtgggccccactgggggcatcatccactcctgccaccggactgaggagaacgtgaccggggagcaaggggggccagatgtggtacaaccctatgctgcctatgctccttctggaaccccacagggcctcctcgtctatgccaaccggggcgcggaagaagactttaaggagctacagactcagggcatcaaacttgaaggcaccattgccctgactcgatatgggggtgtagggcgtggggccaaggctgtgaacgctgccaagcacggggtagctggggtgctggtgtacacagaccctgccgacatcaacgatgggctgagctcacccgacgaaacctttcccaactcctggtacctgcccccctcaggagtggagcgaggctcctactacgagtattttggggaccctctgactccctaccttccagccgtcccctcttccttccgcgtggaccttgccaatgtctccggatttcccccaattcctacacagcccattggcttccaggatgcaagagacctgctctgtaacctcaacggaactttggccccagccacctggcagggagcactgggctgccactacaggttgggtcccggcttccggcctgacggagacttcccagcagacagccaggtgaatgtgagcgtctacaaccgcctggagctgaggaactcttccaacgtcctgggcatcatccgtggggctgtggagcctgatcgctacgtgctgtatgggaaccaccgagacagctgggtgcacggggctgtggaccccagcagtggcaccgccgtcctcctggagctctcccgtgtcctggggaccctgctgaagaagggcacctggcgtcctcgcagatcaatcgtgtttgcgagctggggggctgaggagtttgggctcattggctccacggaattcacagaagagttcttcaacaagctgcaggagcgcacggtggcctacatcaacgtggacatctcggtgtttgccaacgctacccttagggtgcaggggacgccccctgtccagagcgtcgtcttctctgcaaccaaagagatccgctcaccaggccctggcgacctgagcatctacgacaactggatccggtacttcaaccgcagcagcccggtgtacggcctggtccccagcttgggttctctgggtgctggcagcgactatgcacccttcgttcacttcctgggcatctcctccatggacattgcctatacctatgaccggagcaagacttcagccaggatctaccccacctaccacacagcctttgacacctttgactatgtggacaagtttttggacccgggcttcagcagccatcaggctgtggcccggacagcggggagtgtgattctccggctcagtgacagcttcttcctgcccctcaaagtcagtgactacagtgagacactccgcagcttcctgcaggcagcccagcaagatcttggggccctgctggagcagcacagcatcagcctggggcctctggtgactgcagtggagaagtttgaggcagaagctgcagccttgggccaacgcatatcaacactgcagaagggcagccctgaccccctgcaggtccggatgctcaatgaccagttgatgctcttggaacggacctttctgaaccctagagccttcccagaggaacgctactacagccatgtgctctgggcacctcgcacgggctccgtagtcacattcccgggcctatccaatgcctgctccagggccagggacacagcttctggatctgaagcttgggctgaggtccagagacagctcagcattgtggtgacagccctggagggtgcggcagccaccctgaggcctgtggctgacctctgaccccagccctctttcttcagccctccctttactccaaccctctcctgcctgctttcctgagatgtcctggtcttccttggtgccagaagagggcactaccacaggaccctctcaagcttctcaggcaacagcttgaggtccctgaggggagtggcaagccctaatgcaactcaccctcatcctggtgcttaggtggcagagggtgggcagcaggggacagggatgggatggcaaaaccaccaactgcccttggtggcaggtgggtggagatgggatgcgtgccaacctcagatgccaactcaggtcatcaaggccaaggaccagtggcgaaagtgagtcttggggtaccttaggccttggctagtctgcgttcctctccctgcatgctgtgtatcctaactccctacaacagcccctcaaataaatcacatctagtgactggtaccaa

SEQ ID NO: 157254 - DNA, 942 bp, Homo sapiens
  Payload ID: 10824
  Gene Symbol: NAALADL1
  Gene Name: N-acetylated alpha-linked acidic dipeptidase-like 1
  ENST ID: ENST00000530995
  CDS Start-End: 759-942
ctcccctcctcacgtcagcagcctttctcctaaggcaccctaggatcaggaggaccctgtcctccaaccctctatcccccattcccaggcacctggcgtcctcgcagatcaatcgtgtttgcgagctggggggctgaggagtttgggctcattggctccacggaattcacagaagagttcttcaacaagctgcaggagcgcacggtggcctacatcaacgtggacatctcggtgtttgccaacgctacccttagggtgcaggggacgccccctgtccagagcgtcgtcttctctgcaaccaaagagatccgctcaccaggccctggcgacctgagcatctacgacaactggatccggtacttcaaccgcagcagcccggtgtacggcctggtccccagagcaagacttcagccaggatctaccccacctaccacacagcctttgacacctttgactatgtggacaagtttttggacccgggcttcagcagccatcaggctgtggcccggacagcggggagtgtgattctccggctcagtgacagcttcttcctgcccctcaaagtcagtgactacagtgagacactccgcagcttcctgcaggcagcccagcaagatcttggggccctgctggagcagcacagcatcagcctggggcctctggtgactgcagtggagaagtttgaggcagaagctgcagccttgggccaacgcatatcaacactgcagaagggcagccctgaccccctgcaggtccggatgctcaatgaccagttgatgctcttggaacggacctttctgaaccctagagccttcccagaggaacgctactacagccatgtgctctgggcacctcgcacgggctccgtagtcacattcccgggcctatccaatgcctgctccagggccagggacacagcttctggatctgaagcttgggctg

SEQ ID NO: 157255 - DNA, 973 bp, Homo sapiens
  Payload ID: 10824
  Gene Symbol: NAALADL1
  Gene Name: N-acetylated alpha-linked acidic dipeptidase-like 1
  ENST ID: ENST00000528884
  CDS Start-End: 593-673
agcagcctttctcctaaggcaccctaggatcaggaggaccctgtcctccaaccctctatcccccattcccaggcacctggcgtcctcgcagatcaatcgtgtttgcgagctggggggctgaggagtttgggctcattggctccacggaattcacagaagagttcttcaacaagctgcaggagcgcacggtggcctacatcaacgtggacatctcggtgtttgatccgctcaccaggccctggcgacctgagcatctacgacaactggatccggtacttcaaccgcagcagcccggtgtacggcctggtccccaggcttcagcagccatcaggctgtggcccggacagcggggagtgtgattctccggctcagtgacagcttcttcctgcccctcaaagtcagtgactacagtgagacactccgcagcttcctgcaggcagcccagcaagatcttggggccctgctggagcagcacagcatcagcctggggcctctggtgactgcagtggagaagtttgaggcagaagctgcagccttgggccaacgcatatcaacactgcagaagggcagccctgaccccctgcaggtccggatgctcaatgaccagttgatgctcttggaacggacctttctgaaccctagagccttcccagaggaacgctactacaggtgagtctgtcccagagtcctgggaggtgcctccaggtggggccggacaatggctccccacctgagacgaggtggtcagcttctctgccctttagagtgcaacccagcccctgaagaagatgggaatgtaaggctcagggaggggaggaaagttgcttgagggtccctctgggagctaggactggaacccacatttcctcccccgaccgccactgctgtaagagctccctggccttcagagacaagtggacgggggtgcttttctgcctcgctgcgtacaggagctgagccagttctaggccca

SEQ ID NO: 157256 - DNA, 959 bp, Homo sapiens
  Payload ID: 10824
  Gene Symbol: NAALADL1
  Gene Name: N-acetylated alpha-linked acidic dipeptidase-like 1
  ENST ID: ENST00000526799
  CDS Start-End: 651-914
taggatcaggaggaccctgtcctccaaccctctatcccccattcccaggcacctggcgtcctcgcagatcaatcgtgtttgcgagctggggggctgaggagtttgggctcattggctccacggaattcacagaagagttcttcaacaagctgcaggagcgcacggtggcctacatcaacgtggacatctcggtgtttgatccgctcaccaggccctggcgacctgagcatctacgacaactggatccggtacttcaaccgcagcagcccggtgtacggcctggtccccagagcaagacttcagccaggatctaccccacctaccacacagcctttgacacctttgactatgtggacaagtttttggacccgggcttcagcagccatcaggctgtggcccggacagcggggagtgtgattctccggctcagtgacagcttcttcctgcccctcaaagtcagtgactacagtgagacactccgcagcttcctgcaggcagcccagcaagatcttggggccctgctggagcagcacagcatcagcctggggcctctggtgactgcagtggagaagtttgaggcagaagctgcagccttgggccaacgcatatcaacactgcagaagggcagccctgaccccctgcaggtccggatgctcaatgaccagttgatgctcttggaacggacctttctgaaccctagagccttcccagaggaacgctactacagccatgtgctctgggcacctcgcacgggctccgtagtcacattcccgggcctatccaatgcctgctccagggccagggacacagcttctggatctgaagcttgggctgaggtccagagacagctcagcattgtggtgacagccctggagggtgcggcagccaccctgaggcctgtggctgacctctgaccccagccctctttcttcagccctccctttactccaaccctctcc

SEQ ID NO: 157257 - DNA, 800 bp, Homo sapiens
  Payload ID: 10824
  Gene Symbol: NAALADL1
  Gene Name: N-acetylated alpha-linked acidic dipeptidase-like 1
  ENST ID: ENST00000526516
  CDS Start-End: 570-800
gccgcgtgcggcggacggggccgctacgggtgggcggggctggggagtggtactctctagatctgctggggctggactgaggctggggcaagcctcgtaaggactggaccacgggtgggcaggagaccggtggagaacccgccctgttgttggggctggggagggccgcgcaccgagactaaattctccttccggccagatccgctcaccaggccctggcgacctgagcatctacgacaactggatccggtacttcaaccgcagcagcccggtgtacggcctggtccccaggcttcagcagccatcaggctgtggcccggacagcggggagtgtgattctccggctcagtgacagcttcttcctgcccctcaaagtcagtgactacagtgagacactccgcagcttcctgcaggcagcccagcaagatcttggggccctgctggagcagcacagcatcagcctggggcctctggtgactgcagtggagaagtttgaggcagaagctgcagccttgggccaacgcatatcaacactgcagaagggcagccctgaccccctgcaggtccggatgctcaatgaccagttgatgctcttggaacggacctttctgaaccctagagccttcccagaggaacgctactacagccatgtgctctgggcacctcgcacgggctccgtagtcacattcccgggcctatccaatgcctgctccagggccagggacacagcttctggatctgaagcttgggctgaggtccagagacagctcagcattgtggtgacagccctggagggtgcg

SEQ ID NO: 157258 - DNA, 851 bp, Homo sapiens
  Payload ID: 10824
  Gene Symbol: NAALADL1
  Gene Name: N-acetylated alpha-linked acidic dipeptidase-like 1
  ENST ID: ENST00000533340
  CDS Start-End: 771-851
ttttcccgctctcccctcctcacgtcagcagcctttctcctaaggcaccctaggatcaggaggaccctgtcctccaaccctctatcccccattcccaggcacctggcgtcctcgcagatcaatcgtgtttgcgagctggggggctgaggagtttgggctcattggctccacggaattcacagaagtgagtggccctacagggtaggggatcgaaaggggttcccaggacagaacggcgcggggctgacgtcgcccctcgcacccgcaggagttcttcaacaagctgcaggagcgcacggtggcctacatcaacgtggacatctcggtgtttgccaacgctacccttagggtgcaggggacgccccctgtccagagcgtcgtcttctctgcaaccaaagagatccgctcaccaggccctggcgacctgagcatctacgacaactggatccggtacttcaaccgcagcagcccggtgtacggcctggtccccaggcttcagcagccatcaggctgtggcccggacagcggggagtgtgattctccggctcagtgacagcttcttcctgcccctcaaagtcagtgactacagtgagacactccgcagcttcctgcaggcagcccagcaagatcttggggccctgctggagcagcacagcatcagcctggggcctctggtgactgcagtggagaagtttgaggcagaagctgcagccttgggccaacgcatatcaacactgcagaagggcagccctgaccccctgcaggtccggatgctcaatgaccagttgatgctcttggaacggacctttctgaaccctagagccttcccagaggaacgctactacagccat

SEQ ID NO: 157259 - DNA, 690 bp, Homo sapiens
  Payload ID: 10824
  Gene Symbol: NAALADL1
  Gene Name: N-acetylated alpha-linked acidic dipeptidase-like 1
  ENST ID: ENST00000533753
  CDS Start-End: 1-297
gagacactccgcagcttcctgcaggcagcccagcaagatcttggggccctgctggagcagcacagcatcagcctggggcctctggtgactgcagtggagaagtttgaggcagaagctgcagccttgggccaacgcatatcaacactgcagaagggcagccctgaccccctgcaggtccggatgctcaatgaccagttgatgctcttggaacggacctttctgaaccctagagccttcccagaggaacgctactacagccctccctttactccaaccctctcctgcctgctttcctgagatgtcctggtcttccttggtgccagaagagggcactaccacaggaccctctcaagcttctcaggcaacagcttgaggtccctgaggggagtggcaagccctaatgcaactcaccctcatcctggtgcttaggtggcagagggtgggcagcaggggacagggatgggatggcaaaaccaccaactgcccttggtggcaggtgggtggagatgggatgcgtgccaacctcagatgccaactcaggtcatcaaggccaaggaccagtggcgaaagtgagtcttggggtaccttaggccttggctagtctgcgttcctctccctgcatgctgtgtatcctaactccctacaacagcccctcaaataaatcacatctagtgactggtaccaacaaaa

SEQ ID NO: 157260 - DNA, 563 bp, Homo sapiens
  Payload ID: 10824
  Gene Symbol: NAALADL1
  Gene Name: N-acetylated alpha-linked acidic dipeptidase-like 1
  ENST ID: ENST00000530139
  CDS Start-End: 352-563
cgtgcggcggacggggccgctacgggtgggcggggctggggagtggtactctctagatctgctggggctggactgaggctggggcaagcctcgtaaggactggaccacgggtgggcaggagaccggtggagaacccgccctgttgttggggctggggagggccgcgcaccgagactaaattctccttccggccagatccgctcaccaggccctggcgacctgagcatctacgacaactggatccggtacttcaaccgcagcagcccggtgtacggcctggtccccagcttgggttctctgggtgctggcagcgactatgcacccttcgttcacttcctgggcatctcctccatggacattgcctatacctatgaccggagcaagacttcagccaggatctaccccacctaccacacagcctttgacacctttgactatgtggacaagtttttggacccgggcttcagcagccatcaggctgtggcccggacagcggggagtgtgattctccggctcagtgacagcttcttcctgcccctcaaagtcagtgactacagtgagac

SEQ ID NO: 157261 - DNA, 566 bp, Homo sapiens
  Payload ID: 10824
  Gene Symbol: NAALADL1
  Gene Name: N-acetylated alpha-linked acidic dipeptidase-like 1
  ENST ID: ENST00000532802
  CDS Start-End: 345-566
actctctagatctgctggggctggactgaggctggggcaagcctcgtaaggactggaccacgggtgggcaggagaccggtggagaacccgccctgttgttggggctggggagggccgcgcaccgagactaaattctccttccggccagatccgctcaccaggccctggcgacctgagcatctacgacaactggatccggtacttcaaccgcagcagcccggtgtacggcctggtccccagggcctctggtgactgcagtggagaagtttgaggcagaagctgcagccttgggccaacgcatatcaacactgcagaagggcagccctgaccccctgcaggtccggatgctcaatgaccagttgatgctcttggaacggacctttctgaaccctagagccttcccagaggaacgctactacagccatgtgctctgggcacctcgcacgggctccgtagtcacattcccgggcctatccaatgcctgctccagggccagggacacagcttctggatctgaagcttgggctgaggtccagagacagctcagcattgtggtgacagccctg

SEQ ID NO: 157262 - DNA, 495 bp, Homo sapiens
  Payload ID: 10824
  Gene Symbol: NAALADL1
  Gene Name: N-acetylated alpha-linked acidic dipeptidase-like 1
  ENST ID: ENST00000533842
  CDS Start-End: 391-495
ctgaggctggggcaagcctcatccgctcaccaggccctggcgacctgagcatctacgacaactggatccggtacttcaaccgcagcagcccggtgtacggcctggtccccaggcttcagcagccatcaggctgtggcccggacagcggggagtgtgattctccggctcagtgacagcttcttcctgcccctcaaagtcagtgactacagtgagacactccgcagcttcctgcaggcagcccagcaagatcttggggccctgctggagcagcacagcatcagcctggggcctctggtgactgcagtggagaagtttgaggcagaagctgcagccttgggccaacgcatatcaacactgcagaagggcagccctgaccccctgcaggtccggatgctcaatgaccagttgatgctcttggaacggacctttctgaaccctagagccttcccagaggaacgctactacagccatgtgctctgggcacctcgcacgggc

SEQ ID NO: 157263 - DNA, 635 bp, Homo sapiens
  Payload ID: 10824
  Gene Symbol: NAALADL1
  Gene Name: N-acetylated alpha-linked acidic dipeptidase-like 1
  ENST ID: ENST00000532450
  CDS Start-End: 1-147
tcaccaggccctggcgacctgagcatctacgacaactggatccggtacttcaaccgcagcagcccggtgtacggcctggtccccaggcttcagcagccatcaggctgtggcccggacagcggggagtgtgattctccggctcagtgacagcttcttcctgcccctcaaagtcagtgactacagtgagacactccgcagcttcctgcaggcagcccagcaagatcttggggccctgctggagcagcacagcatcagcctggggcctctggtgactgcagtggagaagtttgaggcagaagctgcagccttgggccaacgcatatcaacactgcagaagggcagccctgaccccctgcaggtccggatgctcaatgaccagttgatgctcttggaacggacctttctgaaccctagagccttcccagaggaacgctactacaggtgggtggagatgggatgcgtgccaacctcagatgccaactcaggtcatcaaggccaaggaccagtggcgaaagtgagtcttggggtaccttaggccttggctagtctgcgttcctctccctgcatgctgtgtatcctaactccctacaacagcccctcaaataaatcacatctagtgactggtaccaacaaaa

SEQ ID NO: 157264 - DNA, 936 bp, Homo sapiens
  Payload ID: 10825
  Gene Symbol: NAALADL2
  Gene Name: N-acetylated alpha-linked acidic dipeptidase-like 2
  ENST ID: ENST00000414826
  CDS Start-End: 1-165
gctgaagtcatcgatgtgagttatggaatggcagatgatttaaaaaggattaggaaaataaaaaacgtaacaaatcagatcgcactcctgaaattaggaaaattgccactgctttataagatgaaagttttagacaaagccgatcaaacctcacctctctattagtgcagcccatctctgcacccctcgttgcaaaactgatctcttcgccaaaagctagaaccaaaaatgaagcgtgtagctctctagagcttccaaataatgattatactacagagagttgaattattcttgtaggataaatttctaagtacaggattgcttttgttattgctatgaagagtaatattgccttaccaacggattgttcaaattagcaatgccaacagcagcagaaataagagtcgtcagcatgcaagttcagacagtcacaaaattgaaaacagttactaatgttgttggatttgtaatgggcttgacatctccagaccggtatatcatagttggcagccatcatcacactgcacacagttataatggacaagaatgggccagtagtactgcaataatcacagcgtttatccgtgccttgatgtcaaaagttaagagagggtggagaccagaccgaactattgttttctgttcttggggaggaacagcttttggcaatattggctcatatgaatggggagaggatttcaagaaggttcttcagaaaaatgttgtggcttatattagcctccacagtcccataagggggaactctagtctgtatcctgtagcatcaccatctcttcagcaactggtagtagaggaaccttagttccaggtttgatgattagtcctcagtatatccacagagctcttatatgaagagaattcttcctcttctaacacacataataacctatgaagatattaaatattttgcccctt

SEQ ID NO: 157265 - DNA, 9865 bp, Homo sapiens
  Payload ID: 10825
  Gene Symbol: NAALADL2
  Gene Name: N-acetylated alpha-linked acidic dipeptidase-like 2
  Uniprot ID: Q58DX5
  ENST ID: ENST00000454872
  CDS Start-End: 129-2516
ttattcacagaagaaagcaggtagtatactgttacaatactacagtagaaagtcagaaggtcacaaagcttgcagggtaagtgacacaacttgaaactgcttggccctctttaaaaagaaataataaaatgggagagaatgaagcaagtttacctaacacgtctttgcaaggtaaaaagatggcctatcagaaggtccatgcagatcaaagagctccaggacactcacagtacttagacaatgatgaccttcaagccactgcccttgacttagagtgggacatggagaaggaactagaggagtctggttttgaccaattccagctagacggtgctgagaatcagaacctagggcattcagagactatagacctcaatcttgattccattcaaccagcaacttcacccaaaggaaggttccagagacttcaagaagaatctgactacattacccattatacacgatctgcaccaaagagcaatcgctgcaacttttgccacgtcttaaaaatactttgcacagccaccattttatttatttttgggattttgataggttattatgtacatacaaattgcccttcagatgctccatcttcaggaacagttgatcctcagttatatcaagagattctcaagacaatccaggcagaagatattaagaagtctttcagaaatttggtacaactatataaaaatgaagatgacatggaaatttcaaagaagattaagactcagtggacctctttgggcctagaagatgtacagtttgtaaattactctgtgctgcttgatctgccaggcccttctcccagcactgtgactctgagcagcagtggtcaatgctttcatcctaatggccagccttgcagtgaagaagccagaaaagatagcagccaagacctgctctattcatatgcagcctattctgccaaaggaactctcaaggctgaagtcatcgatgtgagttatggaatggcagatgatttaaaaaggattaggaaaataaaaaacgtaacaaatcagatcgcactcctgaaattaggaaaattgccactgctttataagctttcctcattggaaaaggctggatttggaggtgttcttctgtatatcgatccttgtgatttgccaaagactgtgaatcctagccatgataccttcatggtgtcactgaatccaggaggagacccttctacgcctggttacccaagtgtcgatgaaagttttagacaaagccgatcaaacctcacctctctattagtgcagcccatctctgcacccctcgttgcaaaactgatctcttcgccaaaagctagaaccaaaaatgaagcgtgtagctctctagagcttccaaataatgaaataagagtcgtcagcatgcaagttcagacagtcacaaaattgaaaacagttactaatgttgttggatttgtaatgggcttgacatctccagaccggtatatcatagttggcagccatcatcacactgcacacagttataatggacaagaatgggccagtagtactgcaataatcacagcgtttatccgtgccttgatgtcaaaagttaagagagggtggagaccagaccgaactattgttttctgttcttggggaggaacagcttttggcaatattggctcatatgaatggggagaggatttcaagaaggttcttcagaaaaatgttgtggcttatattagcctccacagtcccataagggggaactctagtctgtatcctgtagcatcaccatctcttcagcaactggtagtagagaaaaataatttcaactgtaccagaagagcccagtgcccagaaaccaatatcagttctatacagatacaaggtgatgctgattatttcatcaaccatcttggagttcccatcgtgcagtttgcttacgaggacatcaaaacattagagggtccaagttttctctccgaggcccgtttttctacacgagcaacaaaaattgaagaaatggatccctctttcaaccttcatgaaaccattactaagctctcaggagaagtgattttgcaaattgccaacgaacctgttctgccctttaatgcacttgatatagctttagaagttcaaaacaaccttaaaggtgatcaacccaacactcatcaactgttagccatggcgttacgcctgcgggagagtgctgaactttttcagtctgatgagatgcgacctgctaatgatcccaaggagagagcacccatccgcatccggatgctgaatgacattctccaagacatggagaaaagctttctggtaaagcaggcaccaccaggtttttatagaaacatcctctaccaccttgatgaaaagacaagccggttttcaatacttatagaggcttgggaacactgcaaaccccttgcatcaaatgagacccttcaagaagccctgtcagaggtgttgaacagcattaattcagctcaggtttacttcaaagcaggacttgatgtgttcaagagtgtcttggatgggaagaattgagaaaactctgagcatttttaaaagtttgtttacaattccacaagcaaaagctctaatttaaccagattttctgacattgaaggcttattttccccaatggctttttgacaagtataaagctattattacattgtattttttaaatgtaaatatagaaagaacattttgcacatttaatatttttcttatatctacatttctgaatatgtaaagcaagttattgaaataggacttaagaattacctattaaaaagaaatctgatatataaaaatatgtactattttaaggaaaaatttccaagaagttctggactatctttgttcctatggggagggcatataggaacacagtttattctctctgatagagctattaatgacttagtttctgtaaaagaaatggagagttgatatggttcagattaacttcactattaagtgttcaatatgaagaattcaagtattctgactgagtgattggttgacctaaaccactttgaatgtttctattttatgaaatgaagtttctcttcttaacacaactagatgtagtaatacactggttatgaaattgtatttttttaagtattaatgaaaaaagagccataagcattccaggagaaaatctcaagggagctacatagagcaatttaaatgcaaatttttttcctaacaacttacaaggtgactagctttgaaacccctaatttgcctcagttgattttctaagaatttcaggagtgatgtatgtcttaagagggagaaaaaaatatttcttattactttttctcttgtttctgttggaaacactgaagcagggactctaaaatgaaagcatctcacattggttttctttcttgtatcttttctgaaactccttgctgtaaggcagctttctcagagtactatatattttcaacagtaaagtagcagagtttctctttgaaacccaaaatgtcttctaaagaatcaaatttctatttctgcctctgacaaaaagaacttactatgaaagaaatagttgttttatcaataaaagccccttaatattatgaagaaacttttcatattttttcttctttatccttaattgtgactaagatggaaatctagaaaatattcatgcttctaagtttctgcagtgttactgtaagagagtgtctcgtctacacttcagttcttctctcatgtggaaaactaagctttttatattgacattgccattgaatagctctagcaactattattattcccccaaaccctaaaattctacctattaggtgtcaggttaaagttctaatttatctttagaaatttatgtgaaaaatggttttcctatactggataaagcaattccccttaggaaacatagcctcagagtatttcatataaattttctctatctaattcaaacatatctccccatgatacaccgccagagtgacattgcagacagtctgtgtatgtttaaattttcactttttatggatgagcataaacctagtcttagtttaaaggcaaactaaagttgaggggaaataattaatcaatactgattaattgatttataaggttcaacactgtctaccctaaataatttttatatgctcaaggcaaagcagggaatagaggcaattagctagataattcaagcagaaatccattttcatcgaaattgcctgtgtgcacatatttttagatgaaaaatgaaactaccttacaatattatttttttaaccaatgtatttgtttgcaaacatttgccatgttgaagagtgtgtataggaaaggtctagaaataaataggcttgtgcatacctaggcattcatgctctttcttcctcttcagagatcatcagaaaagaggtgggaatacacaagcaggtgcatgtaagcccaaaagctagaaagccttatatttaaccaaaggttgatgtgttcattccagttattcacttacagatgaaactaaaacaaataaaggcaagctattatcagtttggtagttcattattttagaacaaatttctaaattaatttattcccataacctacaatagcactgagaacagaaaacatgtttcttcttcattttgtttaaagattgcgtacctaggtaagtcacactgtatagataaaaaccttcttctgtattcctcacctctaaattatatgttatttgctatttgaaaactgtagttaactatggttttttattagtctattaaaagatacgtggagatattaaattatacctaaagcagacgtccaacaaattctgtacatgctgctttacatctttgcaacaaacctcttaactagcagcattatttctatagtgtgattacctgagggtgcctccaaatgtatatcatttcactcccctcccctccccacccccaatagattcaaataaataaaatcctgagcaaattaatagcaagtgttaatgtgaattggtagtaggtttaagctgttgctgagtcgtctatatgcctggtacttctcacaatctttcatacatagaattgtgcctaggaaataatgaatcataaatattctctgaagaaaatgtggtaaaggtgtaacggtgaaatttatgttcaggcagggtacacatgagatactgccctttatggaaaagcataagtctcagaatcaaaagaaagcctaataaagattctggtctaagccctgagatcttgccttcagccagagaaggcattatcaattacccccaccagatatagtaactaaacccaaagtgagtaagaaacttggacatagtcatgtatttagttagtaacaaaagcaccactggaatttaagcttctctgctttctcatgcagtatatcttgcttctccctgaggagacagggttataaatgatcttttccagtgcattcgatgtaaccagccattctgtcagatgttgcatgggctggaaacactgcttttaattcaaggctagttcattctctgactgtacctgacaaacaaaactctccccgagaattcaggcaaaggacacaaagactgggtacttgagagaaagtggggagaatccttacagaacaccagaagtcaggaagaaggacattgagcaaaatatatctgtaagagggcaagtcaggccagtgttaagtcaacaatctaaatcaccgtttctcaaaatgtgaaatttagaaagacagggctaggaatctacatcttcagcaagatttctggatgtctgttacacacactgaagtttaagaatttccaatctacgttaatcgtagtttccaagaaaacactaattgacatttctaaataaattgaagagtcataataacaagaaagacgtaaagatttgttattaatggaatcattatgagaaaagaaaagtggacccattttatctctaagaaaacaattcagttgcagcttatatttgtgcctgctacatcccaggcactggtgttttagaatttttcccatgtatccttttttttttttttttttttttttaattcccacaacaacccatttcaaaatgagaaaactaggttgagtgacttgtccacagttccaaagctaataaaaatgatgaggcatatttctcttctgggcccactgtattcagttctttgttctttacactgagtgccgaaaaaaaaaatcagactattttgattctagaaagtgagataattgaaaatgttaacatatttctccaaaactgatcagactgtggagtctgtcacttttttggtataataaaggagtttgaagaaacaaatgacatcattcctgatgatggtagcccactccaacaaaggcgtatatatgtaggcaagtttgaagatatctataagagcattaaaaggcaagtgcaccattgtggaatatcatgacgagtaggcttacaaacagtaaaaagagaccagaaaccacaagtcttacactttcattctctaaatgcttatataatttcactaaaaaaagaaaagcaggtgctgtgatttagaacaacagttttatgttatttttaaaaattcagaataaccaattgactttttaaattaaataaacgtagagcatatagtaagtttccccacaggaaagacagatgttaacaaaaataaaataaatgattatttgtgaccatgttactaatgatgaatcagcatctttgcctcaaatgaaaatctataattatttgtatgataaattggtagacctagccaaaaatgttctcatgagacattctgtgatatgtgtaattgattactccaaaaattaagctttctctgagggtaacacattgtcatctcattggtttaatgggctatttaaatgtgccttagccacacatttgcttaatagaaaggaattattttaaactaccaatccatatgttgagtggaaaggaagttggcccacatattccaataaatatatcagcaatataacagtttcatcatgggaccatggatacagtgcagggaaaaaacaaacaaacaatatttgagaaaatatatatattctgcccagccacactggtgagtttttatttcttgtatgagtttaaattgccaacttaaaaaagcctcattagaatttgctattcgaaaagaccttaaaaaccctcacagagttctaaacatcccattcattgaaaataattttcagttaagtagatttgttttgtgcacttcacaacttttaggtgacatgaatttgaagcgtagcaaaagaaatgtataaagatagccttttctggtcattaccatgtctactcaagtttctgttttctaggtacactctagcattgtaactttttccccctgagaagtaattttaagatctatcagtctcaatttaaatgatctgttaatcagccagagttttagtttcataatatcgttccattgcctgacaaagatatacacactgaagtgcctttagcagacctgggaccgtcaagaatcttgttaccctgattattgcaagatgacatatttcttaagccatttataatctcatattcgggttgaatctgaatttacaaataaaagggttaaattgaggcagtttcaagcagcatttaggaaaatgaagtggcttcaaattttagtgtttctggttacattattttgtttgaattatacaattacataattttctgtaaccaaaatggtaattttgatggattttttaaatgccaaaatccaatcatcaaggccaaagaaatgcatgattactctgatttcttatgcaccattcagtcaagacttaactcagaggcagttgattcagtgcttacatctagacaaagctttaatgagtgcagacccagcctaacagtatttcatctaatttctttgatggcttaagccaataagcactgaggtagcttttctcagaaggaaacagattttattttccaggggctaattaatatgcaccacctaagtccccaaaggatcacacaggtgcctgtatcatgccatatgtcatgtgctatattcctgcaagctcaagagattaatatacaatcattattatgaattattatgttgcattgaagttaatgtcggtcttttgttctaattaaagtacaaacgtggcatctgaatagaagcttagctagagaagtggagttagagtccctattttaatgaactacatatatttttcaatcaaaatgtgtaattatttaattatctagcctgctcagtaatcataactctccaacttcttcaaagggcctttattcaatatgttaccactcatatggtcattacttggtaagtgttttatattttgaatttcttagatgctttcagtgtatgtgctagtgttttattaatattaaaaatttttgtttacttatatatcaagctgctgcaaatggactaccttattttaaaagttagaataaaatgctattactctctaaacagaactttagcatatctgtttgataagaaatacacaaacaaaatatttttctatgctattgcaaattgtccgcaggaagcaaaatgccagatggttaagtgtagctcacataattatattccaaaggtgttataaacaattctatttagcatctgagataggtctatattaggcaatttcatgtttacatttctaacagaaaggtttaatggcaaatattccttatattctaacttgctacttggagaatatggatattctgaaaagaaaaaccctttctagaacactgtgcaggactaatttttttttaatagacatccagaaaatagcctgggcaacaaagtgagaccctgtctctcttaaaaaaaaaaaaaaaaaaaaaaaaaaaagaaaagaaaaagtagctaggcatgttggtgtgcacctttgtagtccagctactagggaggctgaggcggaagaatcatttgggcccaaaagtttgaagctgcagtgagctaaaatcatgccactgtagtccagcctgtgtaacagaacctatctcaaaaaaaggaaaagaaagtcacatgctgttgatagtagttttatatgtatttggaatgttaatatgggacacatgcatttaatactttaatcatgtattcaatgtagcagcatttagatatgtaagattttagaagtaaaatctcagtggtataacatttaaaacacagccttaaaatgaagaatagggatgagcaggagaaaatttataaattaacccagggtaaaatttggaggaaaatttttccaaataaatttgctttgattaaaaacacatatctctcaagaggtgtcccaattactaaattatgttgaactgttgtggtgtttagccttgttcaaaatgatttgattatcatctggattcagaaatcttttcattgtacagagatttcattgtcattgtcgttgttgttaactgatttttaatgatattgatttagaggcatttgtcggtagtttttaaattactatatagggttgaatgtctaatttctataatgtgtggatgcccatcagatatttagtgcattctatatttagcccaagtgtgatcacaatttattttataactttttatgtgttacttacatgactcaatatgcatcttacttaagaaattatgttgtgatctggagtgacacaaatggattgagataccacatccattaaaaatataagtgaatattttatatttaagttgtttaaatatttgcacattattgaaaacatagtactaggaaatgaaggcaccatttaacaaacgtgttctgaatcataattttcatgagtttgtacgtgaaatgttaatgtttaaaacacccattttgaaattattaaatacaggtaaaaacattgc

SEQ ID NO: 157266 - DNA, 574 bp, Homo sapiens
  Payload ID: 10825
  Gene Symbol: NAALADL2
  Gene Name: N-acetylated alpha-linked acidic dipeptidase-like 2
  ENST ID: ENST00000434257
  CDS Start-End: 230-574
ggcccggcagccgtaccgcagacgagcccgcgcccgcgccgctcaggaggctgagggaagaaaagaataatttaaatgaaatttagtttctataaagaaaacgattaaaaacaaggaaatgagcattgactattaggcacctggatgaagactgggtccagattgtcagtctcctgtaacctgcagaagccctccagttgcactaggaacattcaattgaagtaaaaagatggcctatcagaaggtccatgcagatcaaagagctccaggacactcacagtacttagacaatgatgaccttcaagccactgcccttgacttagagtgggacatggagaaggaactagaggagtctggttttgaccaattccagctagacggtgctgagaatcagaacctagggcattcagagactatagacctcaatcttgattccattcaaccagcaacttcacccaaaggaaggttccagagacttcaagaagaatctgactacattacccattatacacgatctgcaccaaagagcaatcgctgcaacttttgccacgtcttaaaaatactttgcacagcc

SEQ ID NO: 157267 - DNA, 4789 bp, Homo sapiens
  Payload ID: 10825
  Gene Symbol: NAALADL2
  Gene Name: N-acetylated alpha-linked acidic dipeptidase-like 2
  ENST ID: ENST00000614002
  CDS Start-End: 1-2352
ttcacaggtaaaaagatggcctatcagaaggtccatgcagatcaaagagctccaggacactcacagtacttagacaatgatgaccttcaagccactgcccttgacttagagtgggacatggagaaggaactagaggagtctggttttgaccaattccagctagacggtgctgagaatcagaacctagggcattcagagactatagacctcaatcttgattccattcaaccagcaacttcacccaaaggaaggttccagagacttcaagaagaatctgactacattacccattatacacgatctgcaccaaagagcaatcgctgcaacttttgccacgtcttaaaaatactttgcacagccaccattttatttatttttgggattttgataggttattatgtacatacaaattgcccttcagatgctccatcttcaggaacagttgatcctcagttatatcaagagattctcaagacaatccaggcagaagatattaagaagtctttcagaaatttggtacaactatataaaaatgaagatgacatggaaatttcaaagaagattaagactcagtggacctctttgggcctagaagatgtacagtttgtaaattactctgtgctgcttgatctgccaggcccttctcccagcactgtgactctgagcagcagtggtcaatgctttcatcctaatggccagccttgcagtgaagaagccagaaaagatagcagccaagacctgctctattcatatgcagcctattctgccaaaggaactctcaaggctgaagtcatcgatgtgagttatggaatggcagatgatttaaaaaggattaggaaaataaaaaacgtaacaaatcagatcgcactcctgaaattaggaaaattgccactgctttataagctttcctcattggaaaaggctggatttggaggtgttcttctgtatatcgatccttgtgatttgccaaagactgtgaatcctagccatgataccttcatggtgtcactgaatccaggaggagacccttctacgcctggttacccaagtgtcgatgaaagttttagacaaagccgatcaaacctcacctctctattagtgcagcccatctctgcacccctcgttgcaaaactgatctcttcgccaaaagctagaaccaaaaatgaagcgtgtagctctctagagcttccaaataatgaaataagagtcgtcagcatgcaagttcagacagtcacaaaattgaaaacagttactaatgttgttggatttgtaatgggcttgacatctccagaccggtatatcatagttggcagccatcatcacactgcacacagttataatggacaagaatgggccagtagtactgcaataatcacagcgtttatccgtgccttgatgtcaaaagttaagagagggtggagaccagaccgaactattgttttctgttcttggggaggaacagcttttggcaatattggctcatatgaatggggagaggatttcaagaaggttcttcagaaaaatgttgtggcttatattagcctccacagtcccataagggggaactctagtctgtatcctgtagcatcaccatctcttcagcaactggtagtagagaaaaataatttcaactgtaccagaagagcccagtgcccagaaaccaatatcagttctatacagatacaaggtgatgctgattatttcatcaaccatcttggagttcccatcgtgcagtttgcttacgaggacatcaaaacattagagggtccaagttttctctccgaggcccgtttttctacacgagcaacaaaaattgaagaaatggatccctctttcaaccttcatgaaaccattactaagctctcaggagaagtgattttgcaaattgccaacgaacctgttctgccctttaatgcacttgatatagctttagaagttcaaaacaaccttaaaggtgatcaacccaacactcatcaactgttagccatggcgttacgcctgcgggagagtgctgaactttttcagtctgatgagatgcgacctgctaatgatcccaaggagagagcacccatccgcatccggatgctgaatgacattctccaagacatggagaaaagctttctggtaaagcaggcaccaccaggtttttatagaaacatcctctaccaccttgatgaaaagacaagccggttttcaatacttatagaggcttgggaacactgcaaaccccttgcatcaaatgagacccttcaagaagccctgtcagaggtgttgaacagcattaattcagctcaggtttacttcaaagcaggacttgatgtgttcaagagtgtcttggatgggaagaattgagaaaactctgagcatttttaaaagtttgtttacaattccacaagcaaaagctctaatttaaccagattttctgacattgaaggcttattttccccaatggctttttgacaagtataaagctattattacattgtattttttaaatgtaaatatagaaagaacattttgcacatttaatatttttcttatatctacatttctgaatatgtaaagcaagttattgaaataggacttaagaattacctattaaaaagaaatctgatatataaaaatatgtactattttaaggaaaaatttccaagaagttctggactatctttgttcctatggggagggcatataggaacacagtttattctctctgatagagctattaatgacttagtttctgtaaaagaaatggagagttgatatggttcagattaacttcactattaagtgttcaatatgaagaattcaagtattctgactgagtgattggttgacctaaaccactttgaatgtttctattttatgaaatgaagtttctcttcttaacacaactagatgtagtaatacactggttatgaaattgtatttttttaagtattaatgaaaaaagagccataagcattccaggagaaaatctcaagggagctacatagagcaatttaaatgcaaatttttttcctaacaacttacaaggtgactagctttgaaacccctaatttgcctcagttgattttctaagaatttcaggagtgatgtatgtcttaagagggagaaaaaaatatttcttattactttttctcttgtttctgttggaaacactgaagcagggactctaaaatgaaagcatctcacattggttttctttcttgtatcttttctgaaactccttgctgtaaggcagctttctcagagtactatatattttcaacagtaaagtagcagagtttctctttgaaacccaaaatgtcttctaaagaatcaaatttctatttctgcctctgacaaaaagaacttactatgaaagaaatagttgttttatcaataaaagccccttaatattatgaagaaacttttcatattttttcttctttatccttaattgtgactaagatggaaatctagaaaatattcatgcttctaagtttctgcagtgttactgtaagagagtgtctcgtctacacttcagttcttctctcatgtggaaaactaagctttttatattgacattgccattgaatagctctagcaactattattattcccccaaaccctaaaattctacctattaggtgtcaggttaaagttctaatttatctttagaaatttatgtgaaaaatggttttcctatactggataaagcaattccccttaggaaacatagcctcagagtatttcatataaattttctctatctaattcaaacatatctccccatgatacaccgccagagtgacattgcagacagtctgtgtatgtttaaattttcactttttatggatgagcataaacctagtcttagtttaaaggcaaactaaagttgaggggaaataattaatcaatactgattaattgatttataaggttcaacactgtctaccctaaataatttttatatgctcaaggcaaagcagggaatagaggcaattagctagataattcaagcagaaatccattttcatcgaaattgcctgtgtgcacatatttttagatgaaaaatgaaactaccttacaatattatttttttaaccaatgtatttgtttgcaaacatttgccatgttgaagagtgtgtataggaaaggtctagaaataaataggcttgtgcatacctaggcattcatgctctttcttcctcttcagagatcatcagaaaagaggtgggaatacacaagcaggtgcatgtaagcccaaaagctagaaagccttatatttaaccaaaggttgatgtgttcattccagttattcacttacagatgaaactaaaacaaataaaggcaagctattatcagtttggtagttcattattttagaacaaatttctaaattaatttattcccataacctacaatagcactgagaacagaaaacatgtttcttcttcattttgtttaaagattgcgtacctaggtaagtcacactgtatagataaaaaccttcttctgtattcctcacctctaaattatatgttatttgctatttgaaaactgtagttaactatggttttttattagtctattaaaagatacgtggagatattaaattatacctaaagcagacgtccaacaaattctgtacatgctgctttacatctttgcaacaaacctcttaactagcagcattatttctatagtgtgattacctgagggtgcctccaaatgtatatcatttcactcccctcccctccccacccccaatagattcaaataaataaaatcctgagcaaattaa

SEQ ID NO: 157268 - DNA, 3694 bp, Homo sapiens
  Payload ID: 10826
  Gene Symbol: NAGA
  Gene Name: N-acetylgalactosaminidase, alpha-
  Uniprot ID: P17050
  ENST ID: ENST00000396398
  CDS Start-End: 534-1769
ctggaacgcttcggacttatcaggttaccggattcgagtcagaagcggcggcaggtctgaacgcttcggtaggataagtgcggtgggagggggctctgcggttttggggagcccagggcgggaacccggacccggctggaagtccggagcctggccgcagccccgcccctccgctctttcttggtgaccttaagccagtggctgcctttttctgagcccgggcggggccgaaggcggcccgtaggccctcgggactcccagcactgcagagggtgtgaggtctgacatccaagacacgttgtttcgtatttctgaaggaagaactgaagctccgggaagtgatggctggggatggggcgggcaacttggggaccgagtgtacgatccacgcctaaggttgagggcggccgagctagccaggcagccgtgaccccagtgcttttcagacgtttcttagcttccagagcccaacacatacagctgatacacgcagaccagatctggtcaggtcctcggaagctgagtccagagcgatgctgctgaagacagtgctcttgctgggacatgtggcccaggtgctgatgctggacaatgggctcctgcagacaccacccatgggctggctggcctgggaacgcttccgctgcaacattaactgtgatgaggacccaaagaactgcataagtgaacagctcttcatggagatggctgaccggatggcacaggatggatggcgggacatgggctacacatacctcaacattgatgactgctggatcggtggtcgcgatgccagtggccgcctgatgccggatcccaagcgcttccctcatggcattcctttcctggctgactacgttcactccctgggcctgaagttgggtatctacgcggacatgggcaacttcacctgcatgggttacccaggcaccacactggacaaggtggtccaggatgctcagaccttcgccgagtggaaggtagacatgctcaagctggatggctgcttctccacccccgaggagcgggcccaggggtaccccaagatggctgctgccctgaatgccacaggccgccccatcgccttctcctgcagctggccagcctatgaaggcggcctccccccaagggtgaactacagtctgctggcggacatctgcaacctctggcgtaactatgatgacatccaggactcctggtggagcgtgctctccatcctgaattggttcgtggagcaccaggacatactgcagccagtggccggccctgggcactggaatgaccctgacatgctgctcattgggaactttggtctcagcttagagcaatcccgggcccagatggccctgtggacggtgctggcagcccccctcttgatgtccacagacctgcgtaccatctccgcccagaacatggacattctgcagaatccactcatgatcaaaatcaaccaggatcccttaggcatccagggacgcaggattcacaaggaaaaatctctcatcgaagtgtacatgcggcctctgtccaacaaggctagcgccttagtcttcttcagctgcaggaccgatatgccttatcgctaccactcctcccttggccagctgaacttcaccgggtctgtgatatatgaggcccaggacgtctactcaggtgacatcatcagtggcctccgagatgaaaccaacttcacagtgatcatcaacccttcaggggtagtgatgtggtacctgtatcccatcaagaacctggagatgtcccagcagtgaggagctgggacatgtgacaggctgtggtggcaccactgagcctagaccatggagccttggcatgcccagggcaagtggggaggttctctgctccccaggcctgctcggtgactgaccccatcatacccaaagtgcaatctcacggccaggttctatgccctgtccaagcgtaaaccctcttggaaacttcttttggggcaattttcctgtggccttcctggcctctacttccatgtgcgcagccccacagacgttgctgagcaactcgccagcctcctgagctccatgcccatcaggactctagcctctgaccttgctgttgactctgaaatcaggatttggaagttttcgaattaggagtagagagatctgacctcttgccaggaatgcccatggatcatgtgattggcttttctacccatagagggccttgcagcctgataccacctgggagtgagggtcacaaaggagaccttggctccctcaggtcaccaataaacctgttctttaatcaagtagttgtaatatggacctggggtacctttagttagggactctggtggcactacacggggtgctggattcaaatctcacctctatggatgatgtctggcatcgtctggcccctccttttccaaagtgaccagaagattgtacttcctagagatgccagacttgcctcacacccaggagctgcccctgctgtgcctggtatgctggcagtggtgatggtgacaacacaatgaggccaagtagcaatgctcccaggtcctgcagcttgtgctctgcccagcagtgcccctggcccagcacctcagcctgctcttctctctggtggctccaccccaacccctacttcttttcctttatttctctcccaacctggctgcaaaggaggttcatattccccagatgtgtccacaaacctgtccaggagttgtgtcttaaaattgatttcctgtccctcttcctaaggacaggggtaacagtcaaagtgaaggaatgatgggttcttgcctgtcttgctttggtccgtatttcccaagccctcctcttttagccaaggctacagggcacttgtcttccctggtggctctcccctttggagagagctagtggcagagcaacctagctaggtcctccttgggctttgaatgcaggagcacccagtgccccaggccttgcactgtgctgcccaaggagtattttctgggtggatctcccatactcctcagggttctgaggtccttgtatttagggtatggtgtaaaaacttacatatgcacattttgttacatcatttaagatgattgaagctttactggttaagtatagggtcaccagagaaagttcctttccccagttgatgtcttgaggctgttgagaaacttaggacagaagcctacctcatcccaggcctgcccctccgtgcatagctctgcctttgggtcttgttcatagtgctgttcaggcaaaatggaatagtctcaggtgggaacaccttctcttgctagctccaggaaggctttgtgggaaatgagttgagaccatggacttgggagttgggggccagagttgagcctggacttgaccaattaattcccttacctttcagcccaagatagctacatgtctttacttgctgtataagttttccttttgtcctgggggtgcctgattgatcctatctcttcacccttcattctttcaacaaacatgccatctatctcccaggacatttattcccttctattcaaggccagttaggaatgcaattatttttttttttcagttaaatacagacttgtttggacgcaaggtaccctttctctttttaaaaactttttatcatgaaaactttcaaatacaaaaataaaatggtagagtgaacctccatgtacccagcatccagctccagtaaccat

SEQ ID NO: 157269 - DNA, 1869 bp, Homo sapiens
  Payload ID: 10826
  Gene Symbol: NAGA
  Gene Name: N-acetylgalactosaminidase, alpha-
  Uniprot ID: P17050
  ENST ID: ENST00000402937
  CDS Start-End: 157-1392
gccccgccctcactggaacgcttcggacttatcaggttaccggattcgagtcagaagcggcggcaggtctgaacgcttcgcttccagagcccaacacatacagctgatacacgcagaccagatctggtcaggtcctcggaagctgagtccagagcgatgctgctgaagacagtgctcttgctgggacatgtggcccaggtgctgatgctggacaatgggctcctgcagacaccacccatgggctggctggcctgggaacgcttccgctgcaacattaactgtgatgaggacccaaagaactgcataagtgaacagctcttcatggagatggctgaccggatggcacaggatggatggcgggacatgggctacacatacctcaacattgatgactgctggatcggtggtcgcgatgccagtggccgcctgatgccggatcccaagcgcttccctcatggcattcctttcctggctgactacgttcactccctgggcctgaagttgggtatctacgcggacatgggcaacttcacctgcatgggttacccaggcaccacactggacaaggtggtccaggatgctcagaccttcgccgagtggaaggtagacatgctcaagctggatggctgcttctccacccccgaggagcgggcccaggggtaccccaagatggctgctgccctgaatgccacaggccgccccatcgccttctcctgcagctggccagcctatgaaggcggcctccccccaagggtgaactacagtctgctggcggacatctgcaacctctggcgtaactatgatgacatccaggactcctggtggagcgtgctctccatcctgaattggttcgtggagcaccaggacatactgcagccagtggccggccctgggcactggaatgaccctgacatgctgctcattgggaactttggtctcagcttagagcaatcccgggcccagatggccctgtggacggtgctggcagcccccctcttgatgtccacagacctgcgtaccatctccgcccagaacatggacattctgcagaatccactcatgatcaaaatcaaccaggatcccttaggcatccagggacgcaggattcacaaggaaaaatctctcatcgaagtgtacatgcggcctctgtccaacaaggctagcgccttagtcttcttcagctgcaggaccgatatgccttatcgctaccactcctcccttggccagctgaacttcaccgggtctgtgatatatgaggcccaggacgtctactcaggtgacatcatcagtggcctccgagatgaaaccaacttcacagtgatcatcaacccttcaggggtagtgatgtggtacctgtatcccatcaagaacctggagatgtcccagcagtgaggagctgggacatgtgacaggctgtggtggcaccactgagcctagaccatggagccttggcatgcccagggcaagtggggaggttctctgctccccaggcctgctcggtgactgaccccatcatacccaaagtgcaatctcacggccaggttctatgccctgtccaagcgtaaaccctcttggaaacttcttttggggcaattttcctgtggccttcctggcctctacttccatgtgcgcagccccacagacgttgctgagcaactcgccagcctcctgagctccatgcccatcaggactctagcctctgaccttgctgttgactctgaaatcaggatttggaagttttcgaattaggagtagagagatctgacctcttgccaggaatgcccatggatcatgtgattggcttttctacccatagagggccttgcagcctgataccacctgggagtgagggtcacaaaggagaccttg

SEQ ID NO: 157270 - DNA, 1856 bp, Homo sapiens
  Payload ID: 10826
  Gene Symbol: NAGA
  Gene Name: N-acetylgalactosaminidase, alpha-
  Uniprot ID: P17050
  ENST ID: ENST00000403363
  CDS Start-End: 138-1373
ctggaacgcttcggacttatcaggttaccggattcgagtcagaagcggcggcaggtctgaacgcttcgagcccaacacatacagctgatacacgcagaccagatctggtcaggtcctcggaagctgagtccagagcgatgctgctgaagacagtgctcttgctgggacatgtggcccaggtgctgatgctggacaatgggctcctgcagacaccacccatgggctggctggcctgggaacgcttccgctgcaacattaactgtgatgaggacccaaagaactgcataagtgaacagctcttcatggagatggctgaccggatggcacaggatggatggcgggacatgggctacacatacctcaacattgatgactgctggatcggtggtcgcgatgccagtggccgcctgatgccggatcccaagcgcttccctcatggcattcctttcctggctgactacgttcactccctgggcctgaagttgggtatctacgcggacatgggcaacttcacctgcatgggttacccaggcaccacactggacaaggtggtccaggatgctcagaccttcgccgagtggaaggtagacatgctcaagctggatggctgcttctccacccccgaggagcgggcccaggggtaccccaagatggctgctgccctgaatgccacaggccgccccatcgccttctcctgcagctggccagcctatgaaggcggcctccccccaagggtgaactacagtctgctggcggacatctgcaacctctggcgtaactatgatgacatccaggactcctggtggagcgtgctctccatcctgaattggttcgtggagcaccaggacatactgcagccagtggccggccctgggcactggaatgaccctgacatgctgctcattgggaactttggtctcagcttagagcaatcccgggcccagatggccctgtggacggtgctggcagcccccctcttgatgtccacagacctgcgtaccatctccgcccagaacatggacattctgcagaatccactcatgatcaaaatcaaccaggatcccttaggcatccagggacgcaggattcacaaggaaaaatctctcatcgaagtgtacatgcggcctctgtccaacaaggctagcgccttagtcttcttcagctgcaggaccgatatgccttatcgctaccactcctcccttggccagctgaacttcaccgggtctgtgatatatgaggcccaggacgtctactcaggtgacatcatcagtggcctccgagatgaaaccaacttcacagtgatcatcaacccttcaggggtagtgatgtggtacctgtatcccatcaagaacctggagatgtcccagcagtgaggagctgggacatgtgacaggctgtggtggcaccactgagcctagaccatggagccttggcatgcccagggcaagtggggaggttctctgctccccaggcctgctcggtgactgaccccatcatacccaaagtgcaatctcacggccaggttctatgccctgtccaagcgtaaaccctcttggaaacttcttttggggcaattttcctgtggccttcctggcctctacttccatgtgcgcagccccacagacgttgctgagcaactcgccagcctcctgagctccatgcccatcaggactctagcctctgaccttgctgttgactctgaaatcaggatttggaagttttcgaattaggagtagagagatctgacctcttgccaggaatgcccatggatcatgtgattggcttttctacccatagagggccttgcagcctgataccacctgggagtgagggtcacaaaggagaccttggctccc

SEQ ID NO: 157271 - DNA, 1154 bp, Homo sapiens
  Payload ID: 10827
  Gene Symbol: NAGK
  Gene Name: N-acetylglucosamine kinase
  Uniprot ID: Q9UJ70
  ENST ID: ENST00000244204
  CDS Start-End: 63-1097
gaaggaggtgtcaggcggggagagacgcaaacggcgggaccagcagcgacggtagcagcagcatggccgcgatctatgggggtgtagaggggggaggcacacgatccgaggtccttttagtctcagaggatgggaagatcctggcagaagcagatggactgagcacaaaccactggctgatcgggacagacaagtgtgtggagaggatcaatgagatggtgaacagggccaaacggaaagcaggggtggatcctctggtaccgctgcgaagcttgggcctatctctgagcggtggggaccaggaggacgcggggaggatcctgatcgaggagctgagggaccgatttccctacctgagtgaaagctacttaatcaccaccgatgccgccggctccatcgccacagctacaccggatggtggagttgtgctcatatctggaacaggctccaactgcaggctcatcaaccctgatggctccgagagtggctgcggcggctggggccatatgatgggtgatgagggttcagcctactggatcgcacaccaagcagtgaaaatagtgtttgactccattgacaacctagaggcggctcctcatgatatcggctacgtcaaacaggccatgttccactatttccaggtgccagatcggctagggatactcactcacctgtatagggactttgataaatgcaggtttgctgggttttgccggaaaattgcagaaggtgctcagcagggagaccccctttcccgctatatcttcaggaaggctggggagatgctgggcagacacatcgtagcagtgttgcccgagattgacccggtcttgttccagggcaagattggactccccatcctgtgcgtgggctctgtgtggaagagctgggagctgctgaaggaaggttttcttctggcgctgacccagggcagagagatccaggctcagaacttcttctccagcttcaccctgatgaagctgaggcactcctccgctctgggtggggccagcctaggggccaggcacatcgggcacctcctccccatggactatagcgccaatgccattgccttctattcctacaccttttcctagggggctggtcccggctccaccccctccaagctcagtggacactgggtctgaaaggaa

SEQ ID NO: 157272 - DNA, 1778 bp, Homo sapiens
  Payload ID: 10827
  Gene Symbol: NAGK
  Gene Name: N-acetylglucosamine kinase
  Uniprot ID: Q9UJ70
  ENST ID: ENST00000455662
  CDS Start-End: 246-1418
actgccagcaacttccgggcgtttacaggcaggcaggtcagtgatgtgtcctaagggtccgaccgacctagatacccctctttgattcctcctcttgggattagtgtccatctctggaagcaggatccaggaggacgggaggggccgctgcggaccgcagtcgctccacctggaggagacaccagaaggaagacagcctgagggacgcagccatccccggctcctaccggcgccccgccccgcgcatgcgcacgcgcacagggagtcagctggctgcgcgggaggtcacgggaagtggggcggtgcccagacagctggagggaaggaggtgtcaggcggggagagacgcaaacggcgggaccagcagcgacggtagcagcagcatggccgcgatctatgggggtgtagaggggggaggcacacgatccgaggtccttttagtctcagaggatgggaagatcctggcagaagcagatggactgagcacaaaccactggctgatcgggacagacaagtgtgtggagaggatcaatgagatggtgaacagggccaaacggaaagcaggggtggatcctctggtaccgctgcgaagcttgggcctatctctgagcggtggggaccaggaggacgcggggaggatcctgatcgaggagctgagggaccgatttccctacctgagtgaaagctacttaatcaccaccgatgccgccggctccatcgccacagctacaccggatggtggagttgtgctcatatctggaacaggctccaactgcaggctcatcaaccctgatggctccgagagtggctgcggcggctggggccatatgatgggtgatgagggttcagcctactggatcgcacaccaagcagtgaaaatagtgtttgactccattgacaacctagaggcggctcctcatgatatcggctacgtcaaacaggccatgttccactatttccaggtgccagatcggctagggatactcactcacctgtatagggactttgataaatgcaggtttgctgggttttgccggaaaattgcagaaggtgctcagcagggagaccccctttcccgctatatcttcaggaaggctggggagatgctgggcagacacatcgtagcagtgttgcccgagattgacccggtcttgttccagggcaagattggactccccatcctgtgcgtgggctctgtgtggaagagctgggagctgctgaaggaaggttttcttctggcgctgacccagggcagagagatccaggctcagaacttcttctccagcttcaccctgatgaagctgaggcactcctccgctctgggtggggccagcctaggggccaggcacatcgggcacctcctccccatggactatagcgccaatgccattgccttctattcctacaccttttcctagggggctggtcccggctccaccccctccaagctcagtggacactgggtctgaaaggaaggagtcttttgcttcctttctcctttttacaaaaacaaacatagaagaaaataaatgcactttatccactccccaattggactgcattatcaaacacatgtgctatgtacatcctcagtgcacctgccagcagatatcctggagggctcatgagtgaatttagtccaagatttaaagccctgcccccaggtgctcagcctgtgatctgtatccactcagcatgcacttgggcagatgatttgtctgtgtgctacccttccccccatattaccatacatatgcactgtgtggctgccagttaat

SEQ ID NO: 157273 - DNA, 2343 bp, Homo sapiens
  Payload ID: 10827
  Gene Symbol: NAGK
  Gene Name: N-acetylglucosamine kinase
  ENST ID: ENST00000418807
  CDS Start-End: 165-1046
acgggaagtggggcggtgcccagacagctggagggaaggaggtgtcaggcggggagagacgcaaacggcgggaccagcagcgacggtagcagcagcatggccgcgatctatgggggtgtagagggctgatcgggacagacaagtgtgtggagaggatcaatgagatggtgaacagggccaaacggaaagcaggggtggatcctctggtaccgctgcgaagcttgggcctatctctgagcggtggggaccaggaggacgcggggaggatcctgatcgaggagctgagggaccgatttccctacctgagtgaaagctacttaatcaccaccgatgccgccggctccatcgccacagctacaccggatggtggagttgtgctcatatctggaacaggctccaactgcaggctcatcaaccctgatggctccgagagtggctgcggcggctggggccatatgatgggtgatgagggttcagcctactggatcgcacaccaagcagtgaaaatagtgtttgactccattgacaacctagaggcggctcctcatgatatcggctacgtcaaacaggccatgttccactatttccaggtgccagatcggctagggatactcactcacctgtatagggactttgataaatgcaggtttgctgggttttgccggaaaattgcagaaggtgctcagcagggagaccccctttcccgctatatcttcaggaaggctggggagatgctgggcagacacatcgtagcagtgttgcccgagattgacccggtcttgttccagggcaagattggactccccatcctgtgcgtgggctctgtgtggaagagctgggagctgctgaaggaaggttttcttctggcgctgacccagggcagagagatccaggctcagaacttcttctccagcttcaccctgatgaagctgaggcactcctccgctctgggtggggccagcctaggggccaggcacatcgggcacctcctccccatggactatagcgccaatgccattgccttctattcctacaccttttcctagggggctggtcccggctccaccccctccaagctcagtggacactgggtctgaaaggaaggagtcttttgcttcctttctcctttttacaaaaacaaacatagaagaaaataaatgcactttatccactccccaattggactgcattatcaaacacatgtgctatgtacatcctcagtgcacctgccagcagatatcctggagggctcatgagtgaatttagtccaagatttaaagccctgcccccaggtgctcagcctgtgatctgtatccactcagcatgcacttgggcagatgatttgtctgtgtgctacccttccccccatattaccatacatatgcactgtgtggctgccagttaatctgtgacctgttttctcctgtcgtgtcaagtgggtaacgatccctggcgaccacagtcagcagaaacaagtgctcaccattcagaacatcacagggagtaaccttaggtatatcacaccctctcctgagactcccagcaagatttaggggctagagtacaattctagactgggagcatctttacctcactggatttagtaactgcaggtaagcaggacattttgaagtttttcctatgaatgagtttttgaaaggttatgaggatggctgagatccaagaagaccaactaggtaccgctcacctcggtagctgacctattcctggctactactagcctggctctgcttacagcgtgacactatgtgttgtgtgttcctgggaatgaggagcatcagtgaagagcagacatgattcctgccctctgggtaccatagttcagccagtgaaggcaaacctgaagcttcggttccacagcctgtgctgcttggtgaagactaaggacaggagtctcgatccacaatagctgcctctccaggtgttttattagaggcatgtggatcatgtcctgcacatcagttctccaacttacagacatcagttattctagagtttgttttaaaacacggttttggccgggcacggtggctcacgcctgtaatcccagcactttgggaggccgaggcaggtggatcacgaggtcaggagattgagaccatcctggctaacacggtgaaactccatctctactaaaaaatacaaaaaattaaccgggcgtggtgtcgcgcgcctgtagtcccagctactggggaggctgaggcaggagaatggcatgaacccaggaggtggagcttgcagtgagccgaggtcgcaccactgcactccagcctgggcgacagagcgagactctgcctcaaaaaataataaataaaaataaaa

SEQ ID NO: 157274 - DNA, 1833 bp, Homo sapiens
  Payload ID: 10827
  Gene Symbol: NAGK
  Gene Name: N-acetylglucosamine kinase
  ENST ID: ENST00000450272
  CDS Start-End: 38-517
cgcaaacggcgggaccagcagcgacggtagcagcagcatggccgcgatctatgggggtgtagaggggggaggcacacgatccgaggtccttttagtctcagaggatgggaagatcctggcagaagcagatggactgagcacaaaccactggctgatcgggacagacaagtgtgtggagaggatcaatgagatggtgaacagggccaaacggaaagcaggggtggatcctctggtaccgctgcgaagcttgggcctatctctgagcggtggggaccaggaggacgcggggaggatcctgatcgaggagctgagggaccgatttccctacctgagtgaaagctacttaatcaccaccgatgccgccggctccatcgccacagctacaccggatggtggagttgtgctcatatctggaacaggctccaactgcaggctcatcaaccctgatggctccgagagtggctgcggcggctggggccatatgatgggtgatgagggttcagccttggctcactgagcccttggggcttcctggggacaactcctgaacctggccattccatgtgcaggatcatgactgagatcatagaggtgcaaatgctggacgagctgctgaccctgctctccagcagtgacttgcacccaggactcagattcatccctcagcacaggggcctgcctgtgttgacttgctgtccttagggaggagttgaaactgagggtaaggccatagatgccaggagatgccataccagtctgctaggggaaagggtgtagaagcccttccaacatcacctctctctaggtagtgtgtgtttattttcataggggcccttgaggtccagttcatggcagtgactccggtggtatttgtgacaacagactgaccttgccttatccttgggtaggagctggtgtgacacagcctcacctattctgttttccccctccaactttcccttatcttggtcagtcagatacagtttgatagagaccctcccacccccctctcccaccccctgccacccctggctgggaatcaggaaacctaatttgtataaaattcaagcagatcactaacctgtctggatctgagtttccctcctcgtgagctcaggatgactgctcccatcttcttagccctctctgctccctgcagcctactggatcgcacaccaagcagtgaaaatagtgtttgactccattgacaacctagaggcggctcctcatgatatcggctacgtcaaacaggccatgttccactatttccaggtgccagatcggctagggatactcactcacctgtatagggactttgataaatgcaggtttgctgggttttgccggaaaattgcagaaggtgctcagcagggagaccccctttcccgctatatcttcaggaaggctggggagatgctgggcagacacatcgtagcagtgttgcccgagattgacccggtcttgttccagggcaagattggactccccatcctgtgcgtgggctctgtgtggaagagctgggagctgctgaaggaaggttttcttctggcgctgacccagggcagagagatccaggctcagaacttcttctccagcttcaccctgatgaagctgaggcactcctccgctctgggtggggccagcctaggggccaggcacatcgggcacctcctccccatggactatagcgccaatgccattgccttctattcctacaccttttcctagggggctggtcccggctccaccccctccaagctcagtggacactgggtctgaaaggaaggagtcttttgcttcctttctcctttttacaaaaacaaacatagaaga

SEQ ID NO: 157275 - DNA, 878 bp, Homo sapiens
  Payload ID: 10827
  Gene Symbol: NAGK
  Gene Name: N-acetylglucosamine kinase
  ENST ID: ENST00000443872
  CDS Start-End: 211-801
gaagtggggcggtgcccagacagctggagggaaggaggtgtcaggcggggagagacgcaaacggcgggaccagcagcgacggtagcagcagcatggccgcgatctatgggggtgtagaggggtggagttgtgctcatatctggaacaggctccaactgcaggctcatcaaccctgatggctccgagagtggctgcggcggctggggccatatgatgggtgatgagggttcagcctactggatcgcacaccaagcagtgaaaatagtgtttgactccattgacaacctagaggcggctcctcatgatatcggctacgtcaaacaggccatgttccactatttccaggtgccagatcggctagggatactcactcacctgtatagggactttgataaatgcaggtttgctgggttttgccggaaaattgcagaaggtgctcagcagggagaccccctttcccgctatatcttcaggaaggctggggagatgctgggcagacacatcgtagcagtgttgcccgagattgacccggtcttgttccagggcaagattggactccccatcctgtgcgtgggctctgtgtggaagagctgggagctgctgaaggaaggttttcttctggcgctgacccagggcagagagatccaggctcagaacttcttctccagcttcaccctgatgaagctgaggcactcctccgctctgggtggggccagcctaggggccaggcacatcgggcacctcctccccatggactatagcgccaatgccattgccttctattcctacaccttttcctagggggctggtcccggctccaccccctccaagctcagtggacactgggtctgaaaggaaggagtcttttgcttcctttc

SEQ ID NO: 157276 - DNA, 763 bp, Homo sapiens
  Payload ID: 10827
  Gene Symbol: NAGK
  Gene Name: N-acetylglucosamine kinase
  ENST ID: ENST00000455197
  CDS Start-End: 231-410
cgggcgtttacaggcaggcaggtcagtgatgtgtcctaagggtccgaccgacctagatacccctctttgattcctcctcttgggattagtgtccatctctggaagcaggatccaggaggacgggaggggccgctgcggaccgcagtcgctccacctggaggagacaccagaaggaagacagcctgagggacgcagccatccccggctcctaccggcgccccgccccgcgcatgcgcacgcgcacagggagtcagctggctgcgcgggaggtcacgggaagtggggcggtgcccagacagctggagggaaggaggtgtcaggcggggagagacgcaaacggcgggaccagcagcgacggtagcagcagcatggccgcgatctatgggggtgtagagggggcctatctctgagcggtggggaccaggaggacgcggggaggatcctgatcgaggagctgagggaccgatttccctacctgagtgaaagctacttaatcaccaccgatgccgccggctccatcgccacagctacaccggatggtggagttgtgctcatatctggaacaggctccaactgcaggctcatcaaccctgatggctccgagagtggctgcggcggctggggccatatgatgggtgatgagggttcagcctactggatcgcacaccaagcagtgaaaatagtgtttgactccattgacaacctagaggcggctcctcatgatatcggctacgtcaaacaggccatgttccactatttccag

SEQ ID NO: 157277 - DNA, 1221 bp, Homo sapiens
  Payload ID: 10827
  Gene Symbol: NAGK
  Gene Name: N-acetylglucosamine kinase
  ENST ID: ENST00000443938
  CDS Start-End: 66-1088
agggaaggaggtgtcaggcggggagagacgcaaacggcgggaccagcagcgacggtagcagcagcatggccgcgatctatgggggtgtagaggggggaggcacacgatccgaggtccttttagtctcagaggatgggaagatcctggcagaagcagatggactgagcacaaaccactggctgatcgggacagacaagtgtgtggagaggatcaatgagatggtgaacagggccaaacggaaagcaggggtggatcctctggtaccgctgcgaagcttgggcctatctctgagcggtggggaccaggaggacgcggggaggatcctgatcgaggagctgagggaccgatttccctacctgagtgaaagctacttaatcaccaccgatgccgccggctccatcgccacagctacaccggatggtggagttgtgctcatatctggaacaggctccaactgcaggctcatcaaccctgatggctccgagagtggctgcggcggctggggccatatgatgggtgatgagggttcagcctactggatcgcacaccaagcagtgaaaatagtgtttgactccattgacaacctagaggcggctcctcatgatatcggctacgtcaaacaggccatgttccactatttccaggtgccagatcggctagggatactcactcacctgtatagggactttgataaatgcaggtttgctgggttttgccggaaaattgcagaaggtgctcagcagggagaccccctttcccgctatatcttcaggaaggctggggagatgctgggcagacacatcgtagcagtgttgcccgagattgacccgggcaagattggactccccatcctgtgcgtgggctctgtgtggaagagctgggagctgctgaaggaaggttttcttctggcgctgacccagggcagagagatccaggctcagaacttcttctccagcttcaccctgatgaagctgaggcactcctccgctctgggtggggccagcctaggggccaggcacatcgggcacctcctccccatggactatagcgccaatgccattgccttctattcctacaccttttcctagggggctggtcccggctccaccccctccaagctcagtggacactgggtctgaaaggaaggagtcttttgcttcctttctcctttttacaaaaacaaacatagaagaaaataaatgcactttatccactccccaa

SEQ ID NO: 157278 - DNA, 463 bp, Homo sapiens
  Payload ID: 10827
  Gene Symbol: NAGK
  Gene Name: N-acetylglucosamine kinase
  ENST ID: ENST00000529236
  CDS Start-End: 1-411
gatgccgccggctccatcgccacagctacaccggatggtggagttgtgctcatatctggaacaggctccaactgcaggctcatcaaccctgatggctccgagagtggctgcggcggctggggccatatgatgggtgatgagggttcagcctactggatcgcacaccaagcagtgaaaatagtgtttgactccattgacaacctagaggcggctcctcatgatatcggctacgtcaaacaggccatgttccactatttccaggtgccagatcggctagggatactcactcacctgtatagggactttgataaatgcaggtgctcagcagggagaccccctttcccgctatatcttcaggaaggctggggagatgctgggcagacacatcgtagcagtgttgcccgagattgacccggtcttgttccagggcaagattggactccccatcctgtgcgtgggctct

SEQ ID NO: 157279 - DNA, 776 bp, Homo sapiens
  Payload ID: 10827
  Gene Symbol: NAGK
  Gene Name: N-acetylglucosamine kinase
  ENST ID: ENST00000533981
  CDS Start-End: 525-776
cagcagcgacggtagcagcagcatggccgcgatctatgggggtgtagaggggtgagtgcggcccggcggagggagcctgggcccgaaggcggggcggaaggccgtggccagcctggcaagctggtggccttgatcctcggcgtccgggcactttgggcggcgggaccttgcggtgaagaggtgtgtgcacgcgcaggggcgccctggagcgcacagctgtatgccttacggggactctgcctgtgcaacagccacaccccgggttggggatcctttgtgtttcttggcggaaccacgcccctttcttccacgaaacacccactccgctgtcttcagctggagaagcagctcctttttcctattcctgacctcggacagagttttgcagaacaggtgtcaggggaggcacacgatccgaggtccttttagtctcagaggatgggaagatcctggcagaagcagatggactgagcacaaaccactggctgatcgggacagacaagtgtgtggagaggatcaatgagatggtgaacagggccaaacggaaagcaggggtggatcctctggtaccgctgcgaagcttgggcctatctctgagcggtggggaccaggaggacgcggggaggatcctgatcgaggagctgagggaccgatttccctacctgagtgaaagctacttaatcaccaccgatgccgccggctccatcgccacagctacaccggatggtggagttgtgctcatatctggaacaggctccaactgcaggctcatcaac

SEQ ID NO: 157280 - DNA, 797 bp, Homo sapiens
  Payload ID: 10827
  Gene Symbol: NAGK
  Gene Name: N-acetylglucosamine kinase
  ENST ID: ENST00000524736
  CDS Start-End: 1-548
gatccgaggtccttttagtctcagaggatgggaagatcctggcagaagcagatggactgagcacaaaccactggctgatcgggacagacaagtgtgtggagaggatcaatgagatggtgaacagggccaaacggaaagcaggggtggatcctctggtaccgctgcgaagcttgggcctatctctgagcggtggggaccaggaggacgcggggaggatcctgatcgaggagctgagggaccgatttccctacctgagtgaaagctacttaatcaccaccgatgccgccggctccatcgccacagctacaccggatggtggagttgtgctcatatctggaacaggctccaactgcaggctcatcaaccctgatggctccgagagtggctgcggcggctggggccatatgatgggtgatgagggttcagcctactggatcgcacaccaagcagtgaaaatagtgtttgactccattgacaacctagaggcggctcctcatgatatcggctacgtcaaacaggccatgttccactatttccagatcggctagggatactcactcacctgtatagggactttgataaatgcaggtttgctgggttttgccggaaaattgcagaaggtgctcagcagggagaccccctttcccgctatatcttcaggaaggctggggagatgctgggcagacacatcgtagcagtgttgcccgagattgacccggtcttgttccagggcaagattggactccccatcctgtgcgtgggctctgtgtggaagagctgggagctgctgaaggaag

SEQ ID NO: 157281 - DNA, 584 bp, Homo sapiens
  Payload ID: 10827
  Gene Symbol: NAGK
  Gene Name: N-acetylglucosamine kinase
  ENST ID: ENST00000531934
  CDS Start-End: 303-584
gcaacttccgggcgtttacaggcaggcaggggaggcacacgatccgaggtccttttagtctcagaggatgggaagatcctggcagaagcagatggactgagcacaaaccactggctgatcgggacagacaagtgtgtggagaggatcaatgagatggtgaacagggccaaacggaaagcaggggtggatcctctggtaccgctgcgaagcttggtggagttgtgctcatatctggaacaggctccaactgcaggctcatcaaccctgatggctccgagagtggctgcggcggctggggccatatgatgggtgatgagggttcagcctactggatcgcacaccaagcagtgaaaatagtgtttgactccattgacaacctagaggcggctcctcatgatatcggctacgtcaaacaggccatgttccactatttccaggtgccagatcggctagggatactcactcacctgtatagggactttgataaatgcaggtttgctgggttttgccggaaaattgcagaaggtgctcagcagggagaccccctttcccgctatatcttcaggaaggctggggagatgctg

SEQ ID NO: 157282 - DNA, 453 bp, Homo sapiens
  Payload ID: 10827
  Gene Symbol: NAGK
  Gene Name: N-acetylglucosamine kinase
  ENST ID: ENST00000524537
  CDS Start-End: 1-328
agaggcggctcctcatgatatcggctacgtcaaacaggccatgttccactatttccaggtcttgttccagggcaagattggactccccatcctgtgcgtgggctctgtgtggaagagctgggagctgctgaaggaaggttttcttctggcgctgacccagggcagagagatccaggctcagaacttcttctccagcttcaccctgatgaagctgaggcactcctccgctctgggtggggccagcctaggggccaggcacatcgggcacctcctccccatggactatagcgccaatgccattgccttctattcctacaccttttcctagggggctggtcccggctccaccccctccaagctcagtggacactgggtctgaaaggaaggagtcttttgcttcctttctcctttttacaaaaacaaacatagaagaaaataaatgcactttatcca

SEQ ID NO: 157283 - DNA, 1801 bp, Homo sapiens
  Payload ID: 10827
  Gene Symbol: NAGK
  Gene Name: N-acetylglucosamine kinase
  Uniprot ID: Q9UJ70
  ENST ID: ENST00000613852
  CDS Start-End: 269-1441
gcgcacgcgcaacctaacgcgggactgccagcaacttccgggcgtttacaggcaggcaggtcagtgatgtgtcctaagggtccgaccgacctagatacccctctttgattcctcctcttgggattagtgtccatctctggaagcaggatccaggaggacgggaggggccgctgcggaccgcagtcgctccacctggaggagacaccagaaggaagacagcctgagggacgcagccatccccggctcctaccggcgccccgccccgcgcatgcgcacgcgcacagggagtcagctggctgcgcgggaggtcacgggaagtggggcggtgcccagacagctggagggaaggaggtgtcaggcggggagagacgcaaacggcgggaccagcagcgacggtagcagcagcatggccgcgatctatgggggtgtagaggggggaggcacacgatccgaggtccttttagtctcagaggatgggaagatcctggcagaagcagatggactgagcacaaaccactggctgatcgggacagacaagtgtgtggagaggatcaatgagatggtgaacagggccaaacggaaagcaggggtggatcctctggtaccgctgcgaagcttgggcctatctctgagcggtggggaccaggaggacgcggggaggatcctgatcgaggagctgagggaccgatttccctacctgagtgaaagctacttaatcaccaccgatgccgccggctccatcgccacagctacaccggatggtggagttgtgctcatatctggaacaggctccaactgcaggctcatcaaccctgatggctccgagagtggctgcggcggctggggccatatgatgggtgatgagggttcagcctactggatcgcacaccaagcagtgaaaatagtgtttgactccattgacaacctagaggcggctcctcatgatatcggctacgtcaaacaggccatgttccactatttccaggtgccagatcggctagggatactcactcacctgtatagggactttgataaatgcaggtttgctgggttttgccggaaaattgcagaaggtgctcagcagggagaccccctttcccgctatatcttcaggaaggctggggagatgctgggcagacacatcgtagcagtgttgcccgagattgacccggtcttgttccagggcaagattggactccccatcctgtgcgtgggctctgtgtggaagagctgggagctgctgaaggaaggttttcttctggcgctgacccagggcagagagatccaggctcagaacttcttctccagcttcaccctgatgaagctgaggcactcctccgctctgggtggggccagcctaggggccaggcacatcgggcacctcctccccatggactatagcgccaatgccattgccttctattcctacaccttttcctagggggctggtcccggctccaccccctccaagctcagtggacactgggtctgaaaggaaggagtcttttgcttcctttctcctttttacaaaaacaaacatagaagaaaataaatgcactttatccactccccaattggactgcattatcaaacacatgtgctatgtacatcctcagtgcacctgccagcagatatcctggagggctcatgagtgaatttagtccaagatttaaagccctgcccccaggtgctcagcctgtgatctgtatccactcagcatgcacttgggcagatgatttgtctgtgtgctacccttccccccatattaccatacatatgcactgtgtggctgccagttaat

SEQ ID NO: 157284 - DNA, 5701 bp, Homo sapiens
  Payload ID: 10828
  Gene Symbol: GNPTAB
  Gene Name: N-acetylglucosamine-1-phosphate transferase, alpha and beta subunits
  Uniprot ID: Q3T906
  ENST ID: ENST00000299314
  CDS Start-End: 264-4034
agacccgggcggcgccggccgcctcgccggccgcaggtccgcctccgccgcgccgagggcgtgggctcccggctcccggaagcggcggccgcggcgcggagccgagcgggcgtccgtcgccggagctgcaatgagcggcgcccggaggctgtgacctgcgcgcggcggcccgaccggggcccctgaatggcggctcgctgaggcggcggcggcggcggcggcggctcaggctcctcggggcgtggcgtggcggtgaaggggtgatgctgttcaagctcctgcagagacagacctatacctgcctgtcccacaggtatgggctctacgtgtgcttcttgggcgtcgttgtcaccatcgtctccgccttccagttcggagaggtggttctggaatggagccgagatcaataccatgttttgtttgattcctatagagacaatattgctggaaagtcctttcagaatcggctttgtctgcccatgccgattgacgttgtttacacctgggtgaatggcacagatcttgaactactgaaggaactacagcaggtcagagaacagatggaggaggagcagaaagcaatgagagaaatccttgggaaaaacacaacggaacctactaagaagagtgagaagcagttagagtgtttgctaacacactgcattaaggtgccaatgcttgtcctggacccagccctgccagccaacatcaccctgaaggacctgccatctctttatccttcttttcattctgccagtgacattttcaatgttgcaaaaccaaaaaacccttctaccaatgtctcagttgttgtttttgacagtactaaggatgttgaagatgcccactctggactgcttaaaggaaatagcagacagacagtatggaggggctacttgacaacagataaagaagtccctggattagtgctaatgcaagatttggctttcctgagtggatttccaccaacattcaaggaaacaaatcaactaaaaacaaaattgccagaaaatctttcctctaaagtcaaactgttgcagttgtattcagaggccagtgtagcgcttctaaaactgaataaccccaaggattttcaagaattgaataagcaaactaagaagaacatgaccattgatggaaaagaactgaccataagtcctgcatatttattatgggatctgagcgccatcagccagtctaagcaggatgaagacatctctgccagtcgttttgaagataacgaagaactgaggtactcattgcgatctatcgagaggcatgcaccatgggttcggaatattttcattgtcaccaacgggcagattccatcctggctgaaccttgacaatcctcgagtgacaatagtaacacaccaggatgtttttcgaaatttgagccacttgcctacctttagttcacctgctattgaaagtcacattcatcgcatcgaagggctgtcccagaagtttatttacctaaatgatgatgtcatgtttgggaaggatgtctggccagatgatttttacagtcactccaaaggccagaaggtttatttgacatggcctgtgccaaactgtgccgagggctgcccaggttcctggattaaggatggctattgtgacaaggcttgtaataattcagcctgcgattgggatggtggggattgctctggaaacagtggagggagtcgctatattgcaggaggtggaggtactgggagtattggagttggacagccctggcagtttggtggaggaataaacagtgtctcttactgtaatcagggatgtgcgaattcctggctcgctgataagttctgtgaccaagcatgcaatgtcttgtcctgtgggtttgatgctggcgactgtgggcaagatcattttcatgaattgtataaagtgatccttctcccaaaccagactcactatattattccaaaaggtgaatgcctgccttatttcagctttgcagaagtagccaaaagaggagttgaaggtgcctatagtgacaatccaataattcgacatgcttctattgccaacaagtggaaaaccatccacctcataatgcacagtggaatgaatgccaccacaatacattttaatctcacgtttcaaaatacaaacgatgaagagttcaaaatgcagataacagtggaggtggacacaagggagggaccaaaactgaattctacagcccagaagggttacgaaaatttagttagtcccataacacttcttccagaggcggaaatcctttttgaggatattcccaaagaaaaacgcttcccgaagtttaagagacatgatgttaactcaacaaggagagcccaggaagaggtgaaaattcccctggtaaatatttcactccttccaaaagacgcccagttgagtctcaataccttggatttgcaactggaacatggagacatcactttgaaaggatacaatttgtccaagtcagccttgctgagatcatttctgatgaactcacagcatgctaaaataaaaaatcaagctataataacagatgaaacaaatgacagtttggtggctccacaggaaaaacaggttcataaaagcatcttgccaaacagcttaggagtgtctgaaagattgcagaggttgacttttcctgcagtgagtgtaaaagtgaatggtcatgaccagggtcagaatccacccctggacttggagaccacagcaagatttagagtggaaactcacacccaaaaaaccataggcggaaatgtgacaaaagaaaagcccccatctctgattgttccactggaaagccagatgacaaaagaaaagaaaatcacagggaaagaaaaagagaacagtagaatggaggaaaatgctgaaaatcacataggcgttactgaagtgttacttggaagaaagctgcagcattacacagatagttacttgggctttttgccatgggagaaaaaaaagtatttccaagatcttctcgacgaagaagagtcattgaagacacaattggcatacttcactgatagcaaaaatactgggaggcaactaaaagatacatttgcagattccctcagatatgtaaataaaattctaaatagcaagtttggattcacatcgcggaaagtccctgctcacatgcctcacatgattgaccggattgttatgcaagaactgcaagatatgttccctgaagaatttgacaagacgtcatttcacaaagtgcgccattctgaggatatgcagtttgccttctcttatttttattatctcatgagtgcagtgcagccactgaatatatctcaagtctttgatgaagttgatacagatcaatctggtgtcttgtctgacagagaaatccgaacactggctaccagaattcacgaactgccgttaagtttgcaggatttgacaggtctggaacacatgctaataaattgctcaaaaatgcttcctgctgatatcacgcagctaaataatattccaccaactcaggaatcctactatgatcccaacctgccaccggtcactaaaagtctagtaacaaactgtaaaccagtaactgacaaaatccacaaagcatataaggacaaaaacaaatataggtttgaaatcatgggagaagaagaaatcgcttttaaaatgattcgtaccaacgtttctcatgtggttggccagttggatgacataagaaaaaaccctaggaagtttgtttgcctgaatgacaacattgaccacaatcataaagatgctcagacagtgaaggctgttctcagggacttctatgaatccatgttccccataccttcccaatttgaactgccaagagagtatcgaaaccgtttccttcatatgcatgagctgcaggaatggagggcttatcgagacaaattgaagttttggacccattgtgtactagcaacattgattatgtttactatattctcattttttgctgagcagttaattgcacttaagcggaagatatttcccagaaggaggatacacaaagaagctagtcccaatcgaatcagagtatagaagatcttcatttgaaaaccatctacctcagcatttactgagcattttaaaactcagcttcacagagatgtctttgtgatgtgatgcttagcagtttggcccgaagaaggaaaatatccagtaccatgctgttttgtggcatgaatatagcccactgaccaggaattatttaaccaacccactgaaaacttgtgtgttgagcagctctgaactgattttacttttaaagaatttgctcatggacctgtcatcctttttataaaaaggctcactgacaagagacagctgttaatttcccacagcaatcattgcagactaactttattaggagaagcctatgccagctgggagtgattgctaagaggctccagtctttgcattccaaagccttttgctaaagttttgcactttttttttttcatttcccatttttaagtagttactaagttaactagttattcttgcttctgagtataacgaattgggatgtctaaacctatttttatagatgttatttaaataatgcagcaatatcacctcttattgacaatacctaaattatgagttttattaatatttaagactgtaaatggtcttaaaccactaactactgaagagctcaatgattgacatctgaaatgctttgtaattattgacttcagcccctaagaatgctatgatttcacgtgcaggtctaatttcaaagggctagagttagtactacttaccagatgtaattatgttttggaaatgtacatattcaaacagaagtgcctcattttagaaatgagtagtgctgatggcactggcacattacagtggtgtcttgtttaatactcattggtatattccagtagctatctctctcagttggtttttgatagaacagaggccagcaaactttctttgtaaaaggctggttagtaaattattgcaggccacctgtgtctttgtcatacattcttcttgctgttgtttagtttgttttttttcaaacaaccctctaaaaatgtaaaaaccatgtttagcttgcagctgtacaaaaactgcccaccagccagatgtgaccctcaggccatcatttgccaatcactgagaattagtttttgttgttgttgttgttgttgtttttgagacagagtctctctctgttgcccaggctggagtgcagtggcgcaatctcagctcactgcaacctccgcctcccgggttcaagcagttctgtctcagccttctgagtagctgggactacaggtgcatgccaccacaccctgctaatttttgtatttttagtagagacgggggttccaccatattggtcaggcttatcttgaactcctgacctcaggtgatccacctgcctctgcctcccaaagtgctgagattacaggcataagccagtgcacccagccgagaattagtatttttatgtatggttaaaccttggcgtctagccatattttatgtcataatacaatggatttgtgaagagcagattccatgagtaactctgacaggtattttagatcatgatctcaacaatattcttccaaaatggcatacatcttttgtacaaagaacttgaaatgtaaatactgtgtttgtgctgtaagagttgtgtatttcaaaaactgaaatctcataaaaagttaaatttttgtctgaca

SEQ ID NO: 157285 - DNA, 760 bp, Homo sapiens
  Payload ID: 10828
  Gene Symbol: GNPTAB
  Gene Name: N-acetylglucosamine-1-phosphate transferase, alpha and beta subunits
  ENST ID: ENST00000392919
  CDS Start-End: 169-384
gcggagccgagcgggcgtccgtcgccggagctgcaatgagcggcgcccggaggctgtgacctgcgcgcggcggcccgaccggggcccctgaatggcggctcgctgaggcggcggcggcggcggcggcggctcaggctcctcggggcgtggcgtggcggtgaaggggtgatgctgttcaagctcctgcagagacagacctatacctgcctgtcccacaggtatgggctctacgtgtgcttcttgggcgtcgttgtcaccatcgtctccgccttccagttcggagaggtggttctggaatggagccgagatcaataccatgttttgtttgattcctatagagacaatattgctggaaagtcctttcagaatcggtctgtgaggtaaagggaatttcatccccctgtaggatgaggaaaccaggtggctactacacagcggtttctgagccctggccggaattctgttgacagcgtcctgtgaaatgggaccactccccagtaaaccactggggctgaaccccactccattggtcactcttgctgcttacctatgagggaggagcaaatagcctcatacctcattagtgtgggtctttcccttggaaggccaagcttcttagtgccgccattctggaacgcagtcttcaccatttcttgtctttggggattttttttttcctcttcacaagacagacctcagaatggaaacaatttttttcaacaccctccttccctttttgcagataaaatgaatcacacaa

SEQ ID NO: 157286 - DNA, 1678 bp, Homo sapiens
  Payload ID: 10828
  Gene Symbol: GNPTAB
  Gene Name: N-acetylglucosamine-1-phosphate transferase, alpha and beta subunits
  Uniprot ID: Q3T906
  ENST ID: ENST00000549940
  CDS Start-End: 144-1616
cggagctgcaatgagcggcgcccggaggctgtgacctgcgcgcggcggcccgaccggggcccctgaatggcggctcgctgaggcggcggcggcggcggcggcggctcaggctcctcggggcgtggcgtggcggtgaaggggtgatgctgttcaagctcctgcagagacagacctatacctgcctgtcccacaggtatgggctctacgtgtgcttcttgggcgtcgttgtcaccatcgtctccgccttccagttcggagaggtggttctggaatggagccgagatcaataccatgttttgtttgattcctatagagacaatattgctggaaagtcctttcagaatcggctttgtctgcccatgccgattgacgttgtttacacctgggtgaatggcacagatcttgaactactgaaggaactacagcaggtcagagaacagatggaggaggagcagaaagcaatgagagaaatccttgggaaaaacacaacggaacctactaagaagagtgagaagcagttagagtgtttgctaacacactgcattaaggtgccaatgcttgtcctggacccagccctgccagccaacatcaccctgaaggacctgccatctctttatccttcttttcattctgccagtgacattttcaatgttgcaaaaccaaaaaacccttctaccaatgtctcagttgttgtttttgacagtactaaggatgttgaagatgcccactctggactgcttaaaggaaatagcagacagacagtatggaggggctacttgacaacagataaagaagtccctggattagtgctaatgcaagatttggctttcctgagtggatttccaccaacattcaaggaaacaaatcaactaaaaacaaaattgccagaaaatctttcctctaaagtcaaactgttgcagttgtattcagaggccagtgtagcgcttctaaaactgaataaccccaaggattttcaagaattgaataagcaaactaagaagaacatgaccattgatggaaaagaactgaccataagtcctgcatatttattatgggatctgagcgccatcagccagtctaagcaggatgaagacatctctgccagtcgttttgaagataacgaagaactgaggtactcattgcgatctatcgagaggcatgcaccatgggttcggaatattttcattgtcaccaacgggcagattccatcctggctgaaccttgacaatcctcgagtgacaatagtaacacaccaggatgtttttcgaaatttgagccacttgcctacctttagttcacctgctattgaaagtcacattcatcgcatcgaagggctgtcccagaagtttatttacctaaatgatgatgtcatgtttgggaaggatgtctggccagatgatttttacagtcactccaaaggccagaaggtttatttgacatggcctgtgccaaactgtgccgagggctgcccaggttcctggattaaggatggctattgtgacaaggcttgtaataattcagcctgcgattgggatggtggggattgctctggtaaggatgtgttaaactgtaattcgttcatttttatggaatattttcttcttaatcattattgaacatgtgctatagacttaaccaaacattctttatgtattaataaagaatcagtaatgctggg

SEQ ID NO: 157287 - DNA, 2267 bp, Homo sapiens
  Payload ID: 10828
  Gene Symbol: GNPTAB
  Gene Name: N-acetylglucosamine-1-phosphate transferase, alpha and beta subunits
  ENST ID: ENST00000552681
  CDS Start-End: 1-417
gagaagcagttagagtgtttgctaacacactgcattaaggtgccaatgcttgtcctggacccagccctgccagccaacatcaccctgaaggacctgccatctctttatccttcttttcattctgccagtgacattttcaatgttgcaaaaccaaaaaacccttctaccaatgtctcagttgttgtttttgacagtactaaggatgttgaagatgcccactctggactgcttaaaggaaatagcagacagacagtatggaggggctacttgacaacagataaagaagtccctggattagtgctaatgcaagatttggctttcctgagtggatttccaccaacattcaaggaaacaaatcaactaaaaacaaaattgccagaaaatctttcctctaaagtcaaactggtaagaacatagaaaatagagcaattagcctggcacattctcatttaatgtgtgattcttttcttgtggtccatttttttcccccaaagtttagctgataaacataagaagcaaagagggattctgttctgccagaagagcctcactccttacttttaatttgggcaaaaatctaagagtcttatttggtttgcttgtttcctggatagagaaggactcatttgtttaacagatgagctcctacaatgtctcccatccaagtagtaaccaggcccaaccctgcttagcttccgagatcagacaagatcgggtgcgttcagggtggtatggccgtagacgagctcctacaatgtcttaggtgacattacagctgctggggatgcagcagtggacaaaacagacaaaggcccggatggaacttagggtgtgaacaatggaagcatgggaggaggagatgaggggaagtcataaatgtcatcaatgcacacagcctgttgtttacccaaagctttcactcataaaggtagtgtgcttcagatacatggaacatctgctaatgagaaccattcattagtaactaattgagggacaaatgtatttaaaatttatacttattagctcttcaggcttgaccattgatgccacttgttaaggtggactctggaggctggcctgggacgtgccttttccttaacatgtattgttttcagatcctttatctgattgacttaggacatagtccatgtgggtgttctctctatttgaccttacgtcaagatgcctgctattctgtcagaggtgtttcaggttgtaaatcgtgaatgtcccatctcttagagtagagagcataaagtccttgtctcagaatttgtgaggctctagttttcctgattttataaagaaatgttctttgagttctgccactgggtttagcttacctgattcttacttcctcctgttgtatgtcatttaacaattttgagggtgaaaggatgaagatggagtagtggtgggggagctgtgattagaggtgactagagagcagtttttacttagttcctgtcttaaccatgtttttatatgcaccccccaaccaaattccttttaacttgtttctccctaccccagaccaagtgttttactgttttatgatacattgtattatccttgtaatacaatggtaatgtgaataaccacttatgaattttttacttttttcatatttttcttcatagctttttttttttggagagagtcttgctctgtcacccaggctggagtgcagtggtgcgatctgggcacactgcaacctctgcctcccgggttcaaatgattctcctgcctcagcctccaaatagctgggattacaggcatgcgccaccatgcctggctaatttttgtattttaagtagagagggggtttcgccgtgttgaccaggctggtctccaactcctgacctcaggtgatcccctcaccttggcctcccaaagtgctgggattacaggcgtgagccactgctccttgcccttcatgactttctttattgtactttgaaatactgtaatgcctggctatattagagttgaatttgttcttaaatgcagttattttagaatagataatacatctctccttcctctgagttatttttagtactgatttggacagataaaaccatagattaactttcatttcagccaatgtttatttgacttcttggcttcctggttattagttctagaattatagacacatgtatatctgtacttttgaccaccagttcaacttgcttatgtagacagaatggcattcttgattctatttatataatttcaataaaataaatgctgaaaagaaagaa

SEQ ID NO: 157288 - DNA, 598 bp, Homo sapiens
  Payload ID: 10828
  Gene Symbol: GNPTAB
  Gene Name: N-acetylglucosamine-1-phosphate transferase, alpha and beta subunits
  ENST ID: ENST00000550718
  CDS Start-End: 1-352
tgatatcacgcagctaaataatattccaccaactcaggaatcctactatgatcccaacctgccaccggtcactaaaagtctagtaacaaactgtaaaccagtaactgacaaaatccacaaagcatataaggacaaaaacaaatataggtttgaaatcatgggagaagaagaaatcgcttttaaaatgattcgtaccaacgtttctcatgtggttggccagttggatgacataagaaaaaaccctaggatctcactctgttgtccaagctggaatgcagtaatgcaaacatggctcactgtagcctcgacctcgtgggctcaagcaatcctcccacctcagcctcctgactagtggaaccacagacatgagctgctgcacccagctaaaatggagtatttttaatttctgggtcttttaaatgcatttggaggtctttagttttacctcactgaaattaggattttaattataaataatcaaagatgtgaaccttacagacattttaaagccattatattttttctataaaccctgttctcgtttggaggagaaagaaattggaattttcaaaaaaaataaaaatacctttaacaccta

SEQ ID NO: 157289 - DNA, 550 bp, Homo sapiens
  Payload ID: 10828
  Gene Symbol: GNPTAB
  Gene Name: N-acetylglucosamine-1-phosphate transferase, alpha and beta subunits
  ENST ID: ENST00000549738
  CDS Start-End: 1-291
ccaccggtcactaaaagtctagtaacaaactgtaaaccagtaactgacaaaatccacaaagcatataaggacaaaaacaaatataggtttgaaatcatgggagaagaagaaatcgcttttaaaatgattcgtaccaacgtttctcatgtggttggccagttggatgacataagaaaaaaccctaggatctcactctgttgtccaagctggaatgcagtaatgcaaacatggctcactgtagcctcgacctcgtgggctcaagcaatcctcccacctcagcctcctgactagtggaaccacagacatgagctgctgcacccagctaaaatggagaagtttgtttgcctgaatgacaacattgaccacaatcataaagatgctcagacagtgaaggctgttctcagggacttctatgaatccatgttccccataccttcccaatttgaactgccaagagagtatcgaaaccgtttccttcatatgcatgagctgcaggaatggagggcttatcgagacaaattgaagttttggacccattgtgtactagcaa

SEQ ID NO: 157290 - DNA, 373 bp, Homo sapiens
  Payload ID: 10828
  Gene Symbol: GNPTAB
  Gene Name: N-acetylglucosamine-1-phosphate transferase, alpha and beta subunits
  ENST ID: ENST00000549165
  CDS Start-End: 5-211
ggtgatgctgttcaagctcctgcagagacagacctatacctgcctgtcccacaggtatgggctctacgtgtgcttcttgggcgtcgttgtcaccatcgtctccgccttccagttcggagaggtggttctggaatggagccgagatcaataccatgttttgtttgattcctatagagacaatattgctggaaagtcctttcagaatcggtaagatctattttggagaaatctattatttggacctaaatcgtaagtcatgaaatagccatcctgtaaatatgacagtttaaggggtctttctgagttatagatatggtttaatttactcaggagtatgcccatctgatgtgttcactttagcagcacatatact

SEQ ID NO: 157291 - DNA, 1983 bp, Homo sapiens
  Payload ID: 10829
  Gene Symbol: GNPTG
  Gene Name: N-acetylglucosamine-1-phosphate transferase, gamma subunit
  Uniprot ID: Q9UJJ9
  ENST ID: ENST00000204679
  CDS Start-End: 44-961
tgaccgtcacttcacgtgaccgcgcggcggccgctgcggcgcgatggcggcggggctggcgcggctcctgttgctcctcgggctctcggccggcgggcccgcgccggcaggtgcagcgaagatgaaggtggtggaggagcccaacgcgtttggggtgaacaacccgttcttgcctcaggccagtcgcctccaggccaagagggatccttcacccgtgtctggacccgtgcatctcttccgactctcgggcaagtgcttcagcctggtggagtccacgtacaagtatgagttctgcccgttccacaacgtgacccagcacgagcagaccttccgctggaacgcctacagtgggatcctcggcatctggcacgagtgggagatcgccaacaacaccttcacgggcatgtggatgagggacggtgacgcctgccgttcccggagccggcagagcaaggtggagctggcgtgtggaaaaagcaaccggctggcccatgtgtccgagccgagcacctgcgtctacgcgctgacgttcgagacccccctcgtctgccacccccacgccttgctagtgtacccaaccctgccagaggccctgcagcggcagtgggaccaggtagagcaggacctggccgatgagctgatcaccccccagggccatgagaagttgctgaggacactttttgaggatgctggctacttaaagaccccagaagaaaatgaacccacccagctggagggaggtcctgacagcttggggtttgagaccctggaaaactgcaggaaggctcataaagaactctcaaaggagatcaaaaggctgaaaggtttgctcacccagcacggcatcccctacacgaggcccacagaaacttccaacttggagcacttgggccacgagacgcccagagccaagtctccagagcagctgcggggtgacccaggactgcgtgggagtttgtgaccttgtggtgggagagcagaggtggacgcggccgagagccctacagagaagctggctggtaggacccgcagggaccagctgaccaggcttgtgctcagagaagcagacaaaacaaagattcaaggttttaattaattcccatactgataaaaataactccatgaattctgtaaaccattgcataaatgctatagtgtaaaaaaatttaaacaagtgttaactttaaacagttcgctacaagtaaatgattataaatactaccttctgggttaagaaaattccattcaaataacattctcatgtaaatactcaaacatacagattgaggcttccagaaattaatccacttgaggcgtccacgcggaacaaggtctgctgaccacagttacacacgtcgtgacaccactgtatcacggcgaatgtcgaacactagagttacagacgacaggcaacaagaacatgcagagccggccgccagccagctcctacgccccgtgcccgccatggccacaggggggagctgctgggcgcgcctccacctcagcctccacggggcaccttccagccactgctgtgcctcagccacctaggagccatccctgaggccatggccaccaagacaggtgagggaggccccagggcacacagccccaggatcttgcccccatttccaaccctggcagcgctgccagccattctttggtcttcccactgctcacctgtcctcagagccagtactgatctaggggagcaggtgccacctccatctcccagctgtccccccacccctggggctccccagctctaccaccccggaagctgagccctggagacaccctgaggggcgggcgccacctccttcccagaaagagcagagcagctggcagactagagctcagctgctcctgaccactgacaaccgggagatgtctcggcagacaccacttatcccagaaaagaccagaggctccaaatgggaaccaagtgcataaatacaaataaaaacagagtttacacatcga

SEQ ID NO: 157292 - DNA, 572 bp, Homo sapiens
  Payload ID: 10829
  Gene Symbol: GNPTG
  Gene Name: N-acetylglucosamine-1-phosphate transferase, gamma subunit
  ENST ID: ENST00000526820
  CDS Start-End: 36-266
acttcacgtgaccgcgcggcggccgctgcggcgcgatggcggcggggctggcgcggctcctgttgctcctcgggctctcggccggcgggcccgcgccggcaggtgcagcgaagatgaaggtggtggaggagcccaacgcgtttggggtgaacaacccgttcttgcctcaggccagtcgcctccaggccaagagggatccttcacccgtgtctgagacggggtttcaccgtgttagccaggacggtctcgatctcctgacctcgtgatctgcccgcctcggcctcccacagtgctgggatgacagtcatgagccaccgcgcctggcctcgactttattattaatacggacccgtgcatctcttccgactctcgggcaagtgcttcagcctggtggagtccacgtacaagtatgagttctgcccgttccacaacgtgacccagcacgagcagaccttccgctggaacgcctacagtgggatcctcggcatctggcacgagtgggagatcgccaacaacaccttcacgggcatgtggatgagggacggtgacgcctgccgttcccggagccggca

SEQ ID NO: 157293 - DNA, 552 bp, Homo sapiens
  Payload ID: 10829
  Gene Symbol: GNPTG
  Gene Name: N-acetylglucosamine-1-phosphate transferase, gamma subunit
  ENST ID: ENST00000529110
  CDS Start-End: 1-552
gcggctcctgttgctcctcgggctctcggccggcggtgagtggcccggccgtccgcgtccccaggccccgcgcgcgctctgcaccccggcctccccgctcacggtctcgctccccgtagggcccgcgccggcaggtgcagcgaagatgaaggtggtggaggagcccaacgcgtttggggtgaacaacccgttcttgcctcaggccagtcgcctccaggccaagagggatccttcacccgtgtctggacccgtgcatctcttccgactctcgggcaagtgcttcagcctggtggagtccacgtacaagtatgagttctgcccgttccacaacgtgacccagcacgagcagaccttccgctggaacgcctacagtgggatcctcggcatctggcacgagtgggagatcgccaacaacaccttcacgggcatgtggatgagggacggtgacgcctgccgttcccggagccggcagagcaaggtggagctggcgtgtggaaaaagcaaccggctggcccatgtgtccgagccgagcacctgcgtctacgcgctgac

SEQ ID NO: 157294 - DNA, 550 bp, Homo sapiens
  Payload ID: 10829
  Gene Symbol: GNPTG
  Gene Name: N-acetylglucosamine-1-phosphate transferase, gamma subunit
  ENST ID: ENST00000527876
  CDS Start-End: 23-253
gcgcggcggccgctgcggcgcgatggcggcggggctggcgcggctcctgttgctcctcgggctctcggccggcgggcccgcgccggcaggtgcagcgaagatgaaggtggtggaggagcccaacgcgtttggggtgaacaacccgttcttgcctcaggccagtcgcctccaggccaagagggatccttcacccgtgtctgagacggggtttcaccgtgttagccaggacggtctcgatctcctgacctcgtgatctgcccgcctcggcctcccacagtgctgggatgacagtcatgagccaccgcgcctggcctcgactttattattaatacggcgctggtgacactgccctgcaaccgtcagcaccatcatctccacaacttgctctgtccccttcaaaccctgactcccagctgccccgctcccccagccccggcacccaccattctgctgtctctgaacttggctattcatagacgtcacataggtgactcataactgtgtgcgaccttttgtgtctgaccaactcctcttggcacagtgtccccaa

SEQ ID NO: 157295 - DNA, 386 bp, Homo sapiens
  Payload ID: 10829
  Gene Symbol: GNPTG
  Gene Name: N-acetylglucosamine-1-phosphate transferase, gamma subunit
  ENST ID: ENST00000527137
  CDS Start-End: 16-201
ggccgctgcggcgcgatggcggcggggctggcgcggctcctgttgctcctcgggctctcggccggcgggcccgcgccggcaggtgcagcgaagatgaaggtggtggaggagcccaacgcgtttggggtgaacaacccgttcttgcctcaggccagtcgcctccaggccaagagggatccttcacccgtgtctggtgagtgaggagcgctgttggccggcgcgggggtggccgcggggagcagcaacagtggaggatggatgagtgaccctgagagttacggcccggagtctaaagcattggtttgtcagccttctaaaattaatgtggaagtacgagagaatataccagaacgttcttgtagcgaattaaattatctccagactta

SEQ ID NO: 157296 - DNA, 2202 bp, Homo sapiens
  Payload ID: 10830
  Gene Symbol: NAGPA
  Gene Name: N-acetylglucosamine-1-phosphodiester alpha-N-acetylglucosaminidase
  Uniprot ID: Q9UK23
  ENST ID: ENST00000312251
  CDS Start-End: 21-1568
acccgaggccccggtccaatatggcgacctccacgggtcgctggcttctcctccggcttgcactattcggcttcctctgggaagcgtccggcggcctcgactcgggggcctcccgcgacgacgacttgctactgccctatccacgcgcgcgcgcgcgcctcccccgggactgcacacgggtgcgcgccggcaaccgcgagcacgagagttggcctccgcctcccgcgactcccggcgccggcggtctggccgtgcgcaccttcgtgtcgcacttcagggaccgcgcggtggccggccacctgacgcgggccgttgagcccctgcgcaccttctcggtgctggagcccggtggacccggcggctgcgcggcgagacgacgcgccaccgtggaggagacggcgcgggcggccgactgccgtgtcgcccagaacggcggcttcttccgcatgaactcgggcgagtgcctggggaacgtggtgagcgacgagcggcgggtgagcagctccggggggctgcagaacgcgcagttcgggatccgccgcgacgggaccctggtcaccgggtacctgtctgaggaggaggtgctggacactgagaacccatttgtgcagctgctgagtggggtcgtgtggctgattcgtaatggaagcatctacatcaacgagagccaagccacagagtgtgacgagacacaggagacaggttcctttagcaaatttgtgaatgtgatatcagccaggacggccattggccacgaccggaaagggcagctggtgctctttcatgcagacggccaaacggagcagcgtggcatcaacctgtgggaaatggcggagttcctgctgaaacaggacgtggtcaacgccatcaacctggatgggggtggctctgccacctttgtgctcaacgggaccttggccagttacccgtcagatcactgccaggacaacatgtggcgctgtccccgccaagtgtccaccgtggtgtgtgtgcacgaaccccgctgccagccgcctgactgccacggccacgggacctgcgtggacgggcactgccaatgcaccgggcacttctggcggggtcccggctgtgatgagctggactgtggcccctctaactgcagccagcacggactgtgcacggagaccggctgccgctgtgatgccggatggaccgggtccaactgcagtgaagagtgtccccttggctggcatgggccgggctgccagaggccttgtaagtgtgagcaccattgtccctgtgaccccaagactggcaactgcagcgtctccagagtaaagcagtgtctccagccacctgaagccaccctgagggcgggagaactctcctttttcaccaggaccgcctggctagccctcaccctggcgctggccttcctcctgctgatcagcactgcagcaaacctgtccttgctcctgtccagagcagagaggaaccggcgcctgcatggggactatgcataccacccgctgcaggagatgaacggggagcctctggccgcagagaaggagcagccagggggcgcccacaaccccttcaaggactgaagcctcaagctgcccggggtggcacgtcgcgaaagcttgtttccccacggtctggcttctgcaggggaaatttcaaggccactggcgtggaccatctgggtgtcctcagcccctgtggggcagccaagttcctgatagcacttgtgcctcagcccctcacctggccacctgccagggcacctgcaaccctagcaataccatgctcgctggagaggctcagctgcctgcttctggcctgcctgtgtctgctgccgagaagcccgtgcccccgggagggctgccgcactgccaaagagtctccctcctcctggggaaggggctgccaacgaaccagactcagtgaccacgtcatgacagaacagcacatcctggccagcacccctggctggagtgggttaaagggacgagtctgccttcctggctgtgacacgggaccccttttctacagacctcatcactggatttgccaactagaattcgatttcctgtcataggaagctccttggaagaagggatggggggatgagatcatgtttacagacctgttttgtcatcctgctgccaagaagttttttaatcacttgaataaattgatataataaaaggagccaccaggtggtgtgtggattctgaa

SEQ ID NO: 157297 - DNA, 2100 bp, Homo sapiens
  Payload ID: 10830
  Gene Symbol: NAGPA
  Gene Name: N-acetylglucosamine-1-phosphodiester alpha-N-acetylglucosaminidase
  Uniprot ID: Q9UK23
  ENST ID: ENST00000381955
  CDS Start-End: 21-1466
acccgaggccccggtccaatatggcgacctccacgggtcgctggcttctcctccggcttgcactattcggcttcctctgggaagcgtccggcggcctcgactcgggggcctcccgcgacgacgacttgctactgccctatccacgcgcgcgcgcgcgcctcccccgggactgcacacgggtgcgcgccggcaaccgcgagcacgagagttggcctccgcctcccgcgactcccggcgccggcggtctggccgtgcgcaccttcgtgtcgcacttcagggaccgcgcggtggccggccacctgacgcgggccgttgagcccctgcgcaccttctcggtgctggagcccggtggacccggcggctgcgcggcgagacgacgcgccaccgtggaggagacggcgcgggcggccgactgccgtgtcgcccagaacggcggcttcttccgcatgaactcgggcgagtgcctggggaacgtggtgagcgacgagcggcgggtgagcagctccggggggctgcagaacgcgcagttcgggatccgccgcgacgggaccctggtcaccgggtacctgtctgaggaggaggtgctggacactgagaacccatttgtgcagctgctgagtggggtcgtgtggctgattcgtaatggaagcatctacatcaacgagagccaagccacagagtgtgacgagacacaggagacaggttcctttagcaaatttgtgaatgtgatatcagccaggacggccattggccacgaccggaaagggcagctggtgctctttcatgcagacggccaaacggagcagcgtggcatcaacctgtgggaaatggcggagttcctgctgaaacaggacgtggtcaacgccatcaacctggatgggggtggctctgccacctttgtgctcaacgggaccttggccagttacccgtcagatcactgccaggacaacatgtggcgctgtccccgccaagtgtccaccgtggtgtgtgtgcacgaaccccgctgccagccgcctgactgccacggccacgggacctgcgtggacgggcactgccaatgcaccgggcacttctggcggggtcccggctgtgatgagctggactgtggcccctctaactgcagccagcacggactgtgcacggagaccggctgccgctgtgatgccggatggaccgggtccaactgcagtgaagtaaagcagtgtctccagccacctgaagccaccctgagggcgggagaactctcctttttcaccaggaccgcctggctagccctcaccctggcgctggccttcctcctgctgatcagcactgcagcaaacctgtccttgctcctgtccagagcagagaggaaccggcgcctgcatggggactatgcataccacccgctgcaggagatgaacggggagcctctggccgcagagaaggagcagccagggggcgcccacaaccccttcaaggactgaagcctcaagctgcccggggtggcacgtcgcgaaagcttgtttccccacggtctggcttctgcaggggaaatttcaaggccactggcgtggaccatctgggtgtcctcagcccctgtggggcagccaagttcctgatagcacttgtgcctcagcccctcacctggccacctgccagggcacctgcaaccctagcaataccatgctcgctggagaggctcagctgcctgcttctggcctgcctgtgtctgctgccgagaagcccgtgcccccgggagggctgccgcactgccaaagagtctccctcctcctggggaaggggctgccaacgaaccagactcagtgaccacgtcatgacagaacagcacatcctggccagcacccctggctggagtgggttaaagggacgagtctgccttcctggctgtgacacgggaccccttttctacagacctcatcactggatttgccaactagaattcgatttcctgtcataggaagctccttggaagaagggatggggggatgagatcatgtttacagacctgttttgtcatcctgctgccaagaagttttttaatcacttgaataaattgatataataaaaggagccaccaggtggtgtgtggattctgaa

SEQ ID NO: 157298 - DNA, 2260 bp, Homo sapiens
  Payload ID: 10830
  Gene Symbol: NAGPA
  Gene Name: N-acetylglucosamine-1-phosphodiester alpha-N-acetylglucosaminidase
  Uniprot ID: Q9UK23
  ENST ID: ENST00000562746
  CDS Start-End: 5-934
caatatggcgacctccacgggtcgctggcttctcctccggcttgcactattcggcttcctctgggaagcgtccggcggcctcgactcgggggcctcccgcgacgacgacttgctactgccctatccacgcgcgcgcgcgcgcctcccccgggactgcacacgggtgcgcgccggcaaccgcgagcacgagagttggcctccgcctcccgcgactcccggcgccggcggtctggccgtgcgcaccttcgtgtcgcacttcagggaccgcgcggtggccggccacctgacgcgggccgttgagcccctgcgcaccttctcggtgctggagcccggtggacccggcggctgcgcggcgagacgacgcgccaccgtggaggagacggcgcgggcggccgactgccgtgtcgcccagaacggcggcttcttccgcatgaactcgggcgagtgcctggggaacgtggtgagcgacgagcggcgggtgagcagctccggggggctgcagaacgcgcagttcgggatccgccgcgacgggaccctggtcaccgggtacctgtctgaggaggaggtgctggacactgagaacccatttgtgcagctgctgagtggggtcgtgtggctgattcgtaatggaagcatctacatcaacgagagccaagccacagagtgtgacgagacacaggagacaggttcctttagcaaatttgtgaatgtgatatcagccaggacggccattggccacgaccggaaagggcagctggtgctctttcatgcagacggccaaacggagcagcgtggcatcaacctgtgggaaatggcggagttcctgctgaaacaggacgtggtcaacgccatcaacctggatgggggtggctctgccacctttgtgctcaacgggaccttggccagttacccgtcagatcactggcaggcgtgatggtgcacaccttacggttacagctgctcaggaggctcgggtggaaggatcgcaatacctcatctcaaaaatagatagacgccatcttgtagccaggacaacatgtggcgctgtccccgccaagtgtccaccgtggtgtgtgtgcacgaaccccgctgccagccgcctgactgccacggccacgggacctgcgtggacgggcactgccaatgcaccgggcacttctggcggggtcccggctgtgatgagctggactgtggcccctctaactgcagccagcacggactgtgcacggagaccggctgccgctgtgatgccggatggaccgggtccaactgcagtgaagagtgtccccttggctggcatgggccgggctgccagaggccttgtaagtgtgagcaccattgtccctgtgaccccaagactggcaactgcagcgtctccagagtaaagcagtgtctccagccacctgaagccaccctgagggcgggagaactctcctttttcaccaggaccgcctggctagccctcaccctggcgctggccttcctcctgctgatcagcactgcagcaaacctgtccttgctcctgtccagagcagagaggaaccggcgcctgcatggggactatgcataccacccgctgcaggagatgaacggggagcctctggccgcagagaaggagcagccagggggcgcccacaaccccttcaaggactgaagcctcaagctgcccggggtggcacgtcgcgaaagcttgtttccccacggtctggcttctgcaggggaaatttcaaggccactggcgtggaccatctgggtgtcctcagcccctgtggggcagccaagttcctgatagcacttgtgcctcagcccctcacctggccacctgccagggcacctgcaaccctagcaataccatgctcgctggagaggctcagctgcctgcttctggcctgcctgtgtctgctgccgagaagcccgtgcccccgggagggctgccgcactgccaaagagtctccctcctcctggggaaggggctgccaacgaaccagactcagtgaccacgtcatgacagaacagcacatcctggccagcacccctggctggagtgggttaaagggacgagtctgccttcctggctgtgacacgggaccccttttctacagacctcatcactggatttgccaactagaattcgatttcctgtcataggaagctccttggaagaagggatggggggatgagatcatgtttacagacctgttttgtcatcctgctgccaagaagttttttaatcacttgaataaattgatataataaaagg

SEQ ID NO: 157299 - DNA, 615 bp, Homo sapiens
  Payload ID: 10830
  Gene Symbol: NAGPA
  Gene Name: N-acetylglucosamine-1-phosphodiester alpha-N-acetylglucosaminidase
  ENST ID: ENST00000562037
  CDS Start-End: 1-315
aaccgcgagcacgagagttggcctccgcctcccgcgactcccggcgccggcggtctggccgtgcgcaccttcgtgtcgcacttcagggaccgcgcggtggccggccacctgacgcgggccgttgagcccctgcgcaccttctcggtgctggagcccggtggacccggcggctgcgcggcgagacgacgcgccaccgtggaggagacggcgcgggcggccgactgccgtgtcgcccagaacggcggcttcttccgcatgaactcgggcgagtgcctggggaacgtggtgagcgacgagcggcgggtacctgtctgaggaggaggtgctggacactgagaacccatttgtgcagctgctgagtggggtcgtgtggctgattcgtaatggaagcatctacatcaacgagagccaagccacagagtgtgacgagacacaggagacaggttcctttagcaaatttgtgaatgtgatatcagccaggacggccattggccacgaccggaaagggcagctggtgctctttcatgcagacggccaaacggagcagcgtggcatcaacctgtgggaaatggcggagttcctgctgaaacaggacgtggtcaacgccatcaacct

SEQ ID NO: 157300 - DNA, 544 bp, Homo sapiens
  Payload ID: 10830
  Gene Symbol: NAGPA
  Gene Name: N-acetylglucosamine-1-phosphodiester alpha-N-acetylglucosaminidase
  ENST ID: ENST00000565876
  CDS Start-End: 1-121
gagcagctccggggggctgcagaacgcgcagttcgggatccgccgcgacgggaccctggtcaccggaatggggataggaatcgcttccttgcagagtttattcatcatccagtatcattgagcacttgcttgtatcaggcaatgtgccgcgccccggtgagatagccgtgaacaacacagtctttgccttaacagccctcccccattactagaaaaatcaacaaaagccgggtacctgtctgaggaggaggtgctggacactgagaacccatttgtgcagctgctgagtggggtcgtgtggctgattcgtaatggaagcatctacatcaacgagagccaagccacagagtgtgacgagacacaggagacaggttcctttagcaaatttgtgaatgtgatatcagccaggacggccattggccacgaccggaaagggcagctggtgctctttcatgcagacggccaaacggagcagcgtggagtgtccccttggctggcatgggccgggctgccagaggccttgtaagtgtgagcaccattgtcc

SEQ ID NO: 157301 - DNA, 866 bp, Homo sapiens
  Payload ID: 10830
  Gene Symbol: NAGPA
  Gene Name: N-acetylglucosamine-1-phosphodiester alpha-N-acetylglucosaminidase
  ENST ID: ENST00000569296
  CDS Start-End: 1-519
gtgagcgacgagcggcgggtgagcagctccggggggctgcagaacgcgcagttcgggatccgccgcgacgggaccctggtcaccgggtacctgtctgaggaggaggtgctggacactgagaacccatttgtgcagctgctgagtggggtcgtgtggctgattcgtaatggaagcatctacatcaacgagagccaagccacagagtgtgacgagacacaggagacaggttcctttagcaaatttgtgaatgtgatatcagccaggacggccattggccacgaccggaaagggcagctggtgctctttcatgcagacggccaaacggagcagcgtggcatcaacctgtgggaaatggcggagttcctgctgaaacaggacgtggtcaacgccatcaacctggatgggggtggctctgccacctttgtgctcaacgggaccttggccagttacccgtcagatcactgctgctcaggaggctcgggtggaaggatcgcaatacctcatctcaaaaatagatagacgccatcttgtagccaggacaacatgtggcgctgtccccgccaagtgtccaccgtggtgtgtgtgcacgaaccccgctgccagccgcctgactgccacggccacgggacctgcgtggacgggcactgccaatgcaccgggcacttctggcggggtcccggctgtgatgagctggactgtggcccctctaactgcagccagcacggactgtgcacggagaccggctgccgctgtgatgccggatggaccgggtccaactgcagtgaagagtgtccccttggctggcatgggccgggctgccagaggccttgtaagtgtgagcaccattgtccctgtgaccccaagac

SEQ ID NO: 157302 - DNA, 1494 bp, Homo sapiens
  Payload ID: 10830
  Gene Symbol: NAGPA
  Gene Name: N-acetylglucosamine-1-phosphodiester alpha-N-acetylglucosaminidase
  ENST ID: ENST00000563578
  CDS Start-End: 1-946
cgagagttggcctccgcctcccgcgactcccggcgccggcggtctggccgtgcgcaccttcgtgtcgcacttcagggaccgcgcggtggccggccacctgacgcgggccgttgagcccctgcgcaccttctcggtgctggagcccggtggacccggcggctgcgcggcgagacgacgcgccaccgtggaggagacggcgcgggcggccgactgccgtgtcgcccagaacggcggcttcttccgcatgaactcgggcgagtgcctggggaacgtggtgagcgacgagcggcgggtgagcagctccggggggctgcagaacgcgcagttcgggatccgccgcgacgggaccctggtcaccgggtacctgtctgaggaggaggtgctggacactgagaacccatttgtgcagctgctgagtggggtcgtgtggctgattcgtaatggaagcatctacatcaacgagagccaagccacagagtgtgacgagacacaggagacaggttcctttagcaaatttgtgaatgtgatatcagccaggacggccattggccacgaccggaaagggcagctggtgctctttcatgcagacggccaaacggagcagcgtggcatcaacctgtgggaaatggcggagttcctgctgaaacaggacgtggtcaacgccatcaacctggatgggggtggctctgccacctttgtgctcaacgggaccttggccagttacccgtcagatcactggaccgcctggctagccctcaccctggcgctggccttcctcctgctgatcagcactgcagcaaacctgtccttgctcctgtccagagcagagaggaaccggcgcctgcatggggactatgcataccacccgctgcaggagatgaacggggagcctctggccgcagagaaggagcagccagggggcgcccacaaccccttcaaggactgaagcctcaagctgcccggggtggcacgtcgcgaaagcttgtttccccacggtctggcttctgcaggggaaatttcaaggccactggcgtggaccatctgggtgtcctcagcccctgtggggcagccaagttcctgatagcacttgtgcctcagcccctcacctggccacctgccagggcacctgcaaccctagcaataccatgctcgctggagaggctcagctgcctgcttctggcctgcctgtgtctgctgccgagaagcccgtgcccccgggagggctgccgcactgccaaagagtctccctcctcctggggaaggggctgccaacgaaccagactcagtgaccacgtcatgacagaacagcacatcctggccagcacccctggctggagtgggttaaagggacgagtctgccttcctggctgtgacacgggaccccttttctacagacctcatcactggatttgccaactagaattcgatttcctgtcataggaagctccttggaagaagggatggggggatgagatcatgtttacagacctgttt

SEQ ID NO: 157303 - DNA, 570 bp, Homo sapiens
  Payload ID: 10830
  Gene Symbol: NAGPA
  Gene Name: N-acetylglucosamine-1-phosphodiester alpha-N-acetylglucosaminidase
  ENST ID: ENST00000562346
  CDS Start-End: 1-570
agcacgagagttggcctccgcctcccgcgactcccggcgccggcggtctggccgtgcgcaccttcgtgtcgcacttcagggaccgcgcggtggccggccacctgacgcgggccgttgagcccctgcgcaccttctcggtgctggagcccggtggacccggcggctgcgcggcgagacgacgcgccaccgtggaggagacggcgcgggcggccgactgccgtgtcgcccagaacggcggcttcttccgcatgaactcgggcgagtgcctggggaacgtggtgagcgacgagcggcgggtgagcagctccggggggctgcagaacgcgcagttcgggatccgccgcgacgggaccctggtcaccgggtacctgtctgaggaggaggtgctggacactgagaacccatttgtgcagctgctgagtggggtcgtgtggctgattcgtaatggaagcatctacatcaacgagagccaagccacagagtgtgacgagacacaggagacagccaggacaacatgtggcgctgtccccgccaagtgtccaccgtggtgtgtgtgcacgaaccccgctg

SEQ ID NO: 157304 - DNA, 2544 bp, Homo sapiens
  Payload ID: 10831
  Gene Symbol: NAGLU
  Gene Name: N-acetylglucosaminidase, alpha
  Uniprot ID: P54802
  ENST ID: ENST00000225927
  CDS Start-End: 102-2333
cccgggcttagccttcgggtccacgtggccggaggccggcagctgattggacgcgggccgccccaccccctggccgtcgcgggacccgcaggactgagaccatggaggcggtggcggtggccgcggcggtgggggtccttctcctggccggggccgggggcgcggcaggcgacgaggcccgggaggcggcggccgtgcgggcgctcgtggcccggctgctggggccaggccccgcggccgacttctccgtgtcggtggagcgcgctctggctgccaagccgggcttggacacctacagcctgggcggcggcggcgcggcgcgcgtgcgggtgcgcggctccacgggcgtggcggccgccgcggggctgcaccgctacctgcgcgacttctgtggctgccacgtggcctggtccggctctcagctgcgcctgccgcggccactgccagccgtgccgggggagctgaccgaggccacgcccaacaggtaccgctattaccagaatgtgtgcacgcaaagctactctttcgtgtggtgggactgggcccgctgggagcgagagatagactggatggcgctgaatggcatcaacctggcactggcctggagcggccaggaggccatctggcagcgggtgtacctggccttgggcctgacccaggcagagatcaatgagttctttactggtcctgccttcctggcctgggggcgaatgggcaacctgcacacctgggatggccccctgcccccctcctggcacatcaagcagctttacctgcagcaccgggtcctggaccagatgcgctccttcggcatgaccccagtgctgcctgcattcgcggggcatgttcccgaggctgtcaccagggtgttccctcaggtcaatgtcacgaagatgggcagttggggccactttaactgttcctactcctgctccttccttctggctccggaagaccccatattccccatcatcgggagcctcttcctgcgagagctgatcaaagagtttggcacagaccacatctatggggccgacactttcaatgagatgcagccaccttcctcagagccctcctaccttgccgcagccaccactgccgtctatgaggccatgactgcagtggatactgaggctgtgtggctgctccaaggctggctcttccagcaccagccgcagttctgggggcccgcccagatcagggctgtgctgggagctgtgccccgtggccgcctcctggttctggacctgtttgctgagagccagcctgtgtatacccgcactgcctccttccagggccagcccttcatctggtgcatgctgcacaactttgggggaaaccatggtctttttggagccctagaggctgtgaacggaggcccagaagctgcccgcctcttccccaactccaccatggtaggcacgggcatggcccccgagggcatcagccagaacgaagtggtctattccctcatggctgagctgggctggcgaaaggacccagtgccagatttggcagcctgggtgaccagctttgccgcccggcggtatggggtctcccacccggacgcaggggcagcgtggaggctactgctccggagtgtgtacaactgctccggggaggcctgcaggggccacaatcgtagcccgctggtcaggcggccgtccctacagatgaataccagcatctggtacaaccgatctgatgtgtttgaggcctggcggctgctgctcacatctgctccctccctggccaccagccccgccttccgctacgacctgctggacctcactcggcaggcagtgcaggagctggtcagcttgtactatgaggaggcaagaagcgcctacctgagcaaggagctggcctccctgttgagggctggaggcgtcctggcctatgagctgctgccggcactggacgaggtgctggctagtgacagccgcttcttgctgggcagctggctagagcaggcccgagcagcggcagtcagtgaggccgaggccgatttctacgagcagaacagccgctaccagctgaccttgtgggggccagaaggcaacatcctggactatgccaacaagcagctggcggggttggtggccaactactacacccctcgctggcggcttttcctggaggcgctggttgacagtgtggcccagggcatccctttccaacagcaccagtttgacaaaaatgtcttccaactggagcaggccttcgttctcagcaagcagaggtaccccagccagccgcgaggagacactgtggacctggccaagaagatcttcctcaaatattacccccgctgggtggccggctcttggtgatagattcgccaccactgggccttgttttccgctaattccagggcagattccagggcccagagctggacagacatcacaggataacccaggcctgggaggaggccccacggcctgctggtggggtctgacctggggggattggagggaaatgacctgccctccaccaccacccaaagtgtgggattaaagtactgttttctttccacttaaa

SEQ ID NO: 157305 - DNA, 634 bp, Homo sapiens
  Payload ID: 10831
  Gene Symbol: NAGLU
  Gene Name: N-acetylglucosaminidase, alpha
  ENST ID: ENST00000590358
  CDS Start-End: 390-634
ttgccttcctcccccaccttctctttgaacctgcggactgaggaaggacgcctccatcccccaccctacaggcctgtgttccagcgcctgccacactatggagtgatgtgttcacacagctgtcctcccctgcccatctgttagactgtgggggcagggattccccgttccaggaaaacaccgtgcagaggaggggctctggcagtgtggcatgaaagtggaatatgccacccaaatacccgccaggctagagggccctgggagagtgcaggggacgagtgcctcagaagcccagccccggtacctggtctcagctccacctggggtgggtcccagtgtgcagcagaagggccgagtttggagcccctcccctctcctctaggtgggggatgggggatttgttccagggccgtggaccctccagggtgggatgcgcccctgctcatgacactgcccgcaggtaccgctattaccagaatgtgtgcacgcaaagctactctttcgtgtggtgggactgggcccgctgggagcgagagatagactggatggcgctgaatggcatcaacctggcactggcctggagcggccaggaggccatctggcagcgggtgtacctggccttgggcctgaccca

SEQ ID NO: 157306 - DNA, 510 bp, Homo sapiens
  Payload ID: 10831
  Gene Symbol: NAGLU
  Gene Name: N-acetylglucosaminidase, alpha
  ENST ID: ENST00000586516
  CDS Start-End: 1-510
cggccgccgcggggctgcaccgctacctgcgcgacttctgtggctgccacgtggcctggtccggctctcagctgcgcctgccgcggccactgccagccgtgccgggggagctgaccgaggccacgcccaacaggtgtacctggccttgggcctgacccaggcagagatcaatgagttctttactggtcctgccttcctggcctgggggcgaatgggcaacctgcacacctgggatggccccctgcccccctcctggcacatcaagcagctttacctgcagcaccgggtcctggaccagatgcgctccttcggcatgaccccagtgctgcctgcattcgcggggcatgttcccgaggctgtcaccagggtgttccctcaggtcaatgtcacgaagatgggcagttggggccactttaactgttcctactcctgctccttccttctggctccggaagaccccatattccccatcatcgggagcctcttcctgcgagagctgatcaaagagtt

SEQ ID NO: 157307 - DNA, 1493 bp, Homo sapiens
  Payload ID: 10831
  Gene Symbol: NAGLU
  Gene Name: N-acetylglucosaminidase, alpha
  ENST ID: ENST00000591587
  CDS Start-End: 1-369
cgcggggctgcaccgctacctgcgcgacttctgtggctgccacgtggcctggtccggctctcagctgcgcctgccgcggccactgccagccgtgccgggggagctgaccgaggccacgcccaacaggtgtacctggccttgggcctgacccaggcagagatcaatgagttctttactggtcctgccttcctggcctgggggcgaatgggcaacctgcacacctgggatggccccctgcccccctcctggcacatcaagcagctttacctgcagcaccgggtcctggaccagatgcgctccttcggcatgaccccagtgctgcctgcattcgcggggcatgttcccgaggctgtcaccagtggatactgaggctgtgtggctgctccaaggctggctcttccagcaccagccgcagttctgggggcccgcccagatcagggctgtgctgggagctgtgccccgtggccgcctcctggttctggacctgtttgctgagagccagcctgtgtatacccgcactgcctccttccagggccagcccttcatctggtgcatgctgcacaactttgggggaaaccatggtctttttggagccctagaggctgtgaacggaggcccagaagctgcccgcctcttccccaactccaccatggtaggcacgggcatggcccccgagggcatcagccagaacgaagtggtctattccctcatggctgagctgggctggcgaaaggacccagtgccagatttggcagcctgggtgaccagctttgccgcccggcggtatggggtctcccacccggacgcaggggcagcgtggaggctactgctccggagtgtgtacaactgctccggggaggcctgcaggggccacaatcgtagcccgctggtcaggcggccgtccctacagatgaataccagcatctggtacaaccgatctgatgtgtttgaggcctggcggctgctgctcacatctgctccctccctggccaccagccccgccttccgctacgacctgctggacctcactcggcaggcagtgcaggagctggtcagcttgtactatgaggaggcaagaagcgcctacctgagcaaggagctggcctccctgttgagggctggaggcgtcctggcctatgagctgctgccggcactggacgaggtgctggctagtgacagccgcttcttgctgggcagctggctagagcaggcccgagcagcggcagtcagtgaggccgaggccgatttctacgagcagaacagccgctaccagctgaccttgtgggggccagaaggcaacatcctggactatgccaacaagcagctggcggggttggtggccaactactacacccctcgctggcggcttttcctggaggcgctggttgacagtgtggcccagggcatccctttccaacagcaccagtttgacaaaaatgtcttccaactggagcaggccttcgttctcagcaagcagaggtaccccagccagc

SEQ ID NO: 157308 - DNA, 582 bp, Homo sapiens
  Payload ID: 10831
  Gene Symbol: NAGLU
  Gene Name: N-acetylglucosaminidase, alpha
  ENST ID: ENST00000592454
  CDS Start-End: 1-196
gtttggcacagaccacatctatggggccgacactttcaatgagatgcagccaccttcctcagagccctcctaccttgccgcagccaccactgccgtctatgaggccatgactgcagttctgggggcccgcccagatcagggctgtgctgggagctgtgccccgtggccgcctcctggttctggacctgtttgctgagagccagcctgtgtatacccgcactgcctccttccagggccagcccttcatctggtgcatgctgcacaactttgggggaaaccatggtctttttggagccctagaggctgtgaacggaggcccagaagctgcccgcctcttccccaactccaccatggtaggcacgggcatggcccccgagggcatcagccagaacgaagtggtctattccctcatggctgagctgggctggcgaaaggacccagtgccagatttggcagcctgggtgaccagctttgccgcccggcggtatggggtctcccacccggacgcaggggcagcgtggaggctactgctccggagtgtgtacaactgctccggggaggcctgcaggggccacaatcgta

SEQ ID NO: 157309 - DNA, 2182 bp, Homo sapiens
  Payload ID: 10832
  Gene Symbol: NAGS
  Gene Name: N-acetylglutamate synthase
  Uniprot ID: Q8N159
  ENST ID: ENST00000293404
  CDS Start-End: 119-1723
cctgtccggaccccgccccgaccaggtccagccccgcccaacggcaagttaagagccccccagtgccagacgctccagacagactgccactcttggggggcaagagttggttgtcgtcatggcgacggcgctgatggctgtggttctgcgggcagctgctgtagccccgaggctgagaggccggggaggcactgggggcgcccgaaggctgagctgtggcgcgcggcggcgggcggcgaggggcaccagcccggggcgccggctcagcaccgcctggtcgcagccccagcccccgcccgaggagtacgcgggcgcggacgacgtctcccagtcgcccgtcgccgaggagccgtcgtgggtgccgagtcccaggcccccggtgccccacgagtccccagagcctccttcgggccgctcgctggtgcagcgggacatccaggccttcctgaaccagtgcggggccagccctggggaggcgcgccactggctcacgcagttccagacctgccatcactccgcggacaagcccttcgccgtcatcgaggtggacgaggaggtgctcaagtgccagcagggcgtatccagtctggcctttgccctggccttcttgcagcgcatggacatgaagccgctggtggtcctggggctgccggcccctacggctccctcgggctgtctttccttctgggaggccaaggcgcagctggccaagagctgcaaggtgctggtagacgcgcttcgacacaacgccgccgctgctgtgccattttttggcggcgggtctgtgctacgcgctgccgagccggctccccatgccagctacggcggcatcgtctcggtggagacagacctgctgcagtggtgcctggagtcgggcagcatccccatcctgtgccccatcggggagacggccgcgcgccgctccgtgcttctcgactccctggaggtgaccgcgtcgctggccaaggcgctgcggcccaccaaaatcatcttcctcaataacacaggcggcctgcgcgacagcagtcataaggtcctgagtaacgtgaacctgcccgccgacctggacctggtgtgcaacgccgagtgggtgagcacaaaagaacggcagcagatgcggctcatcgtggacgtgctcagccgcctgccccaccactcctcggccgtcatcaccgccgctagcacgctgctcactgagctctttagcaacaaggggtccgggaccctgttcaagaacgccgagcgaatgctacgggtgcgcagcctggacaagctggaccagggccgtctagtggacctggtcaacgccagcttcggcaagaagctcagggacgactacctggcctcgctgcgcccgcggctgcactccatctacgtctccgaggggtacaacgccgccgccattctgaccatggagcccgtcctggggggcaccccgtacctggacaaatttgtggtgagctccagccgccagggccaaggctccggccagatgctgtgggagtgcctgcggcgggaccttcagacacttttctggcgctcccgggtcaccaaccccatcaatccctggtacttcaaacacagtgatggcagcttctccaacaagcagtggatcttcttctggtttggcctggctgatatccgggactcctatgagttggtcaaccacgccaagggactgccagactcctttcacaagccagcttctgacccaggcagctgaccctcaccatggacactacaggccctggaatggccagggtggaccaaaagccatgccagctgggcatgaccccaggcagccagccacaggctgaagggggcttgttggctgagtgatctgcagaggagaaagcagccccagctctgcccagaggaggcgctgaagtgggacaagcacaggaaagaaggggaccagtctaggaccccaactcgactcactctaaagctacaaccaaatggccttcgattttcaacctggggattaggggaggggagggtgccttccagggctctactcaggactaaccctaagggtgagctagtttctgtgcctctgtgctatgttttgaggctcccttacccaaaataatacccctgcctgcgtgatattctaccattcattttaattcctttgggtcttgcagtttttcaggaggccttgattaaaatgcaaatactt

SEQ ID NO: 157310 - DNA, 1995 bp, Homo sapiens
  Payload ID: 10832
  Gene Symbol: NAGS
  Gene Name: N-acetylglutamate synthase
  ENST ID: ENST00000589767
  CDS Start-End: 1-1536
agctgtggcgcgcggcggcgggcggcgaggggcaccagcccggggcgccggctcagcaccgcctggtcgcagccccagcccccgcccgaggagtacgcgggcgcggacgacgtctcccagtcgcccgtcgccgaggagccgtcgtgggtgccgagtcccaggcccccggtgccccacgagtccccagagcctccttcgggccgctcgctggtgcagcgggacatccaggccttcctgaaccagtgcggggccagccctggggaggcgcgccactggctcacgcagttccagacctgccatcactccgcggacaagcccttcgccgtcatcgaggtggacgaggaggtgctcaagtgccagcagggcgtatccagtctggcctttgccctggccttcttgcagcgcatggacatgaagccgctggtggtcctggggctgccggcccctacggctccctcgggctgtctttccttctgggaggccaaggcgcagctggccaagagctgcaaggtgctggtagacgcgcttcgacacaacgccgccgctgctgtgccattttttggcggcgggtctgtgctacgcgctgccgagccggctccccatgccagctacggcggcatcgtctcggtggagacagacctgctgcagtggtgcctggagtcgggcagcatccccatcctgtgccccatcggggagacggccgcgcgccgctccgtgcttctcgactccctggaggtgaccgcgtcgctggccaaggcgctgcggcccaccaaaatcatcttcctcaataacacaggcggcctgcgcgacagcagtcataaggtcctgagtaacgtgaacctgcccgccgacctggacctggtgtgcaacgccgagtgggtgagcacaaaagaacggcagcagatgcggctcatcgtggacgtgctcagccgcctgccccaccactcctcggccgtcatcaccgccgctagcacgctgctcactgagctctttagcaacaaggggtccgggaccctgttcaagaacgccgagcgaatgctacgggtgcgcagcctggacaagctggaccagggccgtctagtggacctggtcaacgccagcttcggcaagaagctcagggacgactacctggcctcgctgcgcccgcggctgcactccatctacgtctccgagggcctgccgctctcccgctgcgccaggtacaacgccgccgccattctgaccatggagcccgtcctggggggcaccccgtacctggacaaatttgtggtgagctccagccgccagggccaaggctccggccagatgctgtgggagtgcctgcggcgggaccttcagacacttttctggcgctcccgggtcaccaaccccatcaatccctggtacttcaaacacagtgatggcagcttctccaacaagcagtggatcttcttctggtttggcctggctgatatccgggactcctatgagttggtcaaccacgccaagggactgccagactcctttcacaagccagcttctgacccaggcagctgaccctcaccatggacactacaggccctggaatggccagggtggaccaaaagccatgccagctgggcatgaccccaggcagccagccacaggctgaagggggcttgttggctgagtgatctgcagaggagaaagcagccccagctctgcccagaggaggcgctgaagtgggacaagcacaggaaagaaggggaccagtctaggaccccaactcgactcactctaaagctacaaccaaatggccttcgattttcaacctggggattaggggaggggagggtgccttccagggctctactcaggactaaccctaagggtgagctagtttctgtgcctctgtgctatgttttgaggctcccttacccaaaataatacccctgcctgcgtgatattctaccattcattttaattcctttgggtcttgcagtttttcaggaggccttgattaaaatgcaaatactt

SEQ ID NO: 157311 - DNA, 2461 bp, Homo sapiens
  Payload ID: 10833
  Gene Symbol: NPL
  Gene Name: N-acetylneuraminate pyruvate lyase (dihydrodipicolinate synthase)
  Uniprot ID: Q9BXD5
  ENST ID: ENST00000258317
  CDS Start-End: 23-985
ttccagacctaccagcagctcaatggccttcccaaagaagaaacttcagggtcttgtggctgcaaccatcacgccaatgactgagaatggagaaatcaacttttcagtaattggtcagtatgtggattatcttgtgaaagaacagggagtgaagaacatttttgtgaatggcacaacaggagaaggcctgtccctgagcgtctcagagcgtcgccaggttgcagaggagtgggtgacaaaagggaaggacaagctggatcaggtgataattcacgtaggagcactgagcttgaaggagtcacaggaactggcccaacatgcagcagaaataggagctgatggcatcgctgtcattgcaccgttcttcctcaagccatggaccaaagatatcctgattaatttcctaaaggaagtggctgctgccgcccctgccctgccattttattactatcacattcctgccttgacaggggtaaagattcgtgctgaggagttgttggatgggattctggataagatccccaccttccaagggctgaaattcagtgatacagatctcttagacttcgggcaatgtgttgatcagaatcgccagcaacagtttgctttcctttttggggtggatgagcaactgttgagtgctctggtgatgggagcaactggagcagtgggcagtacctataactacctgggaaaaaagacaaaccagatgttggaggcttttgaacaaaaggacttctctttagccctgaactatcagttttgtatccagagatttatcaactttgttgtcaaactaggttttggagtgtcacagaccaaagccatcatgactctggtctctgggattccaatgggcccaccccggcttccactgcagaaagcctccagggagtttactgatagtgctgaagctaaactgaagagcctggatttcctttctttcactgatttaaaggatggaaacttggaagctggtagctagtgcctctctatcaaatcagggtttgcaccttgagacataatctaccttaaatagtgcatttttttctcagggaattttagatgaacttgaataaactctcctagcaaatgaaatctcacaataagcattgaggtaccttttgtgagccttaaaaagtcttattttgtgaaggggcaaaaactctaggagtcacaactctcagtcattcatttcacagatttttttgtggagaaatttctgtttatatggatgaaatggaatcaagaggaaaattgtaattgattaattccatctgtctttaggagctctcattatctcggtctctggttcctaatcctattttaaagttgtctaattttaaaccactataatatgtcttcattttaataaatattcatttggaatctaggaaaactctgagctactgcatttaggcaggcactttaataccaaactgtaacatgtctcaactgtatacaactcaaaatacaccagctcatttggctgctcagtctaactctagaatggatgcttttgaattcatttcgatgtcaccacttttcgctctttaaaaacactgggtcaggtgaggacttgtttcagttcctataactaagtaaagggcggctttctcataacaaaggaaaaagtcttccccaaagatgaatttaagtctccacttttttctatacagaaaactcaaaactcaaagtttcaaagaaccaaaggactcttcctctgggcaccacaaacttccccttcctccactgagaagactgtctctcccgcaggaccctgaattattgaaatcgaaggctgacttcctttctgcagtgagcccaggggctaatgttattatcctgtcacacttgcaactagtgacttttgtttagtgatagaagatttggggaggacccaaaggactcagaactttctctccatacctccttttactcttttctttctgtgtaatgtatcaacaactgtttaatctcccttctaacaaaccttgatataagctttctgatatcaaagtatattgacagttaacccttactgattttaaacttgactatccagtctgttaattacctaagattttgttttcatttcatctctaattgttttgatcattggcagagaaagagtatttgaaattcatatcagttttgctccttattttaatctctttgaattaaaaataaaactttttcaaaatggaaatttgaaattataagtagacttcaattatctttgctaatcctctctttaattagtcagctagttaaaagttgttatattcatatatcctcaaccctctttttgcctttgtagcttttaatttcctgaaagaagaaaatgagttgttcgtttttggttctgaggatgtgatatccgtacttactgatactaaagccaaatttaaattctaaaattaattcttgggtatccaataaacaaagaactatttttcta

SEQ ID NO: 157312 - DNA, 745 bp, Homo sapiens
  Payload ID: 10833
  Gene Symbol: NPL
  Gene Name: N-acetylneuraminate pyruvate lyase (dihydrodipicolinate synthase)
  Uniprot ID: Q9BXD5
  ENST ID: ENST00000367552
  CDS Start-End: 23-745
ttccagacctaccagcagctcaatggccttcccaaagaagaaacttcagggtcttgtggctgcaaccatcacgccaatgactgagaatggagaaatcaacttttcagtaattggtcagtatgtggattatcttgtgaaagaacagggagtgaagaacatttttgtgaatggcacaacaggagaaggcctgtccctgagcgtctcagagcgtcgccaggttgcagaggagtgggtgacaaaagggaaggacaagctggatcaggtgataattcacgtaggagcactgagcttgaaggagtcacaggaactggcccaacatgcagcagaaataggagctgatggcatcgctgtcattgcaccgttcttcctcaagccatggaccaaagatatcctgattaatttcctaaaggaagtggctgctgccgcccctgccctgccattttattactatcacattcctgccttgacaggggtaaagattcgtgctgaggagttgttggatgggattctggataagatccccaccttccaagggctgaaattcagtgatacagatctcttagacttcgggcaatgtgttgatcagaatcgccagcaacagtttgctttcctttttggggtggatgagttttgtatccagagatttatcaactttgttgtcaaactagaaaactcaaaactcaaagtttcaaagaaccaaaggactcttcctctgggcaccacaaacttccccttcctccactga

SEQ ID NO: 157313 - DNA, 2231 bp, Homo sapiens
  Payload ID: 10833
  Gene Symbol: NPL
  Gene Name: N-acetylneuraminate pyruvate lyase (dihydrodipicolinate synthase)
  Uniprot ID: Q9BXD5
  ENST ID: ENST00000367553
  CDS Start-End: 45-1007
acttaatgggctcaaggtcacctacctgacctaccagcagctcaatggccttcccaaagaagaaacttcagggtcttgtggctgcaaccatcacgccaatgactgagaatggagaaatcaacttttcagtaattggtcagtatgtggattatcttgtgaaagaacagggagtgaagaacatttttgtgaatggcacaacaggagaaggcctgtccctgagcgtctcagagcgtcgccaggttgcagaggagtgggtgacaaaagggaaggacaagctggatcaggtgataattcacgtaggagcactgagcttgaaggagtcacaggaactggcccaacatgcagcagaaataggagctgatggcatcgctgtcattgcaccgttcttcctcaagccatggaccaaagatatcctgattaatttcctaaaggaagtggctgctgccgcccctgccctgccattttattactatcacattcctgccttgacaggggtaaagattcgtgctgaggagttgttggatgggattctggataagatccccaccttccaagggctgaaattcagtgatacagatctcttagacttcgggcaatgtgttgatcagaatcgccagcaacagtttgctttcctttttggggtggatgagcaactgttgagtgctctggtgatgggagcaactggagcagtgggcagtacctataactacctgggaaaaaagacaaaccagatgttggaggcttttgaacaaaaggacttctctttagccctgaactatcagttttgtatccagagatttatcaactttgttgtcaaactaggttttggagtgtcacagaccaaagccatcatgactctggtctctgggattccaatgggcccaccccggcttccactgcagaaagcctccagggagtttactgatagtgctgaagctaaactgaagagcctggatttcctttctttcactgatttaaaggatggaaacttggaagctggtagctagtgcctctctatcaaatcagggtttgcaccttgagacataatctaccttaaatagtgcatttttttctcagggaattttagatgaacttgaataaactctcctagcaaatgaaatctcacaataagcattgaggtaccttttgtgagccttaaaaagtcttattttgtgaaggggcaaaaactctaggagtcacaactctcagtcattcatttcacagatttttttgtggagaaatttctgtttatatggatgaaatggaatcaagaggaaaattgtaattgattaattccatctgtctttaggagctctcattatctcggtctctggttcctaatcctattttaaagttgtctaattttaaaccactataatatgtcttcattttaataaatattcatttggaatctaggaaaactctgagctactgcatttaggcaggcactttaataccaaactgtaacatgtctcaactgtatacaactcaaaatacaccagctcatttggctgctcagtctaactctagaatggatgcttttgaattcatttcgatgtcaccacttttcgctctttaaaaacactgggtcaggtgaggacttgtttcagttcctataactaagtaaagggcggctttctcataacaaaggaaaaagtcttccccaaagatgaatttaagtctccacttttttctatacagaaaactcaaaactcaaagtttcaaagaaccaaaggactcttcctctgggcaccacaaacttccccttcctccactgagaagactgtctctcccgcaggaccctgaattattgaaatcgaaggctgacttcctttctgcagtgagcccaggggctaatgttattatcctgtcacacttgcaactagtgacttttgtttagtgatagaagatttggggaggacccaaaggactcagaactttctctccatacctccttttactcttttctttctgtgtaatgtatcaacaactgtttaatctcccttctaacaaaccttgatataagctttctgatatcaaagtatattgacagttaacccttactgattttaaacttgactatccagtctgttaattacctaagattttgttttcatttcatctctaattgttttgatcattggcagagaaagagtatttgaaattcatatcagttttgctccttattttaatctctttgaattaaaaataaaactttttcaaaatggaaa

SEQ ID NO: 157314 - DNA, 3027 bp, Homo sapiens
  Payload ID: 10833
  Gene Symbol: NPL
  Gene Name: N-acetylneuraminate pyruvate lyase (dihydrodipicolinate synthase)
  Uniprot ID: Q9BXD5
  ENST ID: ENST00000367554
  CDS Start-End: 646-1551
gcagacgaggcagggggaggtttgcactcggcgtggcgcgggtgagccgcgtgctctcgggcacccggccgccagttcggatgcttccgatcctcggggagccggggcgctgcgccggagtcacttcagcccatgttgttcaggtgacacccggggaagagcagactccagtgtgcaaaacgtttcggggtttccgggccagcggttccgggcgcgcctcgcgggcggcggcgcagaactacaacccccaggctccctggcgtggcggcacgtgggcccgagccgggcggccgcggatataaagcgcggcggcggctgccgggcggagcggctgcacggacaagagcggaggcctggagaaatcaacttttcagtaattggtcagtatgtggattatcttgtgaaagaacagggagtgaagaacatttttgtgaatggcacaacaggagaaggcctgtccctgagcgtctcagagcgtcgccaggttgcagaggagtgggtgacaaaagggaaggacaagtgagtggctgcatgaggataaaaatgccctttggcaacagctgtattcagtgagcctcttccccagaggatacgccctccctgcttcctggtcagagccggggcttgaggtcagctggtgggaagatgagcagggcccccgggatcctggcttcttggagaagagccccctccctttctgtgcagaagggcagccaaactgctagacacacctgccacccagaggttccgctgggaaactgcttcttacctgtctacaaggccagtcccctcacagttacccgtctttgggctgaaaggctggatcaggtgataattcacgtaggagcactgagcttgaaggagtcacaggaactggcccaacatgcagcagaaataggagctgatggcatcgctgtcattgcaccgttcttcctcaagccatggaccaaagatatcctgattaatttcctaaaggaagtggctgctgccgcccctgccctgccattttattactatcacattcctgccttgacaggggtaaagattcgtgctgaggagttgttggatgggattctggataagatccccaccttccaagggctgaaattcagtgatacagatctcttagacttcgggcaatgtgttgatcagaatcgccagcaacagtttgctttcctttttggggtggatgagcaactgttgagtgctctggtgatgggagcaactggagcagtgggcagtacctataactacctgggaaaaaagacaaaccagatgttggaggcttttgaacaaaaggacttctctttagccctgaactatcagttttgtatccagagatttatcaactttgttgtcaaactaggttttggagtgtcacagaccaaagccatcatgactctggtctctgggattccaatgggcccaccccggcttccactgcagaaagcctccagggagtttactgatagtgctgaagctaaactgaagagcctggatttcctttctttcactgatttaaaggatggaaacttggaagctggtagctagtgcctctctatcaaatcagggtttgcaccttgagacataatctaccttaaatagtgcatttttttctcagggaattttagatgaacttgaataaactctcctagcaaatgaaatctcacaataagcattgaggtaccttttgtgagccttaaaaagtcttattttgtgaaggggcaaaaactctaggagtcacaactctcagtcattcatttcacagatttttttgtggagaaatttctgtttatatggatgaaatggaatcaagaggaaaattgtaattgattaattccatctgtctttaggagctctcattatctcggtctctggttcctaatcctattttaaagttgtctaattttaaaccactataatatgtcttcattttaataaatattcatttggaatctaggaaaactctgagctactgcatttaggcaggcactttaataccaaactgtaacatgtctcaactgtatacaactcaaaatacaccagctcatttggctgctcagtctaactctagaatggatgcttttgaattcatttcgatgtcaccacttttcgctctttaaaaacactgggtcaggtgaggacttgtttcagttcctataactaagtaaagggcggctttctcataacaaaggaaaaagtcttccccaaagatgaatttaagtctccacttttttctatacagaaaactcaaaactcaaagtttcaaagaaccaaaggactcttcctctgggcaccacaaacttccccttcctccactgagaagactgtctctcccgcaggaccctgaattattgaaatcgaaggctgacttcctttctgcagtgagcccaggggctaatgttattatcctgtcacacttgcaactagtgacttttgtttagtgatagaagatttggggaggacccaaaggactcagaactttctctccatacctccttttactcttttctttctgtgtaatgtatcaacaactgtttaatctcccttctaacaaaccttgatataagctttctgatatcaaagtatattgacagttaacccttactgattttaaacttgactatccagtctgttaattacctaagattttgttttcatttcatctctaattgttttgatcattggcagagaaagagtatttgaaattcatatcagttttgctccttattttaatctctttgaattaaaaataaaactttttcaaaatggaaatttgaaattataagtagacttcaattatctttgctaatcctctctttaattagtcagctagttaaaagttgttatattcatatatcctcaaccctctttttgcctttgtagcttttaatttcctgaaagaagaaaatgagttgttcgtttttggttctgaggatgtgatatccgtacttactgatactaaagccaaatttaaattctaaaattaattcttgggtatccaataaacaaagaactatttttcta

SEQ ID NO: 157315 - DNA, 1536 bp, Homo sapiens
  Payload ID: 10833
  Gene Symbol: NPL
  Gene Name: N-acetylneuraminate pyruvate lyase (dihydrodipicolinate synthase)
  Uniprot ID: Q9BXD5
  ENST ID: ENST00000367555
  CDS Start-End: 109-831
gggcggagcggctgcacggacaagagcggaggcctggaaggggaaactgaagcagaaagaggttacttaatgggctcaaggtcacctacctgacctaccagcagctcaatggccttcccaaagaagaaacttcagggtcttgtggctgcaaccatcacgccaatgactgagaatggagaaatcaacttttcagtaattggtcagtatgtggattatcttgtgaaagaacagggagtgaagaacatttttgtgaatggcacaacaggagaaggcctgtccctgagcgtctcagagcgtcgccaggttgcagaggagtgggtgacaaaagggaaggacaagctggatcaggtgataattcacgtaggagcactgagcttgaaggagtcacaggaactggcccaacatgcagcagaaataggagctgatggcatcgctgtcattgcaccgttcttcctcaagccatggaccaaagatatcctgattaatttcctaaaggaagtggctgctgccgcccctgccctgccattttattactatcacattcctgccttgacaggggtaaagattcgtgctgaggagttgttggatgggattctggataagatccccaccttccaagggctgaaattcagtgatacagatctcttagacttcgggcaatgtgttgatcagaatcgccagcaacagtttgctttcctttttggggtggatgagttttgtatccagagatttatcaactttgttgtcaaactagaaaactcaaaactcaaagtttcaaagaaccaaaggactcttcctctgggcaccacaaacttccccttcctccactgagaagactgtctctcccgcaggaccctgaattattgaaatcgaaggctgacttcctttctgcagtgagcccaggggctaatgttattatcctgtcacacttgcaactagtgacttttgtttagtgatagaagatttggggaggacccaaaggactcagaactttctctccatacctccttttactcttttctttctgtgtaatgtatcaacaactgtttaatctcccttctaacaaaccttgatataagctttctgatatcaaagtatattgacagttaacccttactgattttaaacttgactatccagtctgttaattacctaagattttgttttcatttcatctctaattgttttgatcattggcagagaaagagtatttgaaattcatatcagttttgctccttattttaatctctttgaattaaaaataaaactttttcaaaatggaaatttgaaattataagtagacttcaattatctttgctaatcctctctttaattagtcagctagttaaaagttgttatattcatatatcctcaaccctctttttgcctttgtagcttttaatttcctgaaagaagaaaatgagttgttcgtttttggttctgaggatgtgatatccgtacttactgatactaaagccaaatttaaattctaaaattaattcttgggtatccaataaacaaagaactatttttcta

SEQ ID NO: 157316 - DNA, 2376 bp, Homo sapiens
  Payload ID: 10833
  Gene Symbol: NPL
  Gene Name: N-acetylneuraminate pyruvate lyase (dihydrodipicolinate synthase)
  ENST ID: ENST00000614468
  CDS Start-End: 23-715
ttccagacctaccagcagctcaatggccttcccaaagaagaaacttcagggtcttgtggctgcaaccatcacgccaatgactgagaatggagaaatcaacttttcagtaattggtcagtatgtggattatcttgtgaaagaacagggagtgaagaacatttttgtgaatggcacaacaggagaaggcctgtccctgagcgtctcagagcgtcgccaggttgcagaggagtgggtgacaaaagggaaggacaagctggatcaggtgataattcacgtaggagcactgagcttgaaggagtcacaggaactggcccaacatgcagcagaaataggagctgatggcatcgctgtcattgcaccgttcttcctcaagccatggaccaaagatatcctgattaatttcctaaaggaagtggctgctgccgcccctgccctgccattttattactatcacattcctgccttgacaggggtaaagattcgtgctgaggagttgttggatgggattctggataagatccccaccttccaagggctgaaattcagtgatacagatctcttagacttcgggcaatgtgttgatcagaatcgccagcaacagtttgctttcctttttggggtggatgagcaactgttgagtgctctggtgatgggagcaactggagcagtgggcagttttgtatccagagatttatcaactttgttgtcaaactaggttttggagtgtcacagaccaaagccatcatgactctggtctctgggattccaatgggcccaccccggcttccactgcagaaagcctccagggagtttactgatagtgctgaagctaaactgaagagcctggatttcctttctttcactgatttaaaggatggaaacttggaagctggtagctagtgcctctctatcaaatcagggtttgcaccttgagacataatctaccttaaatagtgcatttttttctcagggaattttagatgaacttgaataaactctcctagcaaatgaaatctcacaataagcattgaggtaccttttgtgagccttaaaaagtcttattttgtgaaggggcaaaaactctaggagtcacaactctcagtcattcatttcacagatttttttgtggagaaatttctgtttatatggatgaaatggaatcaagaggaaaattgtaattgattaattccatctgtctttaggagctctcattatctcggtctctggttcctaatcctattttaaagttgtctaattttaaaccactataatatgtcttcattttaataaatattcatttggaatctaggaaaactctgagctactgcatttaggcaggcactttaataccaaactgtaacatgtctcaactgtatacaactcaaaatacaccagctcatttggctgctcagtctaactctagaatggatgcttttgaattcatttcgatgtcaccacttttcgctctttaaaaacactgggtcaggtgaggacttgtttcagttcctataactaagtaaagggcggctttctcataacaaaggaaaaagtcttccccaaagatgaatttaagtctccacttttttctatacagaaaactcaaaactcaaagtttcaaagaaccaaaggactcttcctctgggcaccacaaacttccccttcctccactgagaagactgtctctcccgcaggaccctgaattattgaaatcgaaggctgacttcctttctgcagtgagcccaggggctaatgttattatcctgtcacacttgcaactagtgacttttgtttagtgatagaagatttggggaggacccaaaggactcagaactttctctccatacctccttttactcttttctttctgtgtaatgtatcaacaactgtttaatctcccttctaacaaaccttgatataagctttctgatatcaaagtatattgacagttaacccttactgattttaaacttgactatccagtctgttaattacctaagattttgttttcatttcatctctaattgttttgatcattggcagagaaagagtatttgaaattcatatcagttttgctccttattttaatctctttgaattaaaaataaaactttttcaaaatggaaatttgaaattataagtagacttcaattatctttgctaatcctctctttaattagtcagctagttaaaagttgttatattcatatatcctcaaccctctttttgcctttgtagcttttaatttcctgaaagaagaaaatgagttgttcgtttttggttctgaggatgtgatatccgtacttactgatactaaagccaaatttaaattctaaaattaattcttgggtatccaataaacaaagaactatttttcta

SEQ ID NO: 157317 - DNA, 3964 bp, Homo sapiens
  Payload ID: 10834
  Gene Symbol: NANP
  Gene Name: N-acetylneuraminic acid phosphatase
  Uniprot ID: Q8TBE9
  ENST ID: ENST00000304788
  CDS Start-End: 228-974
ggcgccgacacacgtttccagggctcttgagagaccataccctgggagtctcgcgggatctcacttttctcggcggcgcagggaatgagacagatcgcgggaattccacccgcgccgggagatggtctggtgacttcgcggctcctcccacgtctctctgggcagtccgccttgcgcatgcgcaggcggcggtggcaaggctacggttcgcgccagcggccggcgctatggggctgagccgcgtgcgggcggttttctttgacttggacaacactctcatcgacacggccggggcgagcaggagaggcatgttggaggtgataaaactcttacaatcaaaataccattataaagaagaggctgaaatcatctgtgataaagttcaagttaaactcagcaaggaatgttttcatccttacaatacatgcattactgatttaaggacttcacattgggaagaagcaatccaggaaacaaaaggtggtgcagccaatagaaaattggctgaagaatgttatttcctttggaaatctacacgtttacagcatatgacactagcagaagacgtcaaagccatgcttactgaacttcgaaaggaggtccgcctacttctattaacgaatggggacagacagacccagagggagaagattgaggcttgtgcctgtcagtcctattttgacgctgttgttgtaggtggagagcagagagaggagaaaccagcaccgtccatattttattactgctgcaatcttctcggagtacaacctggggactgtgtgatggtcggtgacacattagaaaccgacatccaaggaggcctcaatgcaggattgaaagcaacagtctggatcaataaaaatggaatagtgccactgaagtcctccccagttccgcattacatggtttcttctgtgctagagttacctgctctcttacaaagtatagactgcaaagtcagtatgtccacttaaagcacataaaagggcatgattatgaatgttagaatcaatttgctgagtatgaaataagaaaagttagggcactccacttatgataatccagctctaagaataattttacttatgatttaatggccaatattttgaaggtcttcccaaccctattgcttctaagttgtaacaaccaaccattgagtggtacttatatctgaaaattcagattgcatgaattcaggtcagtagtatagcccagaaaatttaaggaaatatattatttgttagtctgtatctggagctttttaaaattatgttattaatcttttagtatcttggctgcataatgccaagcaggattgctttacacatggatgcacaaatgtaaggtttatcttctggcttaaaaatagatatttttaaaaaatagattttctaaaacacagatttatgaaagcaagtgaatctggttaatatgaaataagtactaagtcacatgcaaatcaaggtattatatagtgaaattattttgcatattttgaaaacataaaccatagtttttgcctactttggatgtatactttcttttatgaacctgatttttctgtatgacatttttttttttttcagagggcagggagcaatttttctatggcatgtgacagattcctccagttagaaaaagctgttaaaatcaacacatggtgctcctttaccgtgacattttctcacctgtgcacagtgagccggtagcttccttttagtcttcacctctcaaggaaatgtttttactgtcttttcccagacacacagtggggttgagggagctaggctgttttgctagagataattgcaaggcacgtggcactaaaagtcatttttcttctgtggatccataagaggaacatttcctcagtgtagcctaacaatgcagcccccaatctgttcctttttttttttgaaatgggatctctgtcgcccaggttggagtgccatggcaccatctcggctcactgcaacctctgcctcctgagctcaagtgatcctcccacctcagcctcccaagggtgtgtgtgactacaagtacacactaccacgcccagctaatgtgtgtttttgtagagatgggattttgccatgttgcccaggctggtctcgaattcctggattcaagtgatcctcccacctcagcctcctaaagtcctaggattataggcatgagccactgtgcctggccccctcatctgatagaaaattagattttgctatgagccatttcctgagggccaatttaatactcgtgtgactcttcttagagttaccatctgccttaaatttcctctgtttttcacattcttggaaatatatcattgttttgcaaatttctatatctaattcagggtttaccaggagcttaataattaatggctacatagcaaggcatcgtcttggaaccggagaattttctctagactattaggctagacagtctcatgattatactaaccaaacctggagtaaagtggttgaaaaaaaagaaagtataaaggggcttattaaagtggttaataaatatgatttaggttggtttttgatatgtttttcttccaactgttatataagaaactactaatgtaaaatagtaggctatatgttgggatgtgtatagctatgtcttcaagactaatactcagagaatcaaattgtagattgtacctatctgtgagcctatttctttagccagttttctgtctactgccaagaaacagaattctctgcctcatgcaaatgccctttcgtgtttacttttcgctctagatttttaaaaatgtgattgtgcccttgactgtaccaaagtgctgttgctataacagtgaacatttgtgaacagaggatgtttgtagtttcaaatgcagtacccatatgaccttgatcatattttagctatttaaaaattaagttggaggattttggcagaagtagtcacatgcatgattgctctgatagattggttggcgtgtgctgcagggggcttgtccttttaactctcccacaggatggatgtaggcagtgtcacattcattatgctgagagtgaaggttcatcactcctgtatcatggtagcaaatctcaacaggatagcttctaggatgttaagtgagcagttctccagcagaaatgatgtagaaggaaaaaattgaataattaaatttccttgtcttcacagtttgtattctacagagtacagtaatgtattacattccatttgcacccttccttagggaagaactttgtggttatctaccttctgagtggaatgttacagaaaatattttaaaatattggaataaacctatgattttattaatattttttgttttagaataatattccttaaaattatgggtgatgttttgtcatctttattttttttcaaagtttccctgtagtggccttctcacacaaagccagaggccctccctaacactgcttacagaggtgggcctagaacagacatgaatggacactgcacctggaataccagcacctggtggggaggtttggttccatgtgcacctccacatacaaggcacgaacatctcagatctgggagtgcccaggacccagtggatgctcagtattgtaggaaagcaggtctttaccaaagttcttggtttattgctttcaaacttctttgcaaccttcagtaagaaacattttctatcataacctctttaacacatttatagtgttagataacactgtaactatatataaatataaatataacacatgtatataaataaatataaatataacattttatagtataacattaatatgtgtatgggatccagttttatatgtttaattttcataaaacattcttgttacgtgtgatgatatttttcattccattcttttttgaattagggaatatattcattgttgaacaagtactacttgtagtacacaagtcaaaaaaataaaagggtgaatggtgaaaa

SEQ ID NO: 157318 - DNA, 1170 bp, Homo sapiens
  Payload ID: 10835
  Gene Symbol: NANS
  Gene Name: N-acetylneuraminic acid synthase
  Uniprot ID: Q9NR45
  ENST ID: ENST00000210444
  CDS Start-End: 71-1150
agagtagaggcggcggcggcggcggccggacccagactggtagtgaggctttggaccccgagccgctgcaatgccgctggagctggagctgtgtcccgggcgctgggtgggcgggcaacacccgtgcttcatcattgccgagatcggccagaaccaccagggcgacctggacgtagccaagcgcatgatccgcatggccaaggagtgtggggctgattgtgctaagttccagaagagtgagctagaattcaagtttaatcggaaagccttggagaggccatacacctcgaagcattcctgggggaagacgtacggggagcacaaacgacatctggagttcagccatgaccagtacagggagctgcagaggtacgccgaggaggttgggatcttcttcactgcctctggcatggatgagatggcagttgaattcctgcatgaactgaatgttccatttttcaaagttggatctggagacactaataattttccttatctggaaaagacagccaaaaaaggtcgcccaatggtgatctccagtgggatgcagtcaatggacaccatgaagcaagtttatcagatcgtgaagcccctcaaccccaacttctgcttcttgcagtgtaccagcgcatacccgctccagcctgaggacgtcaacctgcgggtcatctcggaatatcagaagctctttcctgacattcccatagggtattctgggcatgaaacaggcatagcgatatctgtggccgcagtggctctgggggccaaggtgttggaacgtcacataactttggacaagacctggaaggggagtgaccactcggcctcgctggagcctggagaactggccgagctggtgcggtcagtgcgtcttgtggagcgtgccctgggctccccaaccaagcagctgctgccctgtgagatggcctgcaatgagaagctgggcaagtctgtggtggccaaagtgaaaattccggaaggcaccattctaacaatggacatgctcaccgtgaaggtgggtgagcccaaaggctatcctcctgaagacatctttaatctagtgggcaagaaggtcctggtcactgttgaagaggatgacaccatcatggaagaattggtagataatcatggcaaaaaaatcaagtcttaaaaataaagtgccattctctg

SEQ ID NO: 157319 - DNA, 715 bp, Homo sapiens
  Payload ID: 10835
  Gene Symbol: NANS
  Gene Name: N-acetylneuraminic acid synthase
  ENST ID: ENST00000415280
  CDS Start-End: 296-715
tttttctacttgtatgttattccttgcctgtcataacaacagtgtttttggacaatggtgaaaaggagctccctctttgatttttgtagatggcagttgaattcctgcatgaactgaatgttccatttttcaaagttggatctggagacactaataattttccttatctggaaaagacagccaaaaaaggggctggcacagtgttttaagagatgtctgtggagttcagttgaatgatgagaccagcagttgggatgtgttggggagagtcagaacctctaaagagaaagtgctgatggtgttggtgctggattactcaggtcgcccaatggtgatctccagtgggatgcagtcaatggacaccatgaagcaagtttatcagatcgtgaagcccctcaaccccaacttctgcttcttgcagtgtaccagcgcatacccgctccagcctgaggacgtcaacctgcgggtcatctcggaatatcagaagctctttcctgacattcccatagggtattctgggcatgaaacaggcatagcgatatctgtggccgcagtggctctgggggccaaggtgttggaacgtcacataactttggacaagacctggaaggggagtgaccactcggcctcgctggagcctggagaactggccgagctggtgcggtcagtgcgtcttgtggagcgtgccctgggctccccaaccaagcagctgctg

SEQ ID NO: 157320 - DNA, 1378 bp, Homo sapiens
  Payload ID: 10835
  Gene Symbol: NANS
  Gene Name: N-acetylneuraminic acid synthase
  ENST ID: ENST00000427646
  CDS Start-End: 1-348
gaggacgtcaacctgcgggtcatctcggaatatcagaagctctttcctgacattcccatagggtattctgggcatgaaacaggcatagcgatatctgtggccgcagtggctctgggggccaaggtgttggaacgtcacataactttggacaagacctggaaggggagtgaccactcggcctcgctggagcctggagaactggccgagctggtgcggtcagtgcgtcttgtggagcgtgccctgggctccccaaccaagcagctgctgccctgtgagatggcctgcaatgagaaggtgtgtcctgccggactctactcggttctgctgccgtgtgtggaaaaaggataggctggcctgagagggatggtcaggaccagccctccctgagccaggctgatgaaatgatcagtgaatgtgctcccacccgtgtcagcttcttcaggcttctcttcagtaatgcatgtcactctggcctgtagcagcagcaggagacacatgttatctaactttagcagtttctctggccacctagggtcacattagagtcttccactaattctctgaagcccatggccccagtactcctagactccagaatatgtaacaggagtgaggccctggaataagtcaagtctgggctcccttggagcaggtaagccctgagaaacatttaggcacggtgttccctgaggtaccagaagagcctgtggcatttcctaagccagggtggcactggtgggaagggcagtgagtcgttgcagaggtgggtgggtgatgatgcagctattccttgtgcaacagtgaccttcagacagaggaactggtgggcctagaagcactgcctggcatgctgactatcagggcttcctggaagccgtggcctggaccttcttgccttctgagtcatagagccaggcaggcatcctggggctgccaggcacacacacacctaacctgtaggctgtcggggtcaaggcaaagaccaaacaccaggcatgcctgggactgttgtcaccttttattctagtggggcctacctgcttccccaaatcaaagatgcatctataccaggaaattaaaataaagtaaaaagaaatagtttctttatagaggaaacaggagagaattagaccagaaaccagagtaagatttataacagctgagcacttaatttggctctctgagcagacagtaaaacataacaggatgcatgattatcacttgacattttttcctggcaccacattccaagcagaattgattccttgtactcttacgtggaggatatagagtaataaaacacgtaatttatttgaaagcatttatagagaagacaaacactggtcatgagcttcaggtacccttcattccctcatct

SEQ ID NO: 157321 - DNA, 1815 bp, Homo sapiens
  Payload ID: 10836
  Gene Symbol: NAT1
  Gene Name: N-acetyltransferase 1 (arylamine N-acetyltransferase)
  Uniprot ID: P18440
  ENST ID: ENST00000307719
  CDS Start-End: 174-1046
ctttggaagtgagagcacttcctcatagaccttggatgtgggaggattgcattcagtctagttcctggttgccggctgaaataacctgaattcaagccaggaagaagcagcaatctgtcttctggattaaaactgaagatcaacctactttcaacttactaagaaaggggatcatggacattgaagcatatcttgaaagaattggctataagaagtctaggaacaaattggacttggaaacattaactgacattcttcaacaccagatccgagctgttccctttgagaaccttaacatccattgtggggatgccatggacttaggcttagaggccatttttgatcaagttgtgagaagaaatcggggtggatggtgtctccaggtcaatcatcttctgtactgggctctgaccactattggttttgagaccacgatgttgggagggtatgtttacagcactccagccaaaaaatacagcactggcatgattcaccttctcctgcaggtgaccattgatggcaggaactacattgtcgatgctgggtttggacgctcataccagatgtggcagcctctggagttaatttctgggaaggatcagcctcaggtgccttgtgtcttccgtttgacggaagagaatggattctggtatctagaccaaatcagaagggaacagtacattccaaatgaagaatttcttcattctgatctcctagaagacagcaaataccgaaaaatctactcctttactcttaagcctcgaacaattgaagattttgagtctatgaatacatacctgcagacatctccatcatctgtgtttactagtaaatcattttgttccttgcagaccccagatggggttcactgtttggtgggcttcaccctcacccataggagattcaattataaggacaatacagatctaatagagttcaagactctgagtgaggaagaaatagaaaaagtgctgaaaaatatatttaatatttccttgcagagaaagcttgtgcccaaacatggtgatagattttttactatttagaataaggagtaaaacaatcttgtctatttgtcatccagctcaccagttatcaactgacgacctatcatgtatcttctgtacccttaccttattttgaagaaaatcctagacatcaaatcatttcacctataaaaatgtcatcatatataattaaacagctttttaaagaaacataaccacaaaccttttcaaataataataataataataataaaaaatgtattttaaagatggcctgtggttatcttggaaattggtgatttatgctagaaagcttttaatgttggtttattgttgaattcctagaaaagttttattggtagatgagtaaataaaatattgtaaaaaaacttattgtctataaagtatattaaaacattgttggctaatataatttgaaaaaaagtggttttttggaagacttaggatattatggtgctacataatttttcctcgatgctctcttcctctcatctttcttgtctcttaaattactttacttccttgcacactttgccatacaagaatgaacatgagcttttcttgtgtagatctgagttgaaatcctgtggacactgggcgaattactttttagatctgtagctctgactcctcaggcataaaatgggaataatgcttttacagtttagtggcggaactaaactcccaaaattatttgttatatggatcaagtaataacgtcagtaatgtttttggtacaaagtcattatttaataaaagttattgttccatcttgcttgccccccca

SEQ ID NO: 157322 - DNA, 2162 bp, Homo sapiens
  Payload ID: 10836
  Gene Symbol: NAT1
  Gene Name: N-acetyltransferase 1 (arylamine N-acetyltransferase)
  Uniprot ID: P18440
  ENST ID: ENST00000518029
  CDS Start-End: 521-1393
gtgggaggattgcattcagtctagttcctggttgccggctgaaataacctgctctccaaaatgtccacaaaagtgacttaagtcaggttcccccaaaccagacaccaagacaagaatccatgtgtgtgtgactgaaggaagtgctgggagagccccagctgcagcctggatgtgaactgcaactccaaagtgtgtccagactcaaggcaagggcactaggctttccagacctcctactaagtcattgatccagcactgccctgccaggacataaatccctggcacctcttgctctctgcaaaggagggcaaagcagcttcaggagcccttgggagtcctccaaagagagtctagggtacaggtccgaaagtagaagaacacagaaggcaggccaggggcactgtgagatggtaaaagagatctgaagggatccagaattcaagccaggaagaagcagcaatctgtcttctggattaaaactgaagatcaacctactttcaacttactaagaaaggggatcatggacattgaagcatatcttgaaagaattggctataagaagtctaggaacaaattggacttggaaacattaactgacattcttcaacaccagatccgagctgttccctttgagaaccttaacatccattgtggggatgccatggacttaggcttagaggccatttttgatcaagttgtgagaagaaatcggggtggatggtgtctccaggtcaatcatcttctgtactgggctctgaccactattggttttgagaccacgatgttgggagggtatgtttacagcactccagccaaaaaatacagcactggcatgattcaccttctcctgcaggtgaccattgatggcaggaactacattgtcgatgctgggtttggacgctcataccagatgtggcagcctctggagttaatttctgggaaggatcagcctcaggtgccttgtgtcttccgtttgacggaagagaatggattctggtatctagaccaaatcagaagggaacagtacattccaaatgaagaatttcttcattctgatctcctagaagacagcaaataccgaaaaatctactcctttactcttaagcctcgaacaattgaagattttgagtctatgaatacatacctgcagacatctccatcatctgtgtttactagtaaatcattttgttccttgcagaccccagatggggttcactgtttggtgggcttcaccctcacccataggagattcaattataaggacaatacagatctaatagagttcaagactctgagtgaggaagaaatagaaaaagtgctgaaaaatatatttaatatttccttgcagagaaagcttgtgcccaaacatggtgatagattttttactatttagaataaggagtaaaacaatcttgtctatttgtcatccagctcaccagttatcaactgacgacctatcatgtatcttctgtacccttaccttattttgaagaaaatcctagacatcaaatcatttcacctataaaaatgtcatcatatataattaaacagctttttaaagaaacataaccacaaaccttttcaaataataataataataataataaaaaatgtattttaaagatggcctgtggttatcttggaaattggtgatttatgctagaaagcttttaatgttggtttattgttgaattcctagaaaagttttattggtagatgagtaaataaaatattgtaaaaaaacttattgtctataaagtatattaaaacattgttggctaatataatttgaaaaaaagtggttttttggaagacttaggatattatggtgctacataatttttcctcgatgctctcttcctctcatctttcttgtctcttaaattactttacttccttgcacactttgccatacaagaatgaacatgagcttttcttgtgtagatctgagttgaaatcctgtggacactgggcgaattactttttagatctgtagctctgactcctcaggcataaaatgggaataatgcttttacagtttagtggcggaactaaactcccaaaattatttgttatatggatcaagtaataacgtcagtaatgtttttggtacaaagtcattatttaataaaagttattgttccatcttgcttgccccccca

SEQ ID NO: 157323 - DNA, 1446 bp, Homo sapiens
  Payload ID: 10836
  Gene Symbol: NAT1
  Gene Name: N-acetyltransferase 1 (arylamine N-acetyltransferase)
  Uniprot ID: P18440
  ENST ID: ENST00000520546
  CDS Start-End: 272-1144
gctgtttatcatttgactcatcatttaatcttgatttccagcttctcacacttgaaagaagacataatacatttctcacaggattctgggactattaactgaacttatgtgtgtaaaaggaattcatacaatgaaagcactagaaataattattatacttataaccattgtatttttacatgtttaaaatatagccataattagcctactcaaatccaagtgtaaaagtaaaatgatttgctttcgttttgttttccttgcttaggggatcatggacattgaagcatatcttgaaagaattggctataagaagtctaggaacaaattggacttggaaacattaactgacattcttcaacaccagatccgagctgttccctttgagaaccttaacatccattgtggggatgccatggacttaggcttagaggccatttttgatcaagttgtgagaagaaatcggggtggatggtgtctccaggtcaatcatcttctgtactgggctctgaccactattggttttgagaccacgatgttgggagggtatgtttacagcactccagccaaaaaatacagcactggcatgattcaccttctcctgcaggtgaccattgatggcaggaactacattgtcgatgctgggtttggacgctcataccagatgtggcagcctctggagttaatttctgggaaggatcagcctcaggtgccttgtgtcttccgtttgacggaagagaatggattctggtatctagaccaaatcagaagggaacagtacattccaaatgaagaatttcttcattctgatctcctagaagacagcaaataccgaaaaatctactcctttactcttaagcctcgaacaattgaagattttgagtctatgaatacatacctgcagacatctccatcatctgtgtttactagtaaatcattttgttccttgcagaccccagatggggttcactgtttggtgggcttcaccctcacccataggagattcaattataaggacaatacagatctaatagagttcaagactctgagtgaggaagaaatagaaaaagtgctgaaaaatatatttaatatttccttgcagagaaagcttgtgcccaaacatggtgatagattttttactatttagaataaggagtaaaacaatcttgtctatttgtcatccagctcaccagttatcaactgacgacctatcatgtatcttctgtacccttaccttattttgaagaaaatcctagacatcaaatcatttcacctataaaaatgtcatcatatataattaaacagctttttaaagaaacataaccacaaaccttttcaaataataataataataataataaaaaatgtattttaaagatggcctgtggttatcttggaaattggtgatttatgctagaaagcttttaatgttggtttattgttgaattc

SEQ ID NO: 157324 - DNA, 2280 bp, Homo sapiens
  Payload ID: 10836
  Gene Symbol: NAT1
  Gene Name: N-acetyltransferase 1 (arylamine N-acetyltransferase)
  Uniprot ID: P18440
  ENST ID: ENST00000517492
  CDS Start-End: 639-1511
caagtcacatagggataaatcacaatagttggtcaactgttgaatcttgatccttcaactaaacaatattcatgaactctgcagaaaaacaccagcattttgctcaacattcaggaccctctagaagttgcctcattctactctcctttcttacctttcttttacacagctctccaaaatgtccacaaaagtgacttaagtcaggttcccccaaaccagacaccaagacaagaatccatgtgtgtgtgactgaaggaagtgctgggagagccccagctgcagcctggatgtgaactgcaactccaaagtgtgtccagactcaaggcaagggcactaggctttccagacctcctactaagtcattgatccagcactgccctgccaggacataaatccctggcacctcttgctctctgcaaaggagggcaaagcagcttcaggagcccttgggagtcctccaaagagagtctagggtacaggtccgaaagtagaagaacacagaaggcaggccaggggcactgtgagatggtaaaagagatctgaagggatccagaattcaagccaggaagaagcagcaatctgtcttctggattaaaactgaagatcaacctactttcaacttactaagaaaggggatcatggacattgaagcatatcttgaaagaattggctataagaagtctaggaacaaattggacttggaaacattaactgacattcttcaacaccagatccgagctgttccctttgagaaccttaacatccattgtggggatgccatggacttaggcttagaggccatttttgatcaagttgtgagaagaaatcggggtggatggtgtctccaggtcaatcatcttctgtactgggctctgaccactattggttttgagaccacgatgttgggagggtatgtttacagcactccagccaaaaaatacagcactggcatgattcaccttctcctgcaggtgaccattgatggcaggaactacattgtcgatgctgggtttggacgctcataccagatgtggcagcctctggagttaatttctgggaaggatcagcctcaggtgccttgtgtcttccgtttgacggaagagaatggattctggtatctagaccaaatcagaagggaacagtacattccaaatgaagaatttcttcattctgatctcctagaagacagcaaataccgaaaaatctactcctttactcttaagcctcgaacaattgaagattttgagtctatgaatacatacctgcagacatctccatcatctgtgtttactagtaaatcattttgttccttgcagaccccagatggggttcactgtttggtgggcttcaccctcacccataggagattcaattataaggacaatacagatctaatagagttcaagactctgagtgaggaagaaatagaaaaagtgctgaaaaatatatttaatatttccttgcagagaaagcttgtgcccaaacatggtgatagattttttactatttagaataaggagtaaaacaatcttgtctatttgtcatccagctcaccagttatcaactgacgacctatcatgtatcttctgtacccttaccttattttgaagaaaatcctagacatcaaatcatttcacctataaaaatgtcatcatatataattaaacagctttttaaagaaacataaccacaaaccttttcaaataataataataataataataaaaaatgtattttaaagatggcctgtggttatcttggaaattggtgatttatgctagaaagcttttaatgttggtttattgttgaattcctagaaaagttttattggtagatgagtaaataaaatattgtaaaaaaacttattgtctataaagtatattaaaacattgttggctaatataatttgaaaaaaagtggttttttggaagacttaggatattatggtgctacataatttttcctcgatgctctcttcctctcatctttcttgtctcttaaattactttacttccttgcacactttgccatacaagaatgaacatgagcttttcttgtgtagatctgagttgaaatcctgtggacactgggcgaattactttttagatctgtagctctgactcctcaggcataaaatgggaataatgcttttacagtttagtggcggaactaaactcccaaaattatttgttatatggatcaagtaataacgtcagtaatgtttttggtacaaagtcattatttaataaaagttattgttccatcttgcttgccccccca

SEQ ID NO: 157325 - DNA, 1948 bp, Homo sapiens
  Payload ID: 10836
  Gene Symbol: NAT1
  Gene Name: N-acetyltransferase 1 (arylamine N-acetyltransferase)
  Uniprot ID: P18440
  ENST ID: ENST00000541942
  CDS Start-End: 308-1180
acttcctcatagaccttggatgtgggaggattgcattcagtctagttcctggttgccggctgaaataacctgaccgagagcatcaccccctgaacatggacttgcagaattccacagaagagaggagactggcctagacagacagccccaggagctgagggcccaacaggctttctaccctggatgctgctcccatgccctgacatgaggcccactacaatgaattcaagccaggaagaagcagcaatctgtcttctggattaaaactgaagatcaacctactttcaacttactaagaaaggggatcatggacattgaagcatatcttgaaagaattggctataagaagtctaggaacaaattggacttggaaacattaactgacattcttcaacaccagatccgagctgttccctttgagaaccttaacatccattgtggggatgccatggacttaggcttagaggccatttttgatcaagttgtgagaagaaatcggggtggatggtgtctccaggtcaatcatcttctgtactgggctctgaccactattggttttgagaccacgatgttgggagggtatgtttacagcactccagccaaaaaatacagcactggcatgattcaccttctcctgcaggtgaccattgatggcaggaactacattgtcgatgctgggtttggacgctcataccagatgtggcagcctctggagttaatttctgggaaggatcagcctcaggtgccttgtgtcttccgtttgacggaagagaatggattctggtatctagaccaaatcagaagggaacagtacattccaaatgaagaatttcttcattctgatctcctagaagacagcaaataccgaaaaatctactcctttactcttaagcctcgaacaattgaagattttgagtctatgaatacatacctgcagacatctccatcatctgtgtttactagtaaatcattttgttccttgcagaccccagatggggttcactgtttggtgggcttcaccctcacccataggagattcaattataaggacaatacagatctaatagagttcaagactctgagtgaggaagaaatagaaaaagtgctgaaaaatatatttaatatttccttgcagagaaagcttgtgcccaaacatggtgatagattttttactatttagaataaggagtaaaacaatcttgtctatttgtcatccagctcaccagttatcaactgacgacctatcatgtatcttctgtacccttaccttattttgaagaaaatcctagacatcaaatcatttcacctataaaaatgtcatcatatataattaaacagctttttaaagaaacataaccacaaaccttttcaaataataataataataataataaaaaatgtattttaaagatggcctgtggttatcttggaaattggtgatttatgctagaaagcttttaatgttggtttattgttgaattcctagaaaagttttattggtagatgagtaaataaaatattgtaaaaaaacttattgtctataaagtatattaaaacattgttggctaatataatttgaaaaaaagtggttttttggaagacttaggatattatggtgctacataatttttcctcgatgctctcttcctctcatctttcttgtctcttaaattactttacttccttgcacactttgccatacaagaatgaacatgagcttttcttgtgtagatctgagttgaaatcctgtggacactgggcgaattactttttagatctgtagctctgactcctcaggcataaaatgggaataatgcttttacagtttagtggcggaactaaactcccaaaattatttgttatatggatcaagtaataacgtcagtaatgtttttggtacaaagtcattatttaataaaagttattgttccatcttgcttgccccccc

SEQ ID NO: 157326 - DNA, 1827 bp, Homo sapiens
  Payload ID: 10836
  Gene Symbol: NAT1
  Gene Name: N-acetyltransferase 1 (arylamine N-acetyltransferase)
  ENST ID: ENST00000545197
  CDS Start-End: 1-1059
atgctgttattactcttacacaaggaggcagccctcgagccacagggtccagctgttggctataatagcctaccggtctctgatgatcaccatgtttctggaattcaagccaggaagaagcagcaatctgtcttctggattaaaactgaagatcaacctactttcaacttactaagaaaggggatcatggacattgaagcatatcttgaaagaattggctataagaagtctaggaacaaattggacttggaaacattaactgacattcttcaacaccagatccgagctgttccctttgagaaccttaacatccattgtggggatgccatggacttaggcttagaggccatttttgatcaagttgtgagaagaaatcggggtggatggtgtctccaggtcaatcatcttctgtactgggctctgaccactattggttttgagaccacgatgttgggagggtatgtttacagcactccagccaaaaaatacagcactggcatgattcaccttctcctgcaggtgaccattgatggcaggaactacattgtcgatgctgggtttggacgctcataccagatgtggcagcctctggagttaatttctgggaaggatcagcctcaggtgccttgtgtcttccgtttgacggaagagaatggattctggtatctagaccaaatcagaagggaacagtacattccaaatgaagaatttcttcattctgatctcctagaagacagcaaataccgaaaaatctactcctttactcttaagcctcgaacaattgaagattttgagtctatgaatacatacctgcagacatctccatcatctgtgtttactagtaaatcattttgttccttgcagaccccagatggggttcactgtttggtgggcttcaccctcacccataggagattcaattataaggacaatacagatctaatagagttcaagactctgagtgaggaagaaatagaaaaagtgctgaaaaatatatttaatatttccttgcagagaaagcttgtgcccaaacatggtgatagattttttactatttagaataaggagtaaaacaatcttgtctatttgtcatccagctcaccagttatcaactgacgacctatcatgtatcttctgtacccttaccttattttgaagaaaatcctagacatcaaatcatttcacctataaaaatgtcatcatatataattaaacagctttttaaagaaacataaccacaaaccttttcaaataataataataataataataaaaaatgtattttaaagatggcctgtggttatcttggaaattggtgatttatgctagaaagcttttaatgttggtttattgttgaattcctagaaaagttttattggtagatgagtaaataaaatattgtaaaaaaacttattgtctataaagtatattaaaacattgttggctaatataatttgaaaaaaagtggttttttggaagacttaggatattatggtgctacataatttttcctcgatgctctcttcctctcatctttcttgtctcttaaattactttacttccttgcacactttgccatacaagaatgaacatgagcttttcttgtgtagatctgagttgaaatcctgtggacactgggcgaattactttttagatctgtagctctgactcctcaggcataaaatgggaataatgcttttacagtttagtggcggaactaaactcccaaaattatttgttatatggatcaagtaataacgtcagtaatgtttttggtacaaagtcattatttaataaaagttattgttccatcttgcttgccccccc

SEQ ID NO: 157327 - DNA, 4002 bp, Homo sapiens
  Payload ID: 10837
  Gene Symbol: NAT10
  Gene Name: N-acetyltransferase 10 (GCN5-related)
  Uniprot ID: Q9H0A0
  ENST ID: ENST00000257829
  CDS Start-End: 207-3284
aatgcgcttgcgcacgtgctgtctaccagttcctgagagggacgcgtgccgcggagccaggcttactacgtgacccggacaccaggcatacgctaggggcagtcagctgtgccttctctttcggagttgttccgtgctcccacgtgcttccccttctccactggctgggatcccccgggctcggggcgcagtaataatttttcaccatgcatcggaaaaaggtggataaccgaatccggattctcattgagaatggagtagctgagcggcaaagatctctctttgttgtagttggggatcgaggaaaagatcaggtggtaatacttcatcacatgttatccaaagcaactgtgaaggctcggccttcagtgctgtggtgttataagaaagagctggggtttagcagtcaccggaagaaaagaatgcgacagctgcagaagaaaataaagaatggaacactgaacataaagcaggacgacccctttgaactcttcatagcagccacaaacattcgctactgctactacaacgagacccacaagatcctgggcaataccttcggcatgtgtgtgctgcaggattttgaagccttaactccaaacttgctggccaggactgtagaaacagtggaaggtggtgggctagtggtcatcctcctacggaccatgaactcactcaagcaattgtacacagtgactatggatgtgcattccaggtacagaactgaggcccatcaggatgtggtgggaagatttaatgaaaggtttattctgtctctggcctcttgtaagaagtgtctcgtcattgatgaccagctcaacatcctgcccatctcctcccacgttgccaccatggaggccctgcctccccagactccggatgagagtcttggtccttctgatctggagctgagggagttgaaggagagcttgcaggacacccagcctgtgggtgtgttggtggactgctgtaagactctagaccaggccaaagctgtcttgaaatttatcgagggcatctctgaaaagaccctgaggagtactgttgcactcacagctgctcgaggacggggaaaatctgcagccctgggattggcgattgctggggcggtggcatttgggtactccaatatctttgttacctccccaagccctgataacctccatactctgtttgaatttgtatttaaaggatttgatgctctgcaatatcaggaacatctggattatgagattatccagtctctaaatcctgaatttaacaaagcagtgatcagagtgaatgtatttcgagaacacaggcagactattcagtatatacatcctgcagatgctgtgaagctgggccaggctgaactagttgtgattgatgaagctgccgccatccccctccccttggtgaagagcctacttggcccctaccttgttttcatggcatccaccatcaatggctatgagggcactggccggtcactgtccctcaagctaattcagcagctccgtcaacagagcgcccagagccaggtcagcaccactgctgagaataagaccacgacgacagccagattggcatcagcgcggacactgtatgaggtttccctccaggagtcaatccgatacgcccctggggatgcagtggagaagtggctgaatgacttgctgtgcctggattgcctcaacatcactcggatagtctcaggctgccccttgcctgaagcttgtgaactgtactatgttaatagagataccctcttttgctaccacaaggcctctgaagttttcctccaacggcttatggccctctacgtggcttctcactacaagaactctcccaatgatctccagatgctctccgatgcacctgctcaccatctcttctgccttctgcctcccgtgccccccacccagaatgcccttccagaagtgcttgctgttatccaggtgtgccttgaaggggagatttctcgccagtccatcttgaacagtctgtctcgaggcaagaaggcttcaggggacctgattccatggacagtgtcagaacagttccaagatccagactttggtggtctgtctggtggaagggtcgttcgcattgctgttcacccagattatcaagggatgggctatggcagccgtgctctgcagctgctgcagatgtactatgaaggcaggtttccttgtctggaggaaaaggtccttgagacaccacaggaaattcacaccgtaagcagcgaggctgtcagcttgttggaagaggtcatcactccccggaaggacctgcctcctttactcctcaaattgaatgagaggcctgccgaacgcctggattacctgggtgtttcctatggcttgacccccaggctcctcaagttctggaaacgagctggatttgttcctgtttatctgagacagaccccgaatgacctgaccggagagcactcgtgcatcatgctgaagacgctcactgatgaggatgaggctgaccagggaggctggcttgcagccttctggaaagatttccgacggcggttcctagccttgctctcctaccagttcagtaccttctctccttccctggctctgaacatcattcagaacaggaacatggggaagccagcccagcctgccctgagccgggaggagctggaagcactcttcctcccctatgacctgaagcggctggagatgtattcacggaatatggtggactatcacctcatcatggacatgatcccggccatctctcgcatctatttcctgaaccagctgggggacctggccctgtctgcggctcagtcggctcttctcttggggattggcctgcagcataagtctgtggaccagctggaaaaggagattgagctgccctcgggccagttgatgggacttttcaaccggatcatccgcaaagttgtgaagctatttaatgaagttcaggaaaaggccattgaggagcagatggtggcagcgaaggatgtggtcatggagcccacgatgaagaccctcagtgacgacctagatgaagcagcaaaggaatttcaggagaaacacaagaaggaagtagggaagctgaagagcatggacctctctgaatacataatccgtggggacgatgaagagtggaatgaagttttgaacaaagctgggccgaacgcctcgatcatcagcctgaaaagtgacaagaaaaggaagttagaggccaaacaagaacccaaacagagcaagaagttgaagaacagagagacaaagaacaaaaaagatatgaaactgaagcggaagaaatagtgaagagaaactcgggcatctgtgtttgatcatgggaagatactctcactaactgaaccctctctggctggactgttaaaagcaacgagaggccccggcacacctggaagctggccgcgaattcggcctctgggcctgtgtgtctgtgagctcaacctggctaaaggcagagtcactcccaaatgggtctctttagaacttgatggctgggcactgccatctctagaattgccacgagtctctctcttcctgcccagtccagggccctcctttcctataagttcatattttgctttgagccagctttttagtctcattcccacacatgtggaagccacgttgcctctcgaccgcctgaggcccttaagtacatcgctttctggtggtgcccaggaggctgctgctgggccgctgggtctctctttgtggacttgtacctggagcaggaggaactccagtccgtcccggcatccatggcagcccgcggttaggtgcgccagggtttgctgatgttgtcttgtgctgttccactcttggctccagcagacccactgtcccagaaaagcctgatcctgtagtttatgtagaatgccacatctgcgtcctcaagacctgtttcatccatttgggaaaagatgttgggaaaggccactttgctcgcaggggtgaggggaaggatagagaatctatttttaataaataacattctagaaagatc

SEQ ID NO: 157328 - DNA, 3436 bp, Homo sapiens
  Payload ID: 10837
  Gene Symbol: NAT10
  Gene Name: N-acetyltransferase 10 (GCN5-related)
  Uniprot ID: Q9H0A0
  ENST ID: ENST00000531159
  CDS Start-End: 193-3054
gtgctgtctaccagttcctgagagggacgcgtgccgcggagccaggcttactacgtgacccggacaccaggcatacgctaggggcagtcagctgtgccttctctttcggagttgttccgtgctcccacgtgcttccccttctccactggctgggatcccccgggctcggggcgcagtcaccggaagaaaagaatgcgacagctgcagaagaaaataaagaatggaacactgaacataaagcaggacgacccctttgaactcttcatagcagccacaaacattcgctactgctactacaacgagacccacaagatcctgggcaataccttcggcatgtgtgtgctgcaggattttgaagccttaactccaaacttgctggccaggactgtagaaacagtggaaggtggtgggctagtggtcatcctcctacggaccatgaactcactcaagcaattgtacacagtgactatggatgtgcattccaggtacagaactgaggcccatcaggatgtggtgggaagatttaatgaaaggtttattctgtctctggcctcttgtaagaagtgtctcgtcattgatgaccagctcaacatcctgcccatctcctcccacgttgccaccatggaggccctgcctccccagactccggatgagagtcttggtccttctgatctggagctgagggagttgaaggagagcttgcaggacacccagcctgtgggtgtgttggtggactgctgtaagactctagaccaggccaaagctgtcttgaaatttatcgagggcatctctgaaaagaccctgaggagtactgttgcactcacagctgctcgaggacggggaaaatctgcagccctgggattggcgattgctggggcggtggcatttgggtactccaatatctttgttacctccccaagccctgataacctccatactctgtttgaatttgtatttaaaggatttgatgctctgcaatatcaggaacatctggattatgagattatccagtctctaaatcctgaatttaacaaagcagtgatcagagtgaatgtatttcgagaacacaggcagactattcagtatatacatcctgcagatgctgtgaagctgggccaggctgaactagttgtgattgatgaagctgccgccatccccctccccttggtgaagagcctacttggcccctaccttgttttcatggcatccaccatcaatggctatgagggcactggccggtcactgtccctcaagctaattcagcagctccgtcaacagagcgcccagagccaggtcagcaccactgctgagaataagaccacgacgacagccagattggcatcagcgcggacactgtatgaggtttccctccaggagtcaatccgatacgcccctggggatgcagtggagaagtggctgaatgacttgctgtgcctggattgcctcaacatcactcggatagtctcaggctgccccttgcctgaagcttgtgaactgtactatgttaatagagataccctcttttgctaccacaaggcctctgaagttttcctccaacggcttatggccctctacgtggcttctcactacaagaactctcccaatgatctccagatgctctccgatgcacctgctcaccatctcttctgccttctgcctcccgtgccccccacccagaatgcccttccagaagtgcttgctgttatccaggtgtgccttgaaggggagatttctcgccagtccatcttgaacagtctgtctcgaggcaagaaggcttcaggggacctgattccatggacagtgtcagaacagttccaagatccagactttggtggtctgtctggtggaagggtcgttcgcattgctgttcacccagattatcaagggatgggctatggcagccgtgctctgcagctgctgcagatgtactatgaaggcaggtttccttgtctggaggaaaaggtccttgagacaccacaggaaattcacaccgtaagcagcgaggctgtcagcttgttggaagaggtcatcactccccggaaggacctgcctcctttactcctcaaattgaatgagaggcctgccgaacgcctggattacctgggtgtttcctatggcttgacccccaggctcctcaagttctggaaacgagctggatttgttcctgtttatctgagacagaccccgaatgacctgaccggagagcactcgtgcatcatgctgaagacgctcactgatgaggatgaggctgaccagggaggctggcttgcagccttctggaaagatttccgacggcggttcctagccttgctctcctaccagttcagtaccttctctccttccctggctctgaacatcattcagaacaggaacatggggaagccagcccagcctgccctgagccgggaggagctggaagcactcttcctcccctatgacctgaagcggctggagatgtattcacggaatatggtggactatcacctcatcatggacatgatcccggccatctctcgcatctatttcctgaaccagctgggggacctggccctgtctgcggctcagtcggctcttctcttggggattggcctgcagcataagtctgtggaccagctggaaaaggagattgagctgccctcgggccagttgatgggacttttcaaccggatcatccgcaaagttgtgaagctatttaatgaagttcaggaaaaggccattgaggagcagatggtggcagcgaaggatgtggtcatggagcccacgatgaagaccctcagtgacgacctagatgaagcagcaaaggaatttcaggagaaacacaagaaggaagtagggaagctgaagagcatggacctctctgaatacataatccgtggggacgatgaagagtggaatgaagttttgaacaaagctgggccgaacgcctcgatcatcagcctgaaaagtgacaagaaaaggaagttagaggccaaacaagaacccaaacagagcaagaagttgaagaacagagagacaaagaacaaaaaagatatgaaactgaagcggaagaaatagtgaagagaaactcgggcatctgtgtttgatcatgggaagatactctcactaactgaaccctctctggctggactgttaaaagcaacgagaggccccggcacacctggaagctggccgcgaattcggcctctgggcctgtgtgtctgtgagctcaacctggctaaaggcagagtcactcccaaatgggtctctttagaacttgatggctgggcactgccatctctagaattgccacgagtctctctcttcctgcccagtccagggccctcctttcctataagttcatattttgctttgagccagctttttagtctcattcccacacatgtggaagccacgttgcctctcgaccgcctgaggcccttaagtacatcgctttctg

SEQ ID NO: 157329 - DNA, 561 bp, Homo sapiens
  Payload ID: 10837
  Gene Symbol: NAT10
  Gene Name: N-acetyltransferase 10 (GCN5-related)
  ENST ID: ENST00000529523
  CDS Start-End: 125-561
aagtagtgcctgtaactggggagtcggggtgaatgggtgggtgacaacagttgttttccgtggagcttgcccgcagtgcctggctgcaggtctgggcattatacttaggtaataatttttcaccatgcatcggaaaaaggtggataaccgaatccggattctcattgagaatggagtagctgagcggcaaagatctctctttgttgtagttggggatcgaggaaaagatcaggtggtaatacttcatcacatgttatccaaagcaactgtgaaggctcggccttcagtgctgtggtgttataagaaagagctggggtttagcagtcaccggaagaaaagaatgcgacagctgcagaagaaaataaagaatggaacactgaacataaagcaggacgacccctttgaactcttcatagcagccacaaacattcgctactgctactacaacgagacccacaagatcctgggcaataccttcggcatgtgtgtgctgcaggattttgaagccttaactccaaacttgctggccaggactgtagaaacagtggaaggtggtgggct

SEQ ID NO: 157330 - DNA, 1600 bp, Homo sapiens
  Payload ID: 10837
  Gene Symbol: NAT10
  Gene Name: N-acetyltransferase 10 (GCN5-related)
  ENST ID: ENST00000527971
  CDS Start-End: 18-884
agtaataatttttcaccatgcatcggaaaaaggtggataaccgaatccggattctcattgagaatggagtagctgagcggcaaagatctctctttgttgtagttggggatcgaggaaaagatcaggtggtaatacttcatcacatgttatccaaagcaactgtgaaggctcggccttcagtgctgtggtgttataagaaagagctggggtttagcagtcaccggaagaaaagaatgcgacagctgcagaagaaaataaagaatggaacactgaacataaagcaggacgacccctttgaactcttcatagcagccacaaacattcgctactgctactacaacgagacccacaagatcctgggcaataccttcggcatgtgtgtgctgcaggattttgaagccttaactccaaacttgctggccaggactgtagaaacagtggaaggtggtgggctagtggtcatcctcctacggaccatgaactcactcaagcaattgtacacagtgactatggatgtgcattccaggtacagaactgaggcccatcaggatgtggtgggaagatttaatgaaaggtttattctgtctctggcctcttgtaagaagtgtctcgtcattgatgaccagctcaacatcctgcccatctcctcccacgttgccaccatggaggccctgcctccccagactccggatgagagtcttggtccttctgatctggagctgagggagttgaaggagagcttgcaggacacccagcctgtgggtgtgttggtggactgctgtaagactctagaccaggccaaacaagaacccaaacagagcaagaagttgaagaacagagagacaaagaacaaaaaagatatgaaactgaagcggaagaaatagtgaagagaaactcgggcatctgtgtttgatcatgggaagatactctcactaactgaaccctctctggctggactgttaaaagcaacgagaggccccggcacacctggaagctggccgcgaattcggcctctgggcctgtgtgtctgtgagctcaacctggctaaaggcagagtcactcccaaatgggtctctttagaacttgatggctgggcactgccatctctagaattgccacgagtctctctcttcctgcccagtccagggccctcctttcctataagttcatattttgctttgagccagctttttagtctcattcccacacatgtggaagccacgttgcctctcgaccgcctgaggcccttaagtacatcgctttctggtggtgcccaggaggctgctgctgggccgctgggtctctctttgtggacttgtacctggagcaggaggaactccagtccgtcccggcatccatggcagcccgcggttaggtgcgccagggtttgctgatgttgtcttgtgctgttccactcttggctccagcagacccactgtcccagaaaagcctgatcctgtagtttatgtagaatgccacatctgcgtcctcaagacctgtttcatccatttgggaaaagatgttgggaaaggccactttgctcgcaggggtgaggggaaggatagagaatctatttttaataaataacattctagaaaga

SEQ ID NO: 157331 - DNA, 3329 bp, Homo sapiens
  Payload ID: 10837
  Gene Symbol: NAT10
  Gene Name: N-acetyltransferase 10 (GCN5-related)
  ENST ID: ENST00000615292
  CDS Start-End: 1-2505
atgaactcactcaagcaattgtacacagtgactatggatgtgcattccaggtacagaactgaggcccatcaggatgtggtgggaagatttaatgaaaggtttattctgtctctggcctcttgtaagaagtgtctcgtcattgatgaccagctcaacatcctgcccatctcctcccacgttgccaccatggaggccctgcctccccagactccggatgagagtcttggtccttctgatctggagctgagggagttgaaggagagcttgcaggacacccagcctgtgggtgtgttggtggactgctgtaagactctagaccaggccaaagctgtcttgaaatttatcgagggcatctctgaaaagaccctgaggagtactgttgcactcacagctgctcgaggacggggaaaatctgcagccctgggattggcgattgctggggcggtggcatttgggtactccaatatctttgttacctccccaagccctgataacctccatactctgtttgaatttgtatttaaaggatttgatgctctgcaatatcaggaacatctggattatgagattatccagtctctaaatcctgaatttaacaaagcagtgatcagagtgaatgtatttcgagaacacaggcagactattcagtatatacatcctgcagatgctgtgaagctgggccaggctgaactagttgtgattgatgaagctgccgccatccccctccccttggtgaagagcctacttggcccctaccttgttttcatggcatccaccatcaatggctatgagggcactggccggtcactgtccctcaagctaattcagcagctccgtcaacagagcgcccagagccaggtcagcaccactgctgagaataagaccacgacgacagccagattggcatcagcgcggacactgtatgaggtttccctccaggagtcaatccgatacgcccctggggatgcagtggagaagtggctgaatgacttgctgtgcctggattgcctcaacatcactcggatagtctcaggctgccccttgcctgaagcttgtgaactgtactatgttaatagagataccctcttttgctaccacaaggcctctgaagttttcctccaacggcttatggccctctacgtggcttctcactacaagaactctcccaatgatctccagatgctctccgatgcacctgctcaccatctcttctgccttctgcctcccgtgccccccacccagaatgcccttccagaagtgcttgctgttatccaggtgtgccttgaaggggagatttctcgccagtccatcttgaacagtctgtctcgaggcaagaaggcttcaggggacctgattccatggacagtgtcagaacagttccaagatccagactttggtggtctgtctggtggaagggtcgttcgcattgctgttcacccagattatcaagggatgggctatggcagccgtgctctgcagctgctgcagatgtactatgaaggcaggtttccttgtctggaggaaaaggtccttgagacaccacaggaaattcacaccgtaagcagcgaggctgtcagcttgttggaagaggtcatcactccccggaaggacctgcctcctttactcctcaaattgaatgagaggcctgccgaacgcctggattacctgggtgtttcctatggcttgacccccaggctcctcaagttctggaaacgagctggatttgttcctgtttatctgagacagaccccgaatgacctgaccggagagcactcgtgcatcatgctgaagacgctcactgatgaggatgaggctgaccagggaggctggcttgcagccttctggaaagatttccgacggcggttcctagccttgctctcctaccagttcagtaccttctctccttccctggctctgaacatcattcagaacaggaacatggggaagccagcccagcctgccctgagccgggaggagctggaagcactcttcctcccctatgacctgaagcggctggagatgtattcacggaatatggtggactatcacctcatcatggacatgatcccggccatctctcgcatctatttcctgaaccagctgggggacctggccctgtctgcggctcagtcggctcttctcttggggattggcctgcagcataagtctgtggaccagctggaaaaggagattgagctgccctcgggccagttgatgggacttttcaaccggatcatccgcaaagttgtgaagctatttaatgaagttcaggaaaaggccattgaggagcagatggtggcagcgaaggatgtggtcatggagcccacgatgaagaccctcagtgacgacctagatgaagcagcaaaggaatttcaggagaaacacaagaaggaagtagggaagctgaagagcatggacctctctgaatacataatccgtggggacgatgaagagtggaatgaagttttgaacaaagctgggcgaacgcctcgatcatcagcctgaaaagtgacaagaaaaggaagttagaggccaaacaagaacccaaacagagcaagaagttgaagaacagagagacaaagaacaaaaaagatatgaaactgaagcggaagaaatagtgaagagaaactcgggcatctgtgtttgatcatgggaagatactctcactaactgaaccctctctggctggactgttaaaagcaacgagaggccccggcacacctggaagctggccgcgaattcggcctctgggcctgtgtgtctgtgagctcaacctggctaaaggcagagtcactcccaaatgggtctctttagaacttgatggctgggcactgccatctctagaattgccacgagtctctctcttcctgcccagtccagggccctcctttcctataagttcatattttgctttgagccagctttttagtctcattcccacacatgtggaagccacgttgcctctcgaccgcctgaggcccttaagtacatcgctttctggtggtgcccaggaggctgctgctgggccgctgggtctctctttgtggacttgtacctggagcaggaggaactccagtccgtcccggcatccatggcagcccgcggttaggtgcgccagggtttgctgatgttgtcttgtgctgttccactcttggctccagcagacccactgtcccagaaaagcctgatcctgtagtttatgtagaatgccacatctgcgtcctcaagacctgtttcatccatttgggaaaagatgttgggaaaggccactttgctcgcaggggtgaggggaaggatagagaatctatttttaataaataacattctag

SEQ ID NO: 157332 - DNA, 1536 bp, Homo sapiens
  Payload ID: 10838
  Gene Symbol: NAT14
  Gene Name: N-acetyltransferase 14 (GCN5-related, putative)
  Uniprot ID: Q8WUY8
  ENST ID: ENST00000205194
  CDS Start-End: 304-924
gctcccgttcttccccaggtcccctttccccgttgctccttctctagggataggagaggtcgcttcccggccctccgcagggtcacagctcggttcctcccagcccgccctccggggagcttagcaacggttgctacggcccggagcgggcgccgccccgccccaccgcgcgcggtctgacgtcacttccgcccgcgacccccttccagacccgctcccgaaaccttgtcgaaggaccaaaggcgaccggtgcaggtgcacgacgccagctcccttctggggggccggggcctgggggttgccatggcccccagccacctgtcagtgcgggagatgagggaagatgagaagcccctggtgctggagatgctgaaggccggcgtgaaggacacggaaaaccgcgtggccctccatgccttgacacggccgccggccctgctcctcctggcggcggccagcagcggcctgcgctttgtcctggcttccttcgccctggccctcctcctgccggtgttcctggctgtggccgccgtgaagctgggcctgcgggcccgatggggctcgctgcctccgccgggtggcctggggggcccctgggtggccgtgcggggctccggtgacgtgtgtggggtcctggctctggcccctggcacaaatgcaggggacggggcccgggtcacccgcctgtctgtctctcgctggcaccgccgccggggcgtgggcaggaggctgctggccttcgcggaggcccgggctcgggcctgggctgggggcatgggggagccccgggcccggctcgtggtccccgtggctgtggccgcctggggggtgggagggatgctggagggctgtggctaccaggccgaggggggctggggctgcctgggctacacgctggtgagggaattcagcaaagacctgtgaagctacagactgacagccagggcaggggaggagggaggggcgccagcacctgatgatcgcctactgtctgcgggttcttttacctgctctccctcagtgagtcctcaaccaccctgggcccagaaacagaggcctgccgaggggaggagcctggcctctgtccacccgtcagcagtgtgaagtctgttgtgtttgagcttctcagagtggaatgactccttttccttcctggccctcgggggcctctcgaggtcagcctctccaacccctacctcagctcctgtctgcactgagaaacctccccgggtgatgtctgcaaagtctgtgctgtccgtgccccaggctgggagagctatctggggagggggagaggaggccgagcagaatacaccccagagttagggtttgcgactccgcctccctgggacctggattgggtcagatgcctgtccttggaggggacaaggttgactgcttaggaggcgcgacgcacagggctgccaggcctggcccctctctgggaaggttgagagctgagacgggcagccctgtcccttcctccagatccgtctggttttttacaccgtttgttaataaagcctgaaaccgctg

SEQ ID NO: 157333 - DNA, 1011 bp, Homo sapiens
  Payload ID: 10838
  Gene Symbol: NAT14
  Gene Name: N-acetyltransferase 14 (GCN5-related, putative)
  ENST ID: ENST00000591590
  CDS Start-End: 113-271
cccgcgacccccttccagacccgctcccgaaaccttgtcgaaggaccaaaggcgaccggtgcaggtgcacgacgccagctcccttctggggggccggggcctgggggttgccatggcccccagccacctgtcagtgcgggagatgagggaagatgagaagcccctggtgctggagatgctgaaggtgagaggcaggggccccagggggcctgggagtggctgcagtgggggaattgcaagtggattcagccaccccctcccacccacctgagccagcctggacccctggagcgggatcttttcctcctgagcctcagccgccctgctgctgaaaaccacagcaggtgtggcaggtgggggctcacccccccagccctactgggaccccagcaccaacgccctccctggtctcccatctccagtcggctgtgcacgccagcacaacagccagctctgtgcctcggaccccaactcttcaaagcacagcccagcaccccaacctagcccagcagcctccctccagcctccactccagcctgaggcaacctccctgtccttacttccctggggcctcactgcggcattgctactgaattgagtgcccccacagctcctaattcactcatccatccatcattcgctctcgttcattcattcactccatacccagtgtgccacactgaacatcggactgtgctgccttcccttcccatttgggagctctcaccccgccccgggcagggtctacctcctctctttgtccaggaggccctagcgtttcggatggctgagccacccctcctgcccacaggccggcgtgaaggacacggaaaaccgcgtggccctccatgccttgacacggccgccggccctgctcctcctggcggcggccagcagcggcctgcgctttgtcctggcttccttcgccctggccctcctcctgccggtgttcctggctgtggccgccgtgaagctgggcctgcgggcccgatggggctcgctgcctccgcc

SEQ ID NO: 157334 - DNA, 730 bp, Homo sapiens
  Payload ID: 10838
  Gene Symbol: NAT14
  Gene Name: N-acetyltransferase 14 (GCN5-related, putative)
  ENST ID: ENST00000588985
  CDS Start-End: 1-520
cacggaaaaccgcgtggccctccatgccttgacacggccgccggccctgctcctcctggcggcggccagcagcggcctgcgctttgtcctggcttccttcgccctggccctcctcctgccggtgttcctggctgtggccgccgtgaagctgggcctgcgggcccgatggggctcgctgcctccgccgggtggcctggggggcccctgggtggccgtgcggggctccggtgacgtgtgtggggtcctggctctggcccctggcacaaatgcaggggacggggcccgggtcacccgcctgtctgtctctcgctggcaccgccgccggggcgtgggcaggaggctgctggccttcgcggaggcccgggctcgggcctgggctgggggcatgggggagccccgggcccggctcgtggtccccgtggctgtggccgcctgggggtctgtgctgtccgtgccccaggctgggagagctatctggggagggggagaggaggccgagcagaatacaccccagagttagggtttgcgactccgcctccctgggacctggattgggtcagatgcctgtccttggaggggacaaggttgactgcttaggaggcgcgacgcacagggctgccaggcctggcccctctctgggaaggttgagagctgagacgggcagccctgtcccttcctccagatccgtctggttttttacaccgtttgttaataaagcctgaaaccgctg

SEQ ID NO: 157335 - DNA, 416 bp, Homo sapiens
  Payload ID: 10838
  Gene Symbol: NAT14
  Gene Name: N-acetyltransferase 14 (GCN5-related, putative)
  ENST ID: ENST00000587400
  CDS Start-End: 74-208
gaaggaccaaaggcgaccggtgcaggtgcacgacgccagctcccttctggggggccggggcctgggggttgccatggcccccactcctgtctgcactgagaaacctccccgggtgatgtctgcaaagtctgtgctgtccgtgccccaggctgggagagctatctggggagggggagaggaggccgagcagaatacaccccagagttagggtttgcgactccgcctccctgggacctggattgggtcagatgcctgtccttggaggggacaaggttgactgcttaggaggcgcgacgcacagggctgccaggcctggcccctctctgggaaggttgagagctgagacgggcagccctgtcccttcctccagatccgtctggttttttacaccgtttgttaataaagcctgaaaccgc

SEQ ID NO: 157336 - DNA, 2935 bp, Homo sapiens
  Payload ID: 10839
  Gene Symbol: NAT16
  Gene Name: N-acetyltransferase 16 (GCN5-related, putative)
  Uniprot ID: Q8N8M0
  ENST ID: ENST00000300303
  CDS Start-End: 240-1349
gaaccgatgggcgccccggcccgcgtcgccaacggagctgcggcgctgccccagcgctgaccgacgttagagtcgggctccgacagcgcggccgagtccccgcgcgtcatcctcctttgactcttgggggctccaaagggacctctctcttggcaccgggggtgtctgcgcccgccgcccgccccgcttggctttgcggcatctcggccctggctccagctccggctccggcgagggtcatgaagctggaagccagctgtggcacagccacctcagaggtccctaagccggaaaagaagactgcccgagatgcagagccaagctctgaaacccggccacaggaggtggaggccgagcccaggtcgggatcggggcctgaggctgaggccgagccattggacttcgtggtggccacggaacgggagtttgaggaagtgctggccatctcggggggcatctacggcggcctggactaccttcctagccgctaccacagctggctccgggaccccgaccgcacggtggtgctggccaagcgcaacggaggcgtgatcgcgctggagtcggtgaacgtgatcgacgccggggagacggtgctggtggaggggctgcgcgtggcgccctgggagcgcgggaagggcgtggccgggctgctgcagcgcttctgctcgcagctggtcaagagacagcacccgggggtcaaggtggcacggctcacccgggacgaccagctgggcccccgggagctgaagaaataccgcctaatcaccaagcagggcatccttttggtccgattcaacgcgtccgcgctgctggccgggctgggcgcgcggctggcggcgctgcggacctctggcaccttctcgccgctgcccaccgaggccgtgtccgaggcaggcggcgacgtggcacgcctcctgctgtcaccctccgtgcagcgcgacgtgcttccaggcgggaccatcatccaggactggcagccctaccggcctagcgaaagcaacctgcgcctgctggcggccaagggcctggagtggcgcgtggacagccgcgcgcgcccgcgcgtgctcacgctgtgcacgcgccccttccccatcccgcacggaggggacggcacttggcgctatctcaacatcgacgccttcggtagcgacggcgcgcaggtgcagagccagctgctgtggcacctgcagcgccaggccccgcgcctcgttggcctcaacgtcatgtgccagctcttcctggagccccagctgtggtcacagctggctgacttctgccaggtcgggctgggactggagctggtgaagggttatactgaacagtacctgctggaggccgacatctgaggcctctcctctggcggggagggggaaaaagacccgcccccttccgcagtttccccagccagcctctttcctgccatttccgacgctgcgtctcctgggaagtcccctctgactcctgccctcctgcccttaccggcgcaggtccccccactctgtcccttttgcccttactatcttgcctctagctcccccaaacaccattgcccactccctgacctgaacttgcggactattaggtgggggctgggggtgggggccttgagctgctgttatccaccctctgtttttccaaagaactggtccccgcacaggcttcagagtccttccttccctctccatcacctcacccggggcgtgaactccccctttcctggcttctcccttctgccccctcgtgggtggaagaactcaggagtgtgtgggatgcccagcctcgttcccgagcgcagccgcccaatccgcgtttcttttcttccttctgccctttctaaagccctaaaaactggtcctgcattgccctccacaccccaatcccctccccctgctcaagcttctggtgccagagatcagtgccctctccccacttctctctagcccctcatcctcatcctcgctggatctctacgacgcttaacaccgcagtgcccatttttctgtccctgttttccttcccatcaccagcccagtgtgcaatccagagagagagagagtgatactgtaaaatgaaatgtatttagaatgctcccccatttgggtccttgttcatctggtgatgcactttctgagcctgcctctctcactggggtttcctcctgctttgcacaactttgctatttcgcaggctcccccgtgccccagctcacccgagccgggcggggtggtggtggtggtggtggtgtgtgtgtggtgtggttctagctgaagagtttggtacagtggagggcgggtccctcagcctggcataggggctgtctcctggttccaaccaggccgccttctagtgcaactggaattcccacctcctggtatttctggacaccactccctttctctggatcatttatgcttttagaactttgagagtcttctatttaattgcaagtagtaacagctgcatctgcacagcgctgtctccaatactggttccccacatcaaaggcagagggagaaaacagaaggctgggaaagatcaaagtgacttctaagtcattcaaagtagctaggagcctcccagcgaatagaacccgggtgtcccaagcctagagcatgacctagaacttcactctgtgggatgatgttagcttgaacttcttgttgggcaatgcgtaggtgctaggagaatgttgacagtgagtttggggttcgctgggatgggatccgagatgtgggcagaggtggacaccagcaggtggaagaatgtggacaaggtggggggtaggggcagccgccgcttcgccactttccgcagctctggttttgctactgtgctgctctccttgggtgcatcctgtgcctggccacgctgccaccctccttgtcacggtgaccacgattgtatgacaataaaatggaccttttggccaccc

SEQ ID NO: 157337 - DNA, 613 bp, Homo sapiens
  Payload ID: 10839
  Gene Symbol: NAT16
  Gene Name: N-acetyltransferase 16 (GCN5-related, putative)
  ENST ID: ENST00000444446
  CDS Start-End: 145-613
ttttcgctctcatctttgggcgctttgtgcagctgccttctttgtctccgcctctccggcgactgggctctcccttccctccctctcctccctcccccagtgtcaagaagccatcggcctcaagggcatcgatatttcagggtcatgaagctggaagccagctgtggcacagccacctcagaggtccctaagccggaaaagaagactgcccgagatgcagagccaagctctgaaacccggccacaggaggtggaggccgagcccaggtcgggatcggggcctgaggctgaggccgagccattggacttcgtggtggccacggaacgggagtttgaggaagtgctggccatctcggggggcatctacggcggcctggactaccttcctagccgctaccacagctggctccgggaccccgaccgcacggtggtgctggccaagcgcaacggaggcgtgatcgcgctggagtcggtgaacgtgatcgacgccggggagacggtgctggtggaggggctgcgcgtggcgccctgggagcgcgggaagggcgtggccgggctgctgcagcgcttctgctcgcagctggtcaagagacagcacccgggggtcaaggtgg

SEQ ID NO: 157338 - DNA, 1286 bp, Homo sapiens
  Payload ID: 10839
  Gene Symbol: NAT16
  Gene Name: N-acetyltransferase 16 (GCN5-related, putative)
  Uniprot ID: Q8N8M0
  ENST ID: ENST00000443096
  CDS Start-End: 179-517
cgacgttagagtcgggctccgacagcgcggccgagtccccgcgcgtcatcctcctttgactcttgggggctccaaagggacctctctcttggcaccgggggtgtctgcgcccgccgcccgccccgcttggctttgcggcatctcggccctggctccagctccggctccggcgagggtcatgaagctggaagccagctgtggcacagccacctcagaggtccctaagccggaaaagaagactgcccgagatgcagagccaagctctgaaacccggccacaggaggtggaggccgagcccaggtcgggatcggggcctgaggctgaggccgagccattggacttcgtggtggccacggaacgggagtttgaggaagtgctggccatctcggggggcatctacggcggcctggactaccttcctagccgctaccacagctggctccgggaccccgaccgcacggtggtgctggccaagcgcaacggaggcgtggtgagcccgggggcacggcccaggtgacatggggtgaagccacctgcgggtgcgtggatcttaggaagaggaggatgagagcttctccccagccttcctctggaggctgcggaaatagagcctgctttgggaccaaagtgcagggcgtgcagtgcggatccaggggctatgtcagtgagggtggggtggaggactcctaaagcagaggaaccagagggacaggtgagcgtttgaaagttcgaggatccaccggaggaatttctgggggtaaaagcaaaggaggtggggagcaggagagagagggtaggctaggggtgggagcaggaagagcttagatttgggctgggggaggagctaagaggaagtggggcgtggcaaactcccgggggaggagccaaggaaggggcgtggtgagcggtccggaacttgacacactcggagctggagcatctcaagaggtggaaggggccgggcgcgtcggctaactcctgtaaccccagctctttgggaggccgaggcaggaggatcacttgaggctaggagttccagaccagcctgggcaacatgcgagacccctgtctccaaaaaataaaaataaataaaaagccgagagtaggggtgcgtgcctgttgtcccagctactaggaagtcttgggggtgtaggggatcgcttgagcccaggagtttgaggctgcagtgagctgtgatagcaccactgcgctccagcctgggtgaggagaccctgtcctaaatttaaaataaataaaaataaaaaggtggacgaagccccggcgaa

SEQ ID NO: 157339 - DNA, 1492 bp, Homo sapiens
  Payload ID: 10839
  Gene Symbol: NAT16
  Gene Name: N-acetyltransferase 16 (GCN5-related, putative)
  Uniprot ID: Q8N8M0
  ENST ID: ENST00000455377
  CDS Start-End: 219-1328
cgacgttagagtcgggctccgacagcgcggccgagtccccgcgcgtcatcctcctttgactcttgggggctccaaagggacctctctcttggcaccgggggtgtctgcgcccgccgcccgccccgcttggctttgcggcatctcggccctggctccagctccggctccggcgagtgtcaagaagccatcggcctcaagggcatcgatatttcagggtcatgaagctggaagccagctgtggcacagccacctcagaggtccctaagccggaaaagaagactgcccgagatgcagagccaagctctgaaacccggccacaggaggtggaggccgagcccaggtcgggatcggggcctgaggctgaggccgagccattggacttcgtggtggccacggaacgggagtttgaggaagtgctggccatctcggggggcatctacggcggcctggactaccttcctagccgctaccacagctggctccgggaccccgaccgcacggtggtgctggccaagcgcaacggaggcgtgatcgcgctggagtcggtgaacgtgatcgacgccggggagacggtgctggtggaggggctgcgcgtggcgccctgggagcgcgggaagggcgtggccgggctgctgcagcgcttctgctcgcagctggtcaagagacagcacccgggggtcaaggtggcacggctcacccgggacgaccagctgggcccccgggagctgaagaaataccgcctaatcaccaagcagggcatccttttggtccgattcaacgcgtccgcgctgctggccgggctgggcgcgcggctggcggcgctgcggacctctggcaccttctcgccgctgcccaccgaggccgtgtccgaggcaggcggcgacgtggcacgcctcctgctgtcaccctccgtgcagcgcgacgtgcttccaggcgggaccatcatccaggactggcagccctaccggcctagcgaaagcaacctgcgcctgctggcggccaagggcctggagtggcgcgtggacagccgcgcgcgcccgcgcgtgctcacgctgtgcacgcgccccttccccatcccgcacggaggggacggcacttggcgctatctcaacatcgacgccttcggtagcgacggcgcgcaggtgcagagccagctgctgtggcacctgcagcgccaggccccgcgcctcgttggcctcaacgtcatgtgccagctcttcctggagccccagctgtggtcacagctggctgacttctgccaggtcgggctgggactggagctggtgaagggttatactgaacagtacctgctggaggccgacatctgaggcctctcctctggcggggagggggaaaaagacccgcccccttccgcagtttccccagccagcctctttcctgccatttccgacgctgcgtctcctgggaagtcccctctgactcctgccctcctgcccttaccggcgcaggtccccccactctgtcccttttg

SEQ ID NO: 157340 - DNA, 1322 bp, Homo sapiens
  Payload ID: 10840
  Gene Symbol: NAT2
  Gene Name: N-acetyltransferase 2 (arylamine N-acetyltransferase)
  Uniprot ID: P11245
  ENST ID: ENST00000286479
  CDS Start-End: 108-980
tgagatcacttcccttgcagactttggaagggagagcactttattacagaccttggaagcaagaggattgcattcagcctagttcctggttgctggccaaagggatcatggacattgaagcatattttgaaagaattggctataagaactctaggaacaaattggacttggaaacattaactgacattcttgagcaccagatccgggctgttccctttgagaaccttaacatgcattgtgggcaagccatggagttgggcttagaggctatttttgatcacattgtaagaagaaaccggggtgggtggtgtctccaggtcaatcaacttctgtactgggctctgaccacaatcggttttcagaccacaatgttaggagggtatttttacatccctccagttaacaaatacagcactggcatggttcaccttctcctgcaggtgaccattgacggcaggaattacattgtcgatgctgggtctggaagctcctcccagatgtggcagcctctagaattaatttctgggaaggatcagcctcaggtgccttgcattttctgcttgacagaagagagaggaatctggtacctggaccaaatcaggagagagcagtatattacaaacaaagaatttcttaattctcatctcctgccaaagaagaaacaccaaaaaatatacttatttacgcttgaacctcgaacaattgaagattttgagtctatgaatacatacctgcagacgtctccaacatcttcatttataaccacatcattttgttccttgcagaccccagaaggggtttactgtttggtgggcttcatcctcacctatagaaaattcaattataaagacaatacagatctggtcgagtttaaaactctcactgaggaagaggttgaagaagtgctgagaaatatatttaagatttccttggggagaaatctcgtgcccaaacctggtgatggatcccttactatttagaataaggaacaaaataaacccttgtgtatgtatcacccaactcactaattatcaacttatgtgctatcagatatcctctctaccctcacgttattttgaagaaaatcctaaacatcaaatactttcatccataaaaatgtcagcatttattaaaaaacaataactttttaaagaaacataaggacacattttcaaattaataaaaataaaggcattttaaggatggcctgtgattatcttgggaagcagagtgattcatgctagaaaacatttaatattgatttattgttgaattcatagtaaatttttactggtaaatgaataaagaatattgtggaaaaa

SEQ ID NO: 157341 - DNA, 716 bp, Homo sapiens
  Payload ID: 10840
  Gene Symbol: NAT2
  Gene Name: N-acetyltransferase 2 (arylamine N-acetyltransferase)
  ENST ID: ENST00000520116
  CDS Start-End: 117-599
attacagaccttggaagcaagaggattgcattcagcctagttcctggttgctggccaaagtgaccattgacggcaggaattacattgtcgatgctgggtctggaagctcctcccagatgtggcagcctctagaattaatttctgggaaggatcagcctcaggtgccttgcattttctgcttgacagaagagagaggaatctggtacctggaccaaatcaggagagagcagtatattacaaacaaagaatttcttaattctcatctcctgccaaagaagaaacaccaaaaaatatacttatttacgcttgaacctcgaacaattgaagattttgagtctatgaatacatacctgcagacgtctccaacatcttcatttataaccacatcattttgttccttgcagaccccagaaggggtttactgtttggtgggcttcatcctcacctatagaaaattcaattataaagacaatacagatctggtcgagtttaaaactctcactgaggaagaggttgaagaagtgctgagaaatatatttaagatttccttggggagaaatctcgtgcccaaacctggtgatggatcccttactatttagaataaggaacaaaataaacccttgtgtatgtatcacccaactcactaattatcaacttatgtgctatcagatatcctctctaccctcacgttattttgaagaaaatcctaaacatca

SEQ ID NO: 157342 - DNA, 1330 bp, Homo sapiens
  Payload ID: 10841
  Gene Symbol: NAT6
  Gene Name: N-acetyltransferase 6 (GCN5-related)
  Uniprot ID: Q93015
  ENST ID: ENST00000354862
  CDS Start-End: 203-1129
aggggcgggttctaagcggcgacgcgcgggtgctgggaggccttagaacgccgtggcgtgccgcaggacgcgacggctgcagaacatccgccgcaccgctgggggccaacgttgtcggaccgaggagtccgaggtggcgactgagtgagatacccagctgtgcggagctaggacgcggaacatcccagaggccagcatcaacatgcaagagctgactctgagccctggcccagccaagctgacccctacactagaccctacacaccggatggagctgatcctgagtaccagcccagctgagctgactctggatcctgcgtgccagccaaagctgcccctggattccacatgccaaccagagatgaccttcaatcctggtccaactgagcttaccctggatcctgaacaccagccagaggagaccccagctcctagcctggctgagttgaccctggagcctgtgcaccgccgacccgagctcctggatgcttgtgctgacctcatcaatgatcagtggccccgcagccgcacctcccgcctgcactccctgggccagtcctcagatgccttccccctctgcctgatgctgctaagcccccaccccacacttgaagcagcacccgttgtggtgggccatgcccgcctgtcacgggtgctgaaccagccccagagcctcttagtggagacagtggtggtggcccgggccctgaggggccgtggctttggccgccgcctcatggagggcctggaggtctttgctcgggcccggggcttccgcaagctgcatctcaccacccatgaccaggtgcacttctatacccacctgggctaccagctgggtgagcctgtgcagggcctggtcttcaccagcagacggctgcctgccaccctgcttaatgccttccccacagccccctctccccggccacccaggaaggccccaaacctgactgcccaagctgccccaaggggtcccaagggacctccattgccaccaccccctcccctacctgagtgcctgaccatctcacccccagttccatcagggcccccttcaaaaagcctgctggagacacaatatcaaaatgtgagggggcgccccatattctggatggaaaaagacatctgaggccatccagggcaaggaactgtctttctggttcaatagactgccccgacagtctacaagcctcagcccactgaccatacctcagcccctagcccctggggggcagctttaacctgggcatgtttcctgggtaccagtggggccaggaggtggctctggctcagagccgtcagtgtggctgaataaaggctctcttgggta

SEQ ID NO: 157343 - DNA, 765 bp, Homo sapiens
  Payload ID: 10841
  Gene Symbol: NAT6
  Gene Name: N-acetyltransferase 6 (GCN5-related)
  ENST ID: ENST00000450489
  CDS Start-End: 507-765
agtcgttcgtttccagaccatgccgagccacacctgcccacagagtcgagctctcgaagtcctcattcccaaaagctccacagcctgtgacccactaggagggagggggaaaccgaggcccgggagagacggagaagccactctctgaggaccccggagccccgcccacagtgggtggggtcggcactgaaggggttaaggccgcggggaagccccgggctcagccctaggggcggatcctggggcttcctccctctagaccaaagggtgcggctgctgcagaggtggctgatgcaggaggagagccactgtggtctgaagagatgctactgcctggagactggggtcttaacctccagcctggcactgagccacctgcaacctagcagcaggtgaccttggctcccagcctgactcagctgaacctggatcctgtgcataggcaagagctgactctgagccctggcccagccaagctgacccctacactagaccctacacaccggatggagctgatcctgagtaccagcccagctgagctgactctggatcctgcgtgccagccaaagctgcccctggattccacatgccaaccagagatgaccttcaatcctggtccaactgagcttaccctggatcctgaacaccagccagaggagaccccagctcctagcctggctgagttgaccctggagcctgtgcaccgccgacccgagctcctggatgcttgtgctgacctcatcaatgatcagtggccccgcagcc

SEQ ID NO: 157344 - DNA, 860 bp, Homo sapiens
  Payload ID: 10841
  Gene Symbol: NAT6
  Gene Name: N-acetyltransferase 6 (GCN5-related)
  ENST ID: ENST00000442620
  CDS Start-End: 690-860
aggggcggatcctggggcttcctccctctagaccaaagggtgcggctgctgcagaggtggctgatgcagtggtggactaggaggactactggaagacagaaggccagcaagtagattgggtcggctgttttatagacctggtggttacagaccccctgtgaggggaggtcctgaggaggacaaatttgtagccagagcaggctggggccaggactcctaggttctgccccagccttaagcagctcatccatcactcccagcctccctccaatgtggggtagacacctggatctatctgccctgctctataggggatgggtctcttccaggtcacctgtgctatcaggtgagtgtgggacaaagtgcagcccaccactccccagttccagtatgcatggtcccccctgcactctgtcagcccttccctgctccaaccccaccctccctcctggcacagcccagcatggctgttatctacaggaggagagccactgtggtctgaagagatgctactgcctggagactggggtcttaacctccagcctggcactgagccacctgcaacctagcagcaggtgaccttggctcccagcctgactcagctgaacctggatcctgtgcataggcaagagctgactctgagccctggcccagccaagctgacccctacactagaccctacacaccggatggagctgatcctgagtaccagcccagctgagctgactctggatcctgcgtgccagccaaagctgcccctggattccacatgccaaccagagatgaccttcaatcctggtccaactgagcttaccctggatcctgaacaccagccagaggagaccccagctcctagcctg

SEQ ID NO: 157345 - DNA, 1163 bp, Homo sapiens
  Payload ID: 10841
  Gene Symbol: NAT6
  Gene Name: N-acetyltransferase 6 (GCN5-related)
  Uniprot ID: Q93015
  ENST ID: ENST00000417393
  CDS Start-End: 104-964
gaccaaagggtgcggctgctgcagaggtggctgatgcaggcaagagctgactctgagccctggcccagccaagctgacccctacactagaccctacacaccggatggagctgatcctgagtaccagcccagctgagctgactctggatcctgcgtgccagccaaagctgcccctggattccacatgccaaccagagatgaccttcaatcctggtccaactgagcttaccctggatcctgaacaccagccagaggagaccccagctcctagcctggctgagttgaccctggagcctgtgcaccgccgacccgagctcctggatgcttgtgctgacctcatcaatgatcagtggccccgcagccgcacctcccgcctgcactccctgggccagtcctcagatgccttccccctctgcctgatgctgctaagcccccaccccacacttgaagcagcacccgttgtggtgggccatgcccgcctgtcacgggtgctgaaccagccccagagcctcttagtggagacagtggtggtggcccgggccctgaggggccgtggctttggccgccgcctcatggagggcctggaggtctttgctcgggcccggggcttccgcaagctgcatctcaccacccatgaccaggtgcacttctatacccacctgggctaccagctgggtgagcctgtgcagggcctggtcttcaccagcagacggctgcctgccaccctgcttaatgccttccccacagccccctctccccggccacccaggaaggccccaaacctgactgcccaagctgccccaaggggtcccaagggacctccattgccaccaccccctcccctacctgagtgcctgaccatctcacccccagttccatcagggcccccttcaaaaagcctgctggagacacaatatcaaaatgtgagggggcgccccatattctggatggaaaaagacatctgaggccatccagggcaaggaactgtctttctggttcaatagactgccccgacagtctacaagcctcagcccactgaccatacctcagcccctagcccctggggggcagctttaacctgggcatgtttcctgggtaccagtggggccaggaggtggctctggctcagagccgtcagtgtggctgaataaaggctctcttggg

SEQ ID NO: 157346 - DNA, 1820 bp, Homo sapiens
  Payload ID: 10841
  Gene Symbol: NAT6
  Gene Name: N-acetyltransferase 6 (GCN5-related)
  Uniprot ID: Q93015
  ENST ID: ENST00000443842
  CDS Start-End: 809-1669
cggcgacgcgcgggtgctgggaggccttagaacgccgtggcgtgccgcaggacgcgacggctgcagaacatccgccgcaccgctgggggccaacgttgtcggaccgaggagtccgaggtggcgactgagtgagatacccagctgtgcggagctaggacgcggaacatcccagaggccagcatcaacattggtggactaggaggactactggaagacagaaggccagcaagtagattgggtcggctgttttatagacctggtggttacagaccccctgtgaggggaggtcctgaggaggacaaatttgtagccagagcaggctggggccaggactcctaggttctgccccagccttaagcagctcatccatcactcccagcctccctccaatgtggggtagacacctggatctatctgccctgctctataggggatgggtctcttccaggtcacctgtgctatcaggtgagtgtgggacaaagtgcagcccaccactccccagttccagtatgcatggtcccccctgcactctgtcagcccttccctgctccaaccccaccctccctcctggcacagcccagcatggctgttatctacaggaggagagccactgtggtctgaagagatgctactgcctggagactggggtcttaacctccagcctggcactgagccacctgcaacctagcagcaggtgaccttggctcccagcctgactcagctgaacctggatcctgtgcataggcaagagctgactctgagccctggcccagccaagctgacccctacactagaccctacacaccggatggagctgatcctgagtaccagcccagctgagctgactctggatcctgcgtgccagccaaagctgcccctggattccacatgccaaccagagatgaccttcaatcctggtccaactgagcttaccctggatcctgaacaccagccagaggagaccccagctcctagcctggctgagttgaccctggagcctgtgcaccgccgacccgagctcctggatgcttgtgctgacctcatcaatgatcagtggccccgcagccgcacctcccgcctgcactccctgggccagtcctcagatgccttccccctctgcctgatgctgctaagcccccaccccacacttgaagcagcacccgttgtggtgggccatgcccgcctgtcacgggtgctgaaccagccccagagcctcttagtggagacagtggtggtggcccgggccctgaggggccgtggctttggccgccgcctcatggagggcctggaggtctttgctcgggcccggggcttccgcaagctgcatctcaccacccatgaccaggtgcacttctatacccacctgggctaccagctgggtgagcctgtgcagggcctggtcttcaccagcagacggctgcctgccaccctgcttaatgccttccccacagccccctctccccggccacccaggaaggccccaaacctgactgcccaagctgccccaaggggtcccaagggacctccattgccaccaccccctcccctacctgagtgcctgaccatctcacccccagttccatcagggcccccttcaaaaagcctgctggagacacaatatcaaaatgtgagggggcgccccatattctggatggaaaaagacatctgaggccatccagggcaaggaactgtctttctggttcaatagactgccccgacagtctacaagcctcagcccactgaccatacctcagcccctagcccctggggggcagctttaacctgggcatgtttcctgggtaccagtggggccaggaggt

SEQ ID NO: 157347 - DNA, 1464 bp, Homo sapiens
  Payload ID: 10841
  Gene Symbol: NAT6
  Gene Name: N-acetyltransferase 6 (GCN5-related)
  Uniprot ID: Q93015
  ENST ID: ENST00000443094
  CDS Start-End: 419-1279
aaaccaggggcgggttctaagcggcgacgcgcgggtgctgggaggccttagaacgccgtggcgtgccgcaggacgcgacggctgcagaacatccgccgcaccgctgggggccaacgttgtcggaccgaggagtccgaggtggcgactgagtgagatacccagctgtgcggagctaggacgcggaacatcccagaggccagcatcaacatgaggagagccactgtggtctgaagagatgctactgcctggagactggggtcttaacctccagcctggcactgagccacctgcaacctagcagcaggtgaccttggctcccagcctgactcagctgaacctggatcctgtgcataggcaagagctgactctgagccctggcccagccaagctgacccctacactagaccctacacaccggatggagctgatcctgagtaccagcccagctgagctgactctggatcctgcgtgccagccaaagctgcccctggattccacatgccaaccagagatgaccttcaatcctggtccaactgagcttaccctggatcctgaacaccagccagaggagaccccagctcctagcctggctgagttgaccctggagcctgtgcaccgccgacccgagctcctggatgcttgtgctgacctcatcaatgatcagtggccccgcagccgcacctcccgcctgcactccctgggccagtcctcagatgccttccccctctgcctgatgctgctaagcccccaccccacacttgaagcagcacccgttgtggtgggccatgcccgcctgtcacgggtgctgaaccagccccagagcctcttagtggagacagtggtggtggcccgggccctgaggggccgtggctttggccgccgcctcatggagggcctggaggtctttgctcgggcccggggcttccgcaagctgcatctcaccacccatgaccaggtgcacttctatacccacctgggctaccagctgggtgagcctgtgcagggcctggtcttcaccagcagacggctgcctgccaccctgcttaatgccttccccacagccccctctccccggccacccaggaaggccccaaacctgactgcccaagctgccccaaggggtcccaagggacctccattgccaccaccccctcccctacctgagtgcctgaccatctcacccccagttccatcagggcccccttcaaaaagcctgctggagacacaatatcaaaatgtgagggggcgccccatattctggatggaaaaagacatctgaggccatccagggcaaggaactgtctttctggttcaatagactgccccgacagtctacaagcctcagcccactgaccatacctcagcccctagcccctggggggcagctttaacctgggcatgtttcctgggtaccagtggggccaggaggtggctctggctcagagccgtcagtgtggctgaata

SEQ ID NO: 157348 - DNA, 583 bp, Homo sapiens
  Payload ID: 10841
  Gene Symbol: NAT6
  Gene Name: N-acetyltransferase 6 (GCN5-related)
  ENST ID: ENST00000452674
  CDS Start-End: 556-583
aggggcggatcctggggcttcctccctctagaccaaagggtgcggctgctgcagaggtggctgatgcagtggtggactaggaggactactggaagacagaaggccagcaagtagattgggtcggctgttttatagacctggtggttacagaccccctgtgaggggaggtcctgaggaggacaaatttgtagccagagcaggctggggccaggactcctaggttctgccccagccttaagcagctcatccatcactcccagcctccctccaatgtggggtagacacctggatctatctgccctgctctataggggatgggtctcttccaggtcacctgtgctatcaggaggagagccactgtggtctgaagagatgctactgcctggagactggggtcttaacctccagcctggcactgagccacctgcaacctagcagcaggtgaccttggctcccagcctgactcagctgaacctggatcctgtgcataggcaagagctgactctgagccctggcccagccaagctgacccctacactagaccctacacaccggatggagctgatcctgagtaccagcccag

SEQ ID NO: 157349 - DNA, 947 bp, Homo sapiens
  Payload ID: 10842
  Gene Symbol: NAT8
  Gene Name: N-acetyltransferase 8 (GCN5-related, putative)
  Uniprot ID: Q9UHE5
  ENST ID: ENST00000272425
  CDS Start-End: 151-834
agacggtatctcctggatgccagtgagcggctgagagctgaagctccctggacactcaaggctcttgtggtgacagtctgacgtaaaggcgtgcagggaggcctagctctgtctcctggacttagagatttcagacacagaagtctgtccatggctccttgtcacatccgcaaataccaggagagcgaccgccagtgggttgtgggcttgctctcccgggggatggccgagcatgccccagccaccttccggcaattgctgaagctgcctcgaaccctcatactcttacttggggggcccctcgccctactcctggtctctggatcctggcttctagccctcgtgttcagcatcagcctcttccctgccctgtggttccttgccaaaaaaccctggacggagtatgtggacatgacattgtgcacagacatgtctgacattaccaaatcctacctgagtgagcgtggctcctgcttctgggtggctgagtctgaagagaaggtggtgggcatggtaggagctctgcctgttgatgatcccaccttgagggagaagcggttgcagctgtttcatctctttgtggacagtgagcaccgtcgtcaggggatagcaaaagccctggtcaggactgtcctccagtttgcccgggaccagggctacagtgaagttatcctggacaccggcaccatccagctctctgctatggccctctaccagagcatgggcttcaagaagacgggccagtccttcttctgtgtgtgggccaggctagtggctcttcatacagttcatttcatctaccacctcccttcttctaaggtagggagtctgtgatctctttctgtgtgtattggtcagaatagaatccattcagctgtagcagcaagcaatccccaacctttcactgcaatgacctttcaatgcaataaaagcttattgtccattca

SEQ ID NO: 157350 - DNA, 765 bp, Homo sapiens
  Payload ID: 10843
  Gene Symbol: NAT8B
  Gene Name: N-acetyltransferase 8B (GCN5-related, putative, gene/pseudogene)
  ENST ID: ENST00000377712
  CDS Start-End: 36-714
ctggactcagtgacttcagacacagaagtctgtccatggctccttatcacatccgcaaataccaggagagcgaccgcaagtaggtcgtgggcttgctctcccgggggatggccgaacacgccccagccaccttccggcgattactgaagctgcctcgaaccctcatactcttacttgggggggcccttgccctactcctggtctctggctcctggattctggccctcgtgttcagcctcagcctccttcctgccctgtggttccttgccaaaaaaccctggacgcggtatgtagacatagcattgcgcacagacatgtctgacatcaccaaatcctacctgagtgagtgtggctcctgcttctgggtgggtgaatctgaagagaaggtggtgggcacagtaggagctctgcccgttgatgatcccaccttgagggagaagcggttgcagctgtttcatctctctgtggacaatgagcaccgtggtcaggggatagcaaaagccctggtcaggactgtcctccagtttgcccgggactagggctacagtgaagttgtcctggacaccagcaacatccagctctctgccatgggcctctaccagagcttgggcttcaagaagacgggccagtccttcttccacgtgtgggccaggctggtggatcttcatacagttcatttcatctatcacctcccttctgctcaggcagggcgtctatgatttctttccttctgtattggtcagaatagaatccattcggctgtag

SEQ ID NO: 157351 - DNA, 5571 bp, Homo sapiens
  Payload ID: 10844
  Gene Symbol: NAT8L
  Gene Name: N-acetyltransferase 8-like (GCN5-related, putative)
  ENST ID: ENST00000331662
  CDS Start-End: 205-609
gagcgcatccctaacacggccttccgcggcctgcggcagcacccgcgcgcgcagctgctctacgccctgctggcggcgctgtgcttcgccgtgagccgctcgctgctgctgacgtgcctggtgccggccgcgctgctgggcctgcgctactactacagccgcaaggtgatccgcgcctacctggagtgcgcgctgcacacggacatggcggacatcgagcagtactacatgaagccgcccggctcctgcttctgggtggccgtgctggatggcaacgtggtgggcattgtggctgcacgggcccacgaggaggacaacacggtggagctgctgcggatgtctgtggactcacgtttccgaggcaagggcatcgccaaggcgctgggccggaaggtgctggagttcgccgtggtgcacaactactccgcggtggtgctgggcacgacggccgtcaaggtggccgcccacaagctctacgagtcgctgggcttcagacacatgggcgccagtgaccactacgtgctgccgggcatgaccctctcgctggctgagcgcctcttcttccaggtccgctaccaccgctaccgcctgcagctgcgcgaggagtgaccgccgccgctcgcccgcccgcccccccggccgccctgtccgcctttgcccgcctgcccgccgcccggcgcggcctgctttcagacgctcaattggcgtttgtgttgggtttccccttttcaacatcctgcggttgtctggctggttccggggggtgcggggctgttgttcttcggcgacactttggtgggggtgggttgtttgtcgccatagcccctcgcccttccccacctgcctgggcggcttgccacctgaagagtggcatcttggaccaccgcggctgtccatgacgctgccctgcccgccgccactggggaaggcccagccttgctcaccaagcacagaacctctgcagcagatcccggggccaggctccggccccgcctgcggccccagcgccactgcctgtggaggccccagctggccacggcgctgctttgctccgcgcatgccgagggtgtggcccggctgagcatgccgcatgcacacagccccgccctgccgccctgcccagactggacccggagacccgggctggtgagcgcccctgtccccagcccccagctggctgtgggagggcctgcccctgcccccacctcctggagggcctggtctgccccgcgccgcccggctctgtccacacctgctttgctctgacgccctccatttctctggctccggcccctcccctgcctgggctgtgctgactggtgtcatcacccaggtgactcccatggcgtccgtggcacagccagggtgggggtccatgggacccctctccccagtgcccactggatcgtgctggcctctcccagatgtccccggggacctcctgcctctggctgacggtccaccctgtgaatcttatcagcccaggctgctgccaacagcgcccagcccacagcttctcccagcctgaaaccaacacattttctaataagttatttagacagaatagcactctgcatgactttaattcttgggacaaaacggtagtttgtaccctaagacacagtttctggcccagtgtgatgggggtgggtggccgggtgggtggagcgttttgctgttggaaacctggagggaaaccctgattggatgtcatttcctgccatggagcacgcctcccagccctggcctgcagtgtgggcagggtggggggcaagggagtccgcagcctccgggaggaggggcagggcgctgccttgggctgggtgggaagaggggtggccgcctcggcttccgctggccatgctcctggtctctccttcctgaggtcacaggcaggggctgccctggacggggggcggggggggtggcctggaaggggagacagaggtggagggtggcacaggctgcacattcagcttagaagtggacctggctttggtggcaggagaagaataaacacttgcccagacccctttgtgtgggggaattggggaggggtcgtggcaggcagggtgggccacggaactgggtcccaggcatcaaggccacgtgcagggccatggagggatgcttctcacgaggcgcttcagaagcgagcgaagggacagagaagccctgcgtccaagggccttttgtcctgttagcaattgaggtgtgcagagcactgtacagaccccactcccctgtacattcctccctggaggtgcccggtccccgcttggggatgggagttttgtagactgtacagaaatcggcaccctattttcttgcagctcagattttgttaatctggaatatacagacagacgtaaagtgttttagcaaaatggaaacaaacagttgtgcctttttcctcttttggtttggtttgggtttggcctggggctggtcccagttggtgcggggcatgctgggggcaggaggggcagggcgggccaggtggagtcaggtcttgggggtgtcatgtcggggtgctgccagcgtcccttggtcctgtgcctttggagcctcgggctcctggggtgcagggtgcttgggggtggctgttggagcccaccgacgccagggcagggcctggaggcccagggactgccagtgtctccttgatattgatcctagcagatccccctcctgggggttctgagagtcctgggcagtgtggccttctctcattctggtggcatctgcgcccgtgagtgacctcttccttggctgcactgccctgtgggtggtgagacgcttggccttttttgttgctgccaggacttggtagagatggcaggaagggtgtgcggggtggttgtgtgcagaaccctgccgcccctgaggtgagcagaggcactggtgtgcctgccaggctggggcggagctgcccggaacccttgccaggccaatgtgtagcttggtggcgcccttgaaggccactggggggtaggtgtgtcctcccccggggctggaggccgggtgcctggtgggtgggcctgacctggcccacctcatccctccagcctgggatctcactgctctgcacatgtgcactgacgtgaattttatacgtttgtagaaactctgatgtaacttcttctacctctgaagcgccctcctgggccctgctgtcacgtggctggtgcggcttccccgagtgctggccccctgcccgctccccatgggcacccaccactcaaactctgcgtggtgaggcccggggaaagccaggccgggccctagcactgctcaggggcctggggctcctgggatttctgtgtgtttggaagcctctgtttttggagtggggggcgtggaaggcgggaggggctgacagtgcctggggccagagctgggcgaaggaggacatcctcactggacgagcactgcaggcctgacgagaggctccgggcagctgagggctgaagcgcctcgggatgccccacactgcccagagccacgggtcttgctgtgctgggggtggggtggccccaggcagctgccactgcccaggtgtgagtcgctgcagacctggtccctgagggtgggaggcctgcttgtgctgaagctgccatgtggtctggcccccagaagggctcctgagcgtagggagttgagccccgcagccgtggcggcatctcctcctccttcctccgccccatgcccagccttgcttccggctggtggcatgccttggggccgggcagcaggtgagaagctgcccccggagggaggggccaagggctgggtcagtctggcctgaggggtggatggctggccctgggggaaggctgggcctgggaggccctgtggacagcaggcctgaggccacgaggtcctggggccacccctctcctgctctgggtgtccttctcagagaagatggcagaaggctgcaggccctagaggggacgacgggctggggacgccctgagcttcctggctgtgtggcaggtgctggggaagctctctgggccatagggacctggctcccctctgagaggcccgcctgccctggggcacccagggctgtgctggtggcctgaggctgggaacttgggttcctgggctctgctggcgcctgggctttgtgggggccgaaggtggttgccccgccgggcagggggctgtgtgggccctcgtggggccaccttcctgtcagtgcccgagggacggtgggacagttgcccctgcgccaagggagcccactgccatcccccgtgggctggcgctgcagtcgcgcaccctgtgttgcctgctgacttgcttatgtctgtttggaagctgcttctgtttggccacaggcctgtgttcctgggctgatggccacagagctgacacttggggtttgagttccagacttgcagaccctgggatccgcttactcctccgcgccacggctgctgtgcttccagaggtggcgtgatgcctcccggggccatggtggggtgaaggatggcgagccggacataccattgttggatgtattttttttaaaacagcaataattagccattttaaaggagggatgtacctgtgtgtgtgcatgtgcacgtgtttgagcgtgtgtgtgtgtgcaagtgggttcttggatatgtgtagtgtgagcatgtgtgcatgtgtgagcctgtgcacgtgcatgttgtaggtgcataagcatgtacacgcgtgagcatgcatgtgtgtgtacacgtgtataggtgtacatgtgcatgagttgtgtacatgcgtgagcacgtgtatagatgtacgtgtgtgtgcgcatgtgtgcgtgtacatgtgtttgtgtcttgggtatgcataagcatgcacgtgtgtatgaatgtgcgtgtgtatgcatgagcacgtatgcatgtgtgatgcgcatgttcttgtgtacttctctgagggggcacatatgtatgagtgtatgagtgcatacatatgcatatggtgtacgtgtgtgtactttgtgtgtgggcatgtatgcgtatgagtacttgtgtgtggctggtgtatgggtgagcatgcacatgtgtatggatgcatatgtgagctgtacatgtagagtgtacatgtgtgttgcatgagcatgcatgcgtgcgagtgcctgtgtgtgtacttgcatatatgtggctgtgcaggtacccggcggtggtgggctggcagtgcccggggaagcaggtcctgctcacggcttccctgctgggccccaggccccgggctgagcctccctggcccctcttgcccctcagtggagcagggcctgggtggagggcctgggcagctccagggcaggtccggggaggccaggcttggggagcacagggggtggggttcacctgctgctgtttgttcccgaaactgtactgtgagcccacggcgggggcagattgttctgaggccccagatgtgccaaaacagcccccagggtgggggcgagcgagttctgaggagaggggctgcgggggccgggggtgggtgtgtgcccctcccctgaatggcccccaatgctgctgtttttcaataaaaccagagttgaaggca

SEQ ID NO: 157352 - DNA, 5870 bp, Homo sapiens
  Payload ID: 10844
  Gene Symbol: NAT8L
  Gene Name: N-acetyltransferase 8-like (GCN5-related, putative)
  Uniprot ID: Q8N9F0
  ENST ID: ENST00000423729
  CDS Start-End: 1-909
atgcattgtgggcctcccgacatggtctgcgagacgaagatcgtggccgccgaggaccatgaggcgctgccgggggccaagaaggacgcgctgctcgccgccgccggcgccatgtggcccccgctgcccgccgcgcccgggccggccgccgcgccccccgcgcccccacctgccccggtggctcagcctcacggcggggcggggggcgcggggccgccgggggggcgcggcgtgtgcatccgcgagttccgtgcggccgagcaggaggcggcgcgccgcatcttctacgacggcatcatggagcgcatccctaacacggccttccgcggcctgcggcagcacccgcgcgcgcagctgctctacgccctgctggcggcgctgtgcttcgccgtgagccgctcgctgctgctgacgtgcctggtgccggccgcgctgctgggcctgcgctactactacagccgcaaggtgatccgcgcctacctggagtgcgcgctgcacacggacatggcggacatcgagcagtactacatgaagccgcccggctcctgcttctgggtggccgtgctggatggcaacgtggtgggcattgtggctgcacgggcccacgaggaggacaacacggtggagctgctgcggatgtctgtggactcacgtttccgaggcaagggcatcgccaaggcgctgggccggaaggtgctggagttcgccgtggtgcacaactactccgcggtggtgctgggcacgacggccgtcaaggtggccgcccacaagctctacgagtcgctgggcttcagacacatgggcgccagtgaccactacgtgctgccgggcatgaccctctcgctggctgagcgcctcttcttccaggtccgctaccaccgctaccgcctgcagctgcgcgaggagtgaccgccgccgctcgcccgcccgcccccccggccgccctgtccgcctttgcccgcctgcccgccgcccggcgcggcctgctttcagacgctcaattggcgtttgtgttgggtttccccttttcaacatcctgcggttgtctggctggttccggggggtgcggggctgttgttcttcggcgacactttggtgggggtgggttgtttgtcgccatagcccctcgcccttccccacctgcctgggcggcttgccacctgaagagtggcatcttggaccaccgcggctgtccatgacgctgccctgcccgccgccactggggaaggcccagccttgctcaccaagcacagaacctctgcagcagatcccggggccaggctccggccccgcctgcggccccagcgccactgcctgtggaggccccagctggccacggcgctgctttgctccgcgcatgccgagggtgtggcccggctgagcatgccgcatgcacacagccccgccctgccgccctgcccagactggacccggagacccgggctggtgagcgcccctgtccccagcccccagctggctgtgggagggcctgcccctgcccccacctcctggagggcctggtctgccccgcgccgcccggctctgtccacacctgctttgctctgacgccctccatttctctggctccggcccctcccctgcctgggctgtgctgactggtgtcatcacccaggtgactcccatggcgtccgtggcacagccagggtgggggtccatgggacccctctccccagtgcccactggatcgtgctggcctctcccagatgtccccggggacctcctgcctctggctgacggtccaccctgtgaatcttatcagcccaggctgctgccaacagcgcccagcccacagcttctcccagcctgaaaccaacacattttctaataagttatttagacagaatagcactctgcatgactttaattcttgggacaaaacggtagtttgtaccctaagacacagtttctggcccagtgtgatgggggtgggtggccgggtgggtggagcgttttgctgttggaaacctggagggaaaccctgattggatgtcatttcctgccatggagcacgcctcccagccctggcctgcagtgtgggcagggtggggggcaagggagtccgcagcctccgggaggaggggcagggcgctgccttgggctgggtgggaagaggggtggccgcctcggcttccgctggccatgctcctggtctctccttcctgaggtcacaggcaggggctgccctggacggggggcggggggggtggcctggaaggggagacagaggtggagggtggcacaggctgcacattcagcttagaagtggacctggctttggtggcaggagaagaataaacacttgcccagacccctttgtgtgggggaattggggaggggtcgtggcaggcagggtgggccacggaactgggtcccaggcatcaaggccacgtgcagggccatggagggatgcttctcacgaggcgcttcagaagcgagcgaagggacagagaagccctgcgtccaagggccttttgtcctgttagcaattgaggtgtgcagagcactgtacagaccccactcccctgtacattcctccctggaggtgcccggtccccgcttggggatgggagttttgtagactgtacagaaatcggcaccctattttcttgcagctcagattttgttaatctggaatatacagacagacgtaaagtgttttagcaaaatggaaacaaacagttgtgcctttttcctcttttggtttggtttgggtttggcctggggctggtcccagttggtgcggggcatgctgggggcaggaggggcagggcgggccaggtggagtcaggtcttgggggtgtcatgtcggggtgctgccagcgtcccttggtcctgtgcctttggagcctcgggctcctggggtgcagggtgcttgggggtggctgttggagcccaccgacgccagggcagggcctggaggcccagggactgccagtgtctccttgatattgatcctagcagatccccctcctgggggttctgagagtcctgggcagtgtggccttctctcattctggtggcatctgcgcccgtgagtgacctcttccttggctgcactgccctgtgggtggtgagacgcttggccttttttgttgctgccaggacttggtagagatggcaggaagggtgtgcggggtggttgtgtgcagaaccctgccgcccctgaggtgagcagaggcactggtgtgcctgccaggctggggcggagctgcccggaacccttgccaggccaatgtgtagcttggtggcgcccttgaaggccactggggggtaggtgtgtcctcccccggggctggaggccgggtgcctggtgggtgggcctgacctggcccacctcatccctccagcctgggatctcactgctctgcacatgtgcactgacgtgaattttatacgtttgtagaaactctgatgtaacttcttctacctctgaagcgccctcctgggccctgctgtcacgtggctggtgcggcttccccgagtgctggccccctgcccgctccccatgggcacccaccactcaaactctgcgtggtgaggcccggggaaagccaggccgggccctagcactgctcaggggcctggggctcctgggatttctgtgtgtttggaagcctctgtttttggagtggggggcgtggaaggcgggaggggctgacagtgcctggggccagagctgggcgaaggaggacatcctcactggacgagcactgcaggcctgacgagaggctccgggcagctgagggctgaagcgcctcgggatgccccacactgcccagagccacgggtcttgctgtgctgggggtggggtggccccaggcagctgccactgcccaggtgtgagtcgctgcagacctggtccctgagggtgggaggcctgcttgtgctgaagctgccatgtggtctggcccccagaagggctcctgagcgtagggagttgagccccgcagccgtggcggcatctcctcctccttcctccgccccatgcccagccttgcttccggctggtggcatgccttggggccgggcagcaggtgagaagctgcccccggagggaggggccaagggctgggtcagtctggcctgaggggtggatggctggccctgggggaaggctgggcctgggaggccctgtggacagcaggcctgaggccacgaggtcctggggccacccctctcctgctctgggtgtccttctcagagaagatggcagaaggctgcaggccctagaggggacgacgggctggggacgccctgagcttcctggctgtgtggcaggtgctggggaagctctctgggccatagggacctggctcccctctgagaggcccgcctgccctggggcacccagggctgtgctggtggcctgaggctgggaacttgggttcctgggctctgctggcgcctgggctttgtgggggccgaaggtggttgccccgccgggcagggggctgtgtgggccctcgtggggccaccttcctgtcagtgcccgagggacggtgggacagttgcccctgcgccaagggagcccactgccatcccccgtgggctggcgctgcagtcgcgcaccctgtgttgcctgctgacttgcttatgtctgtttggaagctgcttctgtttggccacaggcctgtgttcctgggctgatggccacagagctgacacttggggtttgagttccagacttgcagaccctgggatccgcttactcctccgcgccacggctgctgtgcttccagaggtggcgtgatgcctcccggggccatggtggggtgaaggatggcgagccggacataccattgttggatgtattttttttaaaacagcaataattagccattttaaaggagggatgtacctgtgtgtgtgcatgtgcacgtgtttgagcgtgtgtgtgtgtgcaagtgggttcttggatatgtgtagtgtgagcatgtgtgcatgtgtgagcctgtgcacgtgcatgttgtaggtgcataagcatgtacacgcgtgagcatgcatgtgtgtgtacacgtgtataggtgtacatgtgcatgagttgtgtacatgcgtgagcacgtgtatagatgtacgtgtgtgtgcgcatgtgtgcgtgtacatgtgtttgtgtcttgggtatgcataagcatgcacgtgtgtatgaatgtgcgtgtgtatgcatgagcacgtatgcatgtgtgatgcgcatgttcttgtgtacttctctgagggggcacatatgtatgagtgtatgagtgcatacatatgcatatggtgtacgtgtgtgtactttgtgtgtgggcatgtatgcgtatgagtacttgtgtgtggctggtgtatgggtgagcatgcacatgtgtatggatgcatatgtgagctgtacatgtagagtgtacatgtgtgttgcatgagcatgcatgcgtgcgagtgcctgtgtgtgtacttgcatatatgtggctgtgcaggtacccggcggtggtgggctggcagtgcccggggaagcaggtcctgctcacggcttccctgctgggccccaggccccgggctgagcctccctggcccctcttgcccctcagtggagcagggcctgggtggagggcctgggcagctccagggcaggtccggggaggccaggcttggggagcacagggggtggggttcacctgctgctgtttgttcccgaaactgtactgtgagcccacggcgggggcagattgttctgaggccccagatgtgccaaaacagcccccagggtgggggcgagcgagttctgaggagaggggctgcgggggccgggggtgggtgtgtgcccctcccctgaatggcccccaatgctgctgtttttcaataaaaccagagttgaaggc

SEQ ID NO: 157353 - DNA, 1875 bp, Homo sapiens
  Payload ID: 10845
  Gene Symbol: NAT9
  Gene Name: N-acetyltransferase 9 (GCN5-related, putative)
  Uniprot ID: Q9BTE0
  ENST ID: ENST00000357814
  CDS Start-End: 75-698
gggaacgtggctggttggaggaggtagatcaccctttctgcgggggacgatttcgtcggtggtaggctgctaccatgaggttgaatcagaacaccttgctgctggggaagaaggtggtccttgtaccctacacctcggagcatgtgcccagcaggtaccacgagtggatgaaatcagaggagctgcagcgtttgacagcctcggagccgctgaccctggagcaggagtatgccatgcagtgcagctggcaggaagatgcagacaagtgtaccttcattgtgctggatgccgagaagtggcaggcccagccaggcgccaccgaagagagctgcatggtgggagatgtgaacctcttcctcacagatctagaagacctcaccttgggggagatcgaggtcatgattgcagagcccagctgcaggggtaagggccttggcactgaggccgttctcgcgatgctgtcttacggagtgaccacgctaggtctgaccaagtttgaggctaaaattgggcaaggaaatgaaccaagcatccggatgttccagaaacttcactttgagcaggtggctacgagcagtgtttttcaggaggtgaccctcagactgacagtgagtgagtccgagcatcagtggcttctggagcagaccagccacgtggaagagaagccttacagagatgggtcggcagagccctgctgatggctgggccttgtgggcagccactctgtgtgagcagggtgttgggcccatacacttcaaagaccagagccctgcactgggagagtgctcctggcccaggctgggaatcacctttcgaggcccttcagactctggcggggcttgctgtggcctccctccagctagtggtgtggctgagcagactccagggccagggccagttcccttctcccctcccggccaaacccagacccagactctaggaagctggaatggagggcagggatccatgggagatgtcgggatgaaggtgggagctggaggtgcagggggacctggaacatggatgggagtggacaggcctttctccttagaggccagaggtgctgccctggctgggagtgaagctccaggcactaccagctttcctgattttcccgtttggtccatgtgaagagctaccacgagccccagcctcacagtgtccactcaagggcagcttggtcctcttgtcctgcagaggcaggctggtgtgaccctgggaacttgacccgggaacaacaggtggtccagagtgagtgtggcctggcccctcaacctagtgtccgtcctcctctctcctggagccagtcttgagtttaaaggcattagtgttagatacagctccttgtggctggaaaacacccctctgctgataaagctcagggggcactgaggaagcagaggccccttgggggtgccctcctgaagagagcgtcaggccatcagctctgtccctctggtgctcccacgtctgttcctcaccctccatctctgggagcagctgcacctgactggccacgcgggggcagtggaggcacaggctcagggtggccgggctacctggcaccctatggcttacaaagtagagttggcccagtttccttccacctgaggggagcactctgactcctaacagtcttccttgccctgccatcatctggggtggctggctgtcaagaaaggccgggcatgctttctaaacacagccacaggaggcttgtagggcatcttccaggtggggaaacagtcttagataagtaaggtgacttgcctaaggcctcccagcacccttgatcttggagtctcacagcagactgcatgtgaacaactggaaccgaaaacatgcctcagtataaaacaaacattataaaacgaa

SEQ ID NO: 157354 - DNA, 1860 bp, Homo sapiens
  Payload ID: 10845
  Gene Symbol: NAT9
  Gene Name: N-acetyltransferase 9 (GCN5-related, putative)
  Uniprot ID: Q9BTE0
  ENST ID: ENST00000580301
  CDS Start-End: 83-703
ccgggcctgggaacgtggctggttggaggaggtagatcaccctttctgcgggggacgatttcgtcggtggtaggctgctaccatgaggttgaatcagaacaccttgctgctggggaagaaggtggtccttgtaccctacacctcggagcatgtgcccaggtaccacgagtggatgaaatcagaggagctgcagcgtttgacagcctcggagccgctgaccctggagcaggagtatgccatgcagtgcagctggcaggaagatgcagacaagtgtaccttcattgtgctggatgccgagaagtggcaggcccagccaggcgccaccgaagagagctgcatggtgggagatgtgaacctcttcctcacagatctagaagacctcaccttgggggagatcgaggtcatgattgcagagcccagctgcaggggtaagggccttggcactgaggccgttctcgcgatgctgtcttacggagtgaccacgctaggtctgaccaagtttgaggctaaaattgggcaaggaaatgaaccaagcatccggatgttccagaaacttcactttgagcaggtggctacgagcagtgtttttcaggaggtgaccctcagactgacagtgagtgagtccgagcatcagtggcttctggagcagaccagccacgtggaagagaagccttacagagatgggtcggcagagccctgctgatggctgggccttgtgggcagccactctgtgtgagcagggtgttgggcccatacacttcaaagaccagagccctgcactgggagagtgctcctggcccaggctgggaatcacctttcgaggcccttcagactctggcggggcttgctgtggcctccctccagctagtggtgtggctgagcagactccagggccagggccagttcccttctcccctcccggccaaacccagacccagactctaggaagctggaatggagggcagggatccatgggagatgtcgggatgaaggtgggagctggaggtgcagggggacctggaacatggatgggagtggacaggcctttctccttagaggccagaggtgctgccctggctgggagtgaagctccaggcactaccagctttcctgattttcccgtttggtccatgtgaagagctaccacgagccccagcctcacagtgtccactcaagggcagcttggtcctcttgtcctgcagaggcaggctggtgtgaccctgggaacttgacccgggaacaacaggtggtccagagtgagtgtggcctggcccctcaacctagtgtccgtcctcctctctcctggagccagtcttgagtttaaaggcattagtgttagatacagctccttgtggctggaaaacacccctctgctgataaagctcagggggcactgaggaagcagaggccccttgggggtgccctcctgaagagagcgtcaggccatcagctctgtccctctggtgctcccacgtctgttcctcaccctccatctctgggagcagctgcacctgactggccacgcgggggcagtggaggcacaggctcagggtggccgggctacctggcaccctatggcttacaaagtagagttggcccagtttccttccacctgaggggagcactctgactcctaacagtcttccttgccctgccatcatctggggtggctggctgtcaagaaaggccgggcatgctttctaaacacagccacaggaggcttgtagggcatcttccaggtggggaaacagtcttagataagtaaggtgacttgcctaaggcctcccagcacccttgatcttggagtctcacagcagactgcatgtgaacaactggaaccgaaaacatgcctcagtataa

SEQ ID NO: 157355 - DNA, 573 bp, Homo sapiens
  Payload ID: 10845
  Gene Symbol: NAT9
  Gene Name: N-acetyltransferase 9 (GCN5-related, putative)
  ENST ID: ENST00000582524
  CDS Start-End: 109-531
gcgcatgcggaaggggcggtagccggccgggcctgggaacgtggctggttggaggaggtagatcaccctttctgcgggggacgatttcgtcggtggtaggctgctaccatgaggttgaatcagaacaccttgctgctggggaagaaggtggtccttgtaccctacacctcggagcatgtgcccagcaggtaccacgagtggatgaaatcagaggagctgcagcgtttgacagcctcggagccgctgaccctggagcaggagtatgccatgcagtgcagctggcaggaagatgcagacaagtgtaccttcattgtgctggatgccgagaagtggcaggcccagccaggcgccaccgaagagagctgcatggtgggagatgtgaacctcttcctcacagatctagaagacctcaccttgggggagatcgaggtcatgattgcagagcccagctgcaggggtaagggccttggcactgaggccgttctcgcgatgctgtcttacggaggtgaccctcagactgacagtgagtgagtccgagcatcagtggcttctggagcagaccagccacgtgga

SEQ ID NO: 157356 - DNA, 583 bp, Homo sapiens
  Payload ID: 10845
  Gene Symbol: NAT9
  Gene Name: N-acetyltransferase 9 (GCN5-related, putative)
  ENST ID: ENST00000583757
  CDS Start-End: 86-505
cggccgggcctgggaacgtggctggttggaggaggtagatcaccctttctgcgggggacgatttcgtcggtggtaggctgctaccatgaggttgaatcagaacaccttgctgctggggaagaaggtggtccttgtaccctacacctcggagcatgtgcccaggtaccacgagtggatgaaatcagaggagctgcagcgtttgacagcctcggagccgctgaccctggagcaggagtatgccatgcagtgcagctggcaggaagatgcagacaagtgtaccttcattgtgctggatgccgagaagtggcaggcccagccaggcgccaccgaagagagctgcatggtgggagatgtgaacctcttcctcacagatctagaagacctcaccttgggggagatcgaggtcatgattgcagagcccagctgcaggggtaagggccttggcactgaggccgttctcgcgatgctgtcttacggaggtgaccctcagactgacagtgagtgagtccgagcatcagtggcttctggagcagaccagccacgtggaagagaagccttacagagatgggtcggcagagccctg

SEQ ID NO: 157357 - DNA, 839 bp, Homo sapiens
  Payload ID: 10845
  Gene Symbol: NAT9
  Gene Name: N-acetyltransferase 9 (GCN5-related, putative)
  ENST ID: ENST00000578822
  CDS Start-End: 172-810
ctttctgcgggggacgatttcgtcggtggtagaattttggagtctgtattctttgaagtgtctagacggaactaatgacggaagtcaacttagccccagcaggaaagctggagcgcctacccaaagttggaggaaattcagggtcctgaagtctttgctctccccatctgcatgcaggctgctaccatgaggttgaatcagaacaccttgctgctggggaagaaggtggtccttgtaccctacacctcggagcatgtgcccagcaggtaccacgagtggatgaaatcagaggagctgcagcgtttgacagcctcggagccgctgaccctggagcaggagtatgccatgcagtgcagctggcaggaagatgcagacaagtgtaccttcattgtgctggatgccgagaagtggcaggcccagccaggcgccaccgaagagagctgcatggtgggagatgtgaacctcttcctcacagatctagaagacctcaccttgggggagatcgaggtcatgattgcagagcccagctgcaggggtaagggccttggcactgaggccgttctcgcgatgctgtcttacggagtgaccacgctaggtctgaccaagtttgaggctaaaattgggcaaggaaatgaaccaagcatccggatgttccagaaacttcactttgagcaggtggctacgagcagtgtttttcaggaggtgaccctcagactgacagtgagtgagtccgagcatcagtggcttctggagcagaccagccacgtggaagagaagccttacagagatgggtcggcagagccctgctgatggctgggccttgtgggcagccactctgt

SEQ ID NO: 157358 - DNA, 583 bp, Homo sapiens
  Payload ID: 10845
  Gene Symbol: NAT9
  Gene Name: N-acetyltransferase 9 (GCN5-related, putative)
  ENST ID: ENST00000583476
  CDS Start-End: 81-488
gggcctgggaacgtggctggttggaggaggtagatcaccctttctgcgggggacgatttcgtcggtggtaggctgctaccatgaggttgaatcagaacaccttgctgctggggaagaaggtggtccttgtaccctacacctcggagcatgtgcccagcaggtaccacgagtggatgaaatcagaggagctgcagcgtttgacagcctcggagccgctgaccctggagcaggagtatgccatgcagtgcagctggcaggaagatgcagacaagtgtaccttcattgtgctggatgccgagaagtggcaggcccagccaggcgccaccgaagagagctgcatggtgggagatgtgaacctcttcctcacagatctagaagacctcaccttgggggagatcgaggtcatgattgcagagcccagctgcaggggtaagggccttggcactgaggccgttctcgcgatgctgtcttacgaaacttcactttgagcaggtggctacgagcagtgtttttcaggaggtgaccctcagactgacagtgagtgagtccgagcatcagtggcttctggagcagaccagccacg

SEQ ID NO: 157359 - DNA, 799 bp, Homo sapiens
  Payload ID: 10845
  Gene Symbol: NAT9
  Gene Name: N-acetyltransferase 9 (GCN5-related, putative)
  ENST ID: ENST00000580632
  CDS Start-End: 10-633
gctgctaccatgaggttgaatcagaacaccttgctgctggggaagaaggtggtccttgtaccctacacctcggagcatgtgcccaggtaccacgagtggatgaaatcagaggagctgcagcgtttgacagcctcggagccgctgaccctggagcaggagtatgccatgcagtgcagctggcaggaagatgcagacaagtgtaccttcattgtgctggatgccgagaagtggcaggcccagccaggcgccaccgaagagagctgcatggtgggagatgtgaacctcttcctcacagatctagaagacctcaccttgggggagatcgaggtcatgattgcagcttgggacaggagggtgggggcaggcgcctccttacttgcccctgtctcatctcctctgcgaggagtgaccacgctaggtctgaccaagtttgaggctaaaattgggcaaggaaatgaaccaagcatccggatgttccagaaacttcactttgagcaggtggctacgagcagtgtttttcaggaggtgaccctcagactgacagtgagtgagtccgagcatcagtggcttctggagcagaccagccacgtggaagagaagccttacagagatgggtcggcagagccctgctgatggctgggccttgtgggcagccactctgtgtgagcagggtgttgggcccatacacttcaaagaccagagccctgcactgggagagtgctcctggcccaggctgggaatcacctttcgaggcccttcagactctggcggggcttgctgtggcctccctccagctagt

SEQ ID NO: 157360 - DNA, 497 bp, Homo sapiens
  Payload ID: 10845
  Gene Symbol: NAT9
  Gene Name: N-acetyltransferase 9 (GCN5-related, putative)
  ENST ID: ENST00000581466
  CDS Start-End: 251-497
agattgggatagtggtgctgtagatgggtattctctacttgtagttttccgtttgagggttcctggtgccctaacttcgtgggatctgtccagccgcctttgttgaggttggcttgccatatacatccccttctggaatttgaagaatgtttggtttcagactgctcctccgcactgacccgagacaggataggaaattggacagatagaactgactcgtcctgctgttcttgtcaggtaccacgagtggatgaaatcagaggagctgcagcgtttgacagcctcggagccgctgaccctggagcaggagtatgccatgcagtgcagctggcaggaagatgcagacaagtgtaccttcattgtgctggatgccgagaagtggcaggcccagccaggcgccaccgaagagagctgcatggtgggagatgtgaacctcttcctcacagatctagaagacctcaccttgggggagatcgaggtcatgattgcagagccca

SEQ ID NO: 157361 - DNA, 1011 bp, Homo sapiens
  Payload ID: 10845
  Gene Symbol: NAT9
  Gene Name: N-acetyltransferase 9 (GCN5-related, putative)
  ENST ID: ENST00000581136
  CDS Start-End: 68-676
tggctggttggaggaggtagatcaccctttctgcgggggacgatttcgtcggtggtaggctgctaccatgaggttgaatcagaacaccttgctgctggggaagaaggtggtccttgtaccctacacctcggagcatgtgcccagcaggtaccacgagtggatgaaatcagaggagctgcagcgtttgacagcctcggagccgctgaccctggagcaggagtatgccatgcagtgcagctggcaggaagatgcagacaagtgtaccttcattgtgctggatgccgagaagtggcaggcccagccaggcgccaccgaagagagctgcatggtgggagatgtgaacctcttcctcacagatctagaagacctcaccttgggggagatcgaggtcatgattgcagagcccagctgcaggggtaagggccttggcactgaggccgttctcgcgatgctgtcttacggtctgaccaagtttgaggctaaaattgggcaaggaaatgaaccaagcatccggatgttccagaaacttcactttgagcaggtggctacgagcagtgtttttcaggaggtgaccctcagactgacagtgagtgagtccgagcatcagtggcttctggagcagaccagccacgtggaagagaagccttacagagatgggtcggcagagccctgctgatggctgggccttgtgggcagccactctgtgtgagcagggtgttgggcccatacacttcaaagaccagagccctgcactgggagagtgctcctggcccaggctgggaatcacctttcgaggcccttcagactctggcggggcttgctgtggcctccctccagctagtggtgtggctgagcagactccagggccagggccagttcccttctcccctcccggccaaacccagacccagactctaggaagctggaatggagggcagggatccatgggagatgtcgggatgaaggtgggagctggaggtgcagggggacctggaacatggatgggagtgg

SEQ ID NO: 157362 - DNA, 394 bp, Homo sapiens
  Payload ID: 10845
  Gene Symbol: NAT9
  Gene Name: N-acetyltransferase 9 (GCN5-related, putative)
  ENST ID: ENST00000578947
  CDS Start-End: 68-394
ggaagtaggtttaaggcagggctgaaagttgattctgggttggaatccctggactggggctgctaccatgaggttgaatcagaacaccttgctgctggggaagaaggtggtccttgtaccctacacctcggagcatgtgcccagcaggtaccacgagtggatgaaatcagaggagctgcagcgtttgacagcctcggagccgctgaccctggagcaggagtatgccatgcagtgcagctggcaggaagatgcagacaagtgtaccttcattgtgctggatgccgagaagtggcaggcccagccaggcgccaccgaagagagctgcatggtgggagatgtgaacctcttcctcacagatctagaagacctcaccttgggggagatcgaggtcatg

SEQ ID NO: 157363 - DNA, 583 bp, Homo sapiens
  Payload ID: 10845
  Gene Symbol: NAT9
  Gene Name: N-acetyltransferase 9 (GCN5-related, putative)
  ENST ID: ENST00000579218
  CDS Start-End: 33-583
gggaacgtggctggttggaggaggctgctaccatgaggttgaatcagaacaccttgctgctggggaagaaggtggtccttgtaccctacacctcggagcatgtgcccaggtaccacgagtggatgaaatcagaggagctgcagcgtttgacagcctcggagccgctgaccctggagcaggagtatgccatgcagtgcagctggcaggaagatgcagacaagtgtaccttcattgtgctggatgccgagaagtggcaggcccagccaggcgccaccgaagagagctgcatggtgggagatgtgaacctcttcctcacagatctagaagacctcaccttgggggagatcgaggtcatgattgcagagcccagctgcaggggtaagggccttggcactgaggccgttctcgcgatgctgtcttacggagtgaccacgctaggtctgaccaagtttgaggctaaaattgggcaaggaaatgaaccaagcatccggatgttccagaaacttcactttgagcaggtggctacgagcagtgtttttcaggaggtgaccctcagactgacagtgagtgagtccgagcatca

SEQ ID NO: 157364 - DNA, 896 bp, Homo sapiens
  Payload ID: 10845
  Gene Symbol: NAT9
  Gene Name: N-acetyltransferase 9 (GCN5-related, putative)
  ENST ID: ENST00000582870
  CDS Start-End: 197-832
ggctggttggaggaggtagatcaccctttctgcgggggacgatttcgtcggtggtagaattttggagtctgtattctttgaagtgtctagacggaactaatgacggaagtcaacttagccccagcaggaaagctggagcgcctacccaaagttggaggaaattcagggtcctgaagtctttgctctccccatctgcatgcaggctgctaccatgaggttgaatcagaacaccttgctgctggggaagaaggtggtccttgtaccctacacctcggagcatgtgcccaggtaccacgagtggatgaaatcagaggagctgcagcgtttgacagcctcggagccgctgaccctggagcaggagtatgccatgcagtgcagctggcaggaagatgcagacaagtgtaccttcattgtgctggatgccgagaagtggcaggcccagccaggcgccaccgaagagagctgcatggtgggagatgtgaacctcttcctcacagatctagaagacctcaccttgggggagatcgaggtcatgattgcagagcccagctgcaggggtaagggccttggcactgaggccgttctcgcgatgctgtcttacggagtgaccacgctaggtctgaccaagtttgaggctaaaattgggcaaggaaatgaaccaagcatccggatgttccagaaacttcactttgagcaggtggctacgagcagtgtttttcaggaggtgaccctcagactgacagtgagtgagtccgagcatcagtggcttctggagcagaccagccacgtggaagagaagccttacagagatgggtcggcagagccctgctgatggctgggccttgtgggcagccactctgtgtgagcagggtgttgggcccatacacttcaaagac

SEQ ID NO: 157365 - DNA, 584 bp, Homo sapiens
  Payload ID: 10845
  Gene Symbol: NAT9
  Gene Name: N-acetyltransferase 9 (GCN5-related, putative)
  ENST ID: ENST00000581451
  CDS Start-End: 416-584
agagccccgtggggtggtcgccggggtaagaggttggaagtaggtttaaggcagggctgaaagttgattctgggttggaatccctggactggggcaagtaatgggagctctggggatactttggtacttggtacttggtgcttgggtttgaggaatcgaagttctggggagtggacggaaggaaccggcagaaacggagcccaggcttggcctcttggagtgggagtcaaggattgtttaattatccttaaccagcctggttctctttcttgcaagaattttggagtctgtattctttgaagtgtctagacggaactaatgacggaagtcaacttagccccagcaggaaagctggagcgcctacccaaagttggaggaaattcagggtcctgaagtctttgctctccccatctgcatgcaggctgctaccatgaggttgaatcagaacaccttgctgctggggaagaaggtggtccttgtaccctacacctcggagcatgtgcccaggtaccacgagtggatgaaatcagaggagctgcagcgtttgacagcctcggagccgctgaccctggagcaggagtatg

SEQ ID NO: 157366 - DNA, 1103 bp, Homo sapiens
  Payload ID: 10845
  Gene Symbol: NAT9
  Gene Name: N-acetyltransferase 9 (GCN5-related, putative)
  ENST ID: ENST00000584022
  CDS Start-End: 75-545
gggaacgtggctggttggaggaggtagatcaccctttctgcgggggacgatttcgtcggtggtaggctgctaccatgaggttgaatcagaacaccttgctgctggggaagaaggtggtccttgtaccctacacctcggagcatgtgcccaggtaccacgagtggatgaaatcagaggagctgcagcgtttgacagcctcggagccgctgaccctggagcaggagtatgccatgcagtgcagctggcaggaagatgcagacaagtgtaccttcattgtgctggatgccgagaagtggcaggcccagccaggcgccaccgaagagagctgcatggtgggagatgtgaacctcttcctcacagatctagaagacctcaccttgggggagatcgaggtcatgattgcaggaggaggccctcctgtttctgctccttcatggtcctcagtttcccccaagtggctactgactatccccatgaggcagcatactgactccatgagaatggtaatgatagtagcaacttcagagttgttgagaattaaatgagatggtgtctgccaagtgcccgcactggagcctggcacacggcgtcagcgccgctcctgttgtctctcctagagcccagctgcaggggtaagggccttggcactgaggccgttctcgcgatgctgtcttacggtaagaaagtgtgagcagacaatgcgggaagtgggcaggccccaggtgaactttgttcaggtgtgagggttgggggcaggtgaaggttcctcctctgcagcttgggacaggagggtgggggcaggcgcctccttacttgcccctgtctcatctcctctgcgaggagtgaccacgctaggtctgaccaagtttgaggctaaaattgggcaaggaaatgaaccaagcatccggatgttccagaaacttcactttgagcaggtggctacgagcagtgtttttcaggaggtgaccctcagactgacagtgagtgagtccgagcatcagtggcttctggagcagaccagccacgtggaagagaagccttacagagatgggtcggcagagccctgctgatggctgggccttgtgggcagccactctgtgtga

SEQ ID NO: 157367 - DNA, 4931 bp, Homo sapiens
  Payload ID: 10846
  Gene Symbol: NATD1
  Gene Name: N-acetyltransferase domain containing 1
  Uniprot ID: Q8N6N6
  ENST ID: ENST00000611551
  CDS Start-End: 147-488
actttcagcgccgccgcctgcggtctcccaggccgtaactaccccaccgcctgccgcctgcgcccgcgctccagccccgccgcgcgcctgacctttccccgcgcgccccggcccccgccggcgccgcgccgcagccccgcgcgcagatggcgcactcggctgccgccgtgccgctgggcgcgctggagcagggctgccccatccgcgtggagcacgaccgccggcgccgccagttcactgtccggctcaacggatgtcatgaccgggccgtcctgctctatgagtacgtgggcaagcggatcgtggacctgcagcacaccgaggtcccagatgcctaccgtgggcgtggcatcgccaagcaccttgccaaggccgccctggacttcgtggtggaggaggacctgaaggcccatctcacctgctggtacatccagaagtacgtcaaggagaaccccctgccgcagtacctggagcgcctgcagccgtaaccctggcctgcaggcgggagcgctccctgccggactcttccacgtggcctttgcctggccccacgtgctctcaggaacctggtcccactgggaacagactcagagttatttttgtaaggacactcatctgtgccccacgtccagatccctggaggcagctgaccaatgatgggcggtgacccggtaaccgaggcggcaaggaggccaggtagtcccggcacctctcactctgcagagaccagcggcttcgtgggaggcctgtgggtcacacgtaggggctagagccagcctgcatcctgcccaccgggctccacttggagatcagcaggagggccagtgtgggacccctgctgccacctctcctgggcctgtgtcctttctggaaattaagaaggtgtgctccagagccaagaggagcaataagaaacctcgtgtgccagcttctgagggtggcagtgccagaccccacctgccagcggtgctgcccctttctcagacccccatgcccagtgcaggcagggccctggaaagggtcagctctccctgacagagaccagcagagtgaaggactgagcactggccaggctcaaccgtacgtgcggttcacacatgtgaacacacaggatgcagtctacaggcgggctggtggtgggtgccgggggtgttttcctctccttggtacccccatcttttttttggcctctcgtgtaggttctgcaggaaaccaaggccccatccccatgggctgctatcccctatacccctgtctgccaggaggagatccaagggggcctgagcagctgcaggcccgccccttgctggccttggccacctgcctgagccttctccgaggagatgccttggggctggggtgggagtgaagctgactattctccaaaaaccaccctcagcatccaagaggaagaaacatcagccacaggggtttctgtgctgctgccagacatcagtgtcctcttttgtggctggctacagccggatacactttgctgcccatctggccctgggctcctccccaacccagccttcctgggtgcagcctgggagacacactagcatgctttggtgggaccagcctttccagggcatgctggcttcccctggggctgactcaggtcccgccctcttgtgtcagtgctaacaaggatcagattcgtccctgcccttctgtagagctggagggtgacctggagccaggggccctttagggctgagacatttgttagtcggagtgatgcatccctacccggcttcggggggagtcaggctgggctctgggcagtacagggagaggttcaccaggacccccatgccttcctcccccggtgcaggggcagtggtcaccatgctgactcctccctttgactccatgcacgggcgctggctggcctgtggttgcatttcccactcacctccttgctatccccagtcttggcaccgagaccccccacattccttctccagcaacagcagcccaggggccttcctgcctggacgcaggaccacggagacctgcatgtgcagggaggcctggcagcctgccgatgggggtccccgagccccggagtctcctcgaaacccctgctgtgggtcacagcatggaccaggaggggtcaccatcctgagtacccccgacatccctgccccttgacctgtggcagatgctcctgccctggcctccaggaagtcagctcttttgcaaagggcttgtgtgagaggtcggagaaagccctgggcctccagggagatgcagctggcaggaggtgggctgagctgctccggggctaggggtggcccattgctggcagaatttaaggaaagagcaggttgtaggcacagaggatgggcagccaggcctgggccttccccttactgtcccagggcagcagagctagggtcctcttttaccctccctaaggtcacccccttcccatctacacgtccctccccaagttcaagcacatagtcaatcatgaccactcaggagctcagtgagctggggccatgtccctgtggcctccagcccatccgcaggagggtcccttgcagtgacagcacaaagagtcccccacaggaagcccctgagggccagcatggaccttgagagccaggagggaatgggcctggtgccactctgttcccactcccacctaagattcctacccctgtgttctagcaggtgactcttgatctggccagcccacaacaaatacttgaactaggcagcatggggtggtggaggcctgcagaggccccgggcccaggaactgagactagggctttctcatgaggcctcatcaagctcccgcaggtatgacctggcctcctcgcctcgggctgccttaaagcaccgctaacccacgccaaggggctaggcagggcttcgcggggcctggcccaaggtctccagcagagcaataacatcttcccaggttgggttgccacagacaccgtgccctggagcccccagcccatcccatctggtgctaccctgtctgcctggcagcctagcctcacccctcctgtccggtcacctgggggtccttggtaaggatgccgccacatggggccggtttatgcacctgggcgagaacctgactggggcaggggatgctcaggggcctgcaggtctcccacagagctgcttttctgcccgcctcaccctgtgggtttgtatttcttgccgggtcaaaataggcagtgactcgtgccttccctcctcagggccggcggcagggtgtggacccagctggccgctggaccgtccccttcctcattctccaagctcatcaacaggtctcagaggaacatttccataaaaggtgtggcctggcatgcagtgctgtctgcacgctgtcgcttcccccacagcaacctgccggtcagccttaactggtgtggaggtcgaggtggggagggggaggcgggcttccctccctggtgtctggcctctttttgctcagccctcagcacagccttcagcgtggagagcgagaccctgcgtgtcactggggcttggctgaggtctccctgcaggataacagtgacttcaggaacccagaccccagtctgggcggctctaccttcccggctggcccagcccccacaccacagttccctgccacctccaggcacaaaagcctctgaggccacagcccagctatgaagctgagtggctttgtgcggtctcctagggaaggggcagtgatgccatgcatgagatccgctgtgccataagaagttgcttcctttagaatttctggtccaatgcagggaggtgaggcccagcctcatgataacacatgcccatcaaggaaaagctgtggctaatgcttccaaaacaagtgaaaatcttgcaccaggcccagggccatatctcattccgccccagctactgagggaggggacagactgctggaggacaatttctcctagttaccactaggggttacatggctactcagaatgaaagataaattgccaggcctgttgcaatcttttttttgagatgggagtcttgctctgtcgcccaggctggagtgcagaggtgcgatctcagctcactgcaacctccacctcccgggtcaagcaattctcctgcctcagcttcccgagtagctggaattacaggtgcccaccaccatgcctggctaatttttgtatttttagtagagacggggtttcaccatgttggccaggctggtcttgaacacctgacctcaaatgatccgcccacctcggcctcccaaagtgttgggattacaggcgtgagccacctcaccaggccccgttgcaatcttactccacttcgttttcacagcagtcccgggacatgcccattattaggcctatttgatagatgatactgaggctgagtcgggggtcacaagccaaagccacaccgctagaagggctcaggacccagcccagctcccgtcctcttggtggcatcaagcttgtgtgatatgaggtcttatgtctgctcatgacagccttaaaagcaataaacagatacaacttccagcaacttcccactcagctgcaaggctgcgggggggtcctgcctcgagccataaggtgagcagctagccagtgccgggccagtgtggagaaggctgaattgcctgtgaagctggggttgcaggcaggaatattcatggagcccctgaccatgtactcacactgctcttcctcagttcagggttcttggatttgctcaagtccacccaaatatccctttacgattctcagggtcccactccttccagatccaatgccctaaactttacataagagttccggcaaggctgtgacttcaacttgtgttgtaactgcaacctgcagaatcaaatttagggttatgttttcagttgtatcagtcttacggctacaagatattaaagagattcttttctggttatcaaa

SEQ ID NO: 157368 - DNA, 7254 bp, Homo sapiens
  Payload ID: 10847
  Gene Symbol: NWD1
  Gene Name: NACHT and WD repeat domain containing 1
  Uniprot ID: Q149M9
  ENST ID: ENST00000379808
  CDS Start-End: 32-4330
ataccctccatgcccttccttgcagatatggatgcagagagggaagccctgcagagcactgcctaccctgaagtgccagaccttctgccagaggcacggcttgatgtttgaggtcgttgatctgaggtggggtattcggaacattgaagccactgaccacttgaccacagaactctgcttggaggaggttgaccggtgttggaaaacatccatagggccagcttttgttgccctcatcggtgatcagtacggcccctgtctgattccctcgcggatcgatgagaaggagtgggaggtattgagggaccatctgactgccaggccaagtgacctggagctggtggcacgatacttccagagggacgagaatgcgtttcctcccacctacgtcctgcaggcaccaggtactggggaggcctgtgaaccagaggaggccaccttaacttctgtcctacgctctggagcccaggaggcccggaggctggggctcatcacccaggagcagtggcagcactaccaccggtcagtcattgagtgggagatagagcggagcctgctgagctcagaggaccgggaacagggagccaccgtcttccttagagagatccaagacctccacaaacacatccttgaagactgcgcccttaggatggtggaccggctcgcggatggctgcctggacgctgatgcccagaaccttctcagcagcctcaaaagtcacatcactgacatgcacccaggggtcctcaagacccaccgcctgccgtggagccgcgacttggtgaaccccaagaacaagactcacgcctgctacctgaaggagctgggtgagcagtttgtggtgagggccaatcaccaggtcctcacacgcctccgtgagctggatacggccggacaggagttggcgtggctctaccaagagatccgccaccacctttggcagagctcggaggtcattcagaccttctgcggacgccaggaactcctggcccggcttgggcagcagctcaggcacgatgacagcaagcagcacacccccctggtactctttgggcccccaggcattggaaagacagccctgatgtgcaagctggctgagcagatgccaaggctgctggggcacaagacagtgaccgtcctgcggctgctggggacgtcacaaatgagctcagatgcccgtggcctgctgaagagcatctgcttccaggtgtgcctggcctatgggctgcccttgccccctgcccaggttctggacgcccacaccagggtggtccagtttttccataccctcctccacactgtctcttgcagaaacttcgagtctctcgtgctcctgctggatgctatggatgacctggactctgtccgccatgctcggagggttccctggctgcctctcaactgccccccgagggtgcacctcatcctctcagcttgctcgggggcactgggggttttggacaccttgcagcgggtgctcctggacccggaggcctactgggaggtgaagcccctttccggaaaccaaggccagcagatgatccaactcctgctggcagctgcaaggaggacgctgagcccggtgcacacagatttgctctgggccagcctcccagagtgtgggaacccagggcggctgaggctggcgtttgaggaagcccggaaatgggcctctttcaccgtgcctgtcccgctggccaccaccgcagaggaagccacgcaccaactctgcacccgcctggagcagacacacgggcagctcctcgtggcccacgtgctgggctacattgtgtcttcccgacacggtctctcggaggcggagctgaaggatgttttgtccctggacgacgaggtcctgcaggatgtgtaccgagattggaccccgcccagcaaggagctgctgcgcttcccgcccctgctgtgggtgcggcttcgtcgggatctgggatactacttggcccggcggcccgtggatggcttcaccctcctggccattgcccacagacagctggtcgaggtggtccgtgagcgctacctgtcaggatccgagagagccaagaggcatggcgtcctggccgacttcttctcagggacctggagccagggtaccaagaagctcatcactctgccacttgtggggaaaccactgaacttggaccgaaaggtggccccgcagcctctgtggttctcacatacggttgcaaacctgcggaagctgaaggagttgccctatcacctgcttcactcgggccgcctggaggagctgaaacaggaggttctgggcagcatgagctggatttcctgccggggcatctctgggggcattgaagacctgctggatgactttgacctgtgtgcccctcacctggactcccctgaggttggcctggtccgtgaagccctccagctctgccgccctgctgtggagctccgaggcatggagaggagcctcctgtacacagaactgctggccagactccatttcttcgccacctcacatccagcactggtgggacagctatgccaacaggcccagagctggttccagttgtgcgcacaccctgtgctggtgcccctcggaggattcctccagcccccgggaggacccctccgggcaactctcagcggctgtcacaaaggcatcaccgccatggcatggggtgtggaggagaagctgctggtgattggcacccaggatggcatcatggctgtgtgggacatggaagagcagcatgtgatccacatgctaactggacacacaggagaggtgaggtgtgtgaaaatatttgccaaagggaccctcgccaactctgcttcaaaggattacacgctgcacttgtggaacttactctctggccaggagaaatttaccatttgggatggaggctcaaaaaatcccgctgaacctcagatctggaaccttcatgtggatgaggcacacaaagttgtgtattcagcatctggctcaaagatcaatgcttggaatctggaaactgcagagccggtattccatatcctgggagatgcctctgatccttggatgtgcatggccgtgctggcctcccaggccacactgctgacagtgtccagggatggtgtggtcagtctgtggagctcagctacgggaaaacttcaggggaagcaacatatgtccagcatcaaagaagaaacacctacctgtgccgtctcagtccagaagcaaggaaagcttgttaccgggtttagcaatggctccatctctttggtttcctccaaaggggacagattgctggagaagcttccagatgctgtgaggttcctggtggtctctgaagatgagtccctcctcgccgcaggctttggaagatcggtgcggatattcttggcggactcgaggggctttcgccgattcatggccatggatctggaacatgaagacatggtggagacggctgtttttggtactgagaacaacctgatcatcacggggtcccttgatgcgctcattcaggtgtggagtctgtcagaacaggggacccttctggacatcctggaaggcgtcggggcccccgtgagcctgctggcccgcggcggggctttggtggcatctgcttccccacagtcctcatctttcaaggtctgggatctcagcgatgctcataggtcccgggtgcctgcaccatttctggaccgcaccggcctcaccgcagtgtcccacaatggaagctacgtctacttccccaaaattggggacaaaaacaaagtcactatttgggacttggcagaaggcgaggaacaagattccctggacacctccagtgagatcaggtgtctggaggttgctgagcagcgcaagctcctatttacgggcctcgtgtcgggggtcgtccttgtgttccccctgaattccaggcaggacgtgatatgcattccccctcccgaggcccggaaagcaatcaactgcatgtccctgagcaagtgcgaggaccgcctggccatcgcctatgacaacatcgtcctggtgctggacatcacctccggggacccctgcccggtcatcgatgggccaagatacaccttttacactcagctgcccgagaccctctccagcgtggccattctgacggactaccgcgtggtctacagcatgaccaatggggacctctttctttacgagtgtgcaacttccaaagcgtttcccttggagacccacaggagccgagttgcctgtgtggaggtcagccacaaggagcagctggtggtcagcgggtctgaggatgccctgctgtgtctctgggacctgcaggcacgcaagtggaaattcgagatgagctacacggcaccctgctgacagtccagtttgtccatgctgtggtaaacagaatcatcccaaccaccagtggcttcattgcccccaccaggcatggttatctgatccgagagaatttccagtgcctttcagcaaaagcctcaccgcaggaccctcttaagaacttcaagaaggcaatgtggatggtcaaatccaggcagagagaggagctagttgcagctgcaggagctccccaggacttggagtcagaaagtgcccagggaaatgaaaccaaatcaaacaaatgctcacaagtgtgcctgatagtgtaaaaaaataaaaataaaaaaaccctgtgggggtatggggctccagtgagttagccccatttaatctagttaaagcaaaaagaatacgtttgctggtgtatatctggacccatggcttcagattatggcttcagaccttgtctcttctcatctttccattattctttcctctttttcattttcattctcagacttgccacccccaggttagcaacatggtggccaatatgctgctgtctccaatttcaatagaaaagagagcttctctttcccaacagtcctagcctcaactctactggtcccaattggcccatacgcctagccctaaaccaattattatatctgggagaatgcagagctctaatcggctagactgatccaatgtccaccactgggactgagaatagaagagattactcctgagatgcaaactggagttctggtaccagatgaagggggaacggatgaatgtgagatacagcaaatcactgatgtggaccacagaacctcacagtttataaagctgtaggtgctgtcatctgatcctcatcacaactcatactttagggagggcaggagtttctgtatctattttacagatgaggaaactgagccttgcggaagtagttataatttgattcaggtcacaagtccaaggtgcaagagctctgagagtgagccttctgtcccattcctgttagacctcactccaatttcagtctgcagagcacaaccatctcttccacaggcaccacactcaaatgctcacaggagctagtgactaatctagacacttccatgcacctgggtgagcagcagggagagacagagactggacatgtggaaggcagagattgtgtctagggtgggtatgagcagcctgactgtagcccagaatcaccatggccaaacaagcccactgctgtcagtgcttccagttgtaataagcaaagccagaaatccagacttttatgcaaaaatgttctgacttttaaagttggcgattggttgaatttatatctatagtgcatttggcatgtgcgtctttggttaatgagctgacttcaggactcacgctggcagtaaaacaatcaacatgttatagttcatccctctctattccttggctcccaaacttttgggataaagatgtgggtttttaatcttaaaaactggaggctcttggaagtagaaagagctgctgatctctccctgctttgcttttgaactgtctgccttgtgcaagttcaacagtcaaactgttttcattccacttaagtggatctttcttctttgcccacagccttctaaaagcccttctcagtcttctcaggcttttactttaatgctaggatagtctaaatcttcaaggtggctatcccttctcccctccgtggaattcctgatagagtctcaataaaagcaaccttagaaacagaggcttttgagctgaacaagaccctactgctgtcttattcatccattttccaaaccagttttccaaggcaggttttggtagttctgcaaatgttagtgtcaaatttcatttaaaaatattttaaactgtaattttaagatgtatgcttggatgtattgggcagcagcttctaaggtgttgaagattactaaggttggtgcaaaaagtaactgtggttttcgccattaaaaatattaaaaataatggcaaaaactggctgggcacagtggctcacacctgtggtcccagctctttggaaggccgaggcaggtggatcacctgaggtcaggagtttgagaccagcctggacaacatggtgaaacccttctctactaaaaatacaaaaatcagccaggcatggtggtgagtgcctgtaatctcagttactcaggaggctgagtcaggagaatcacttgaacccgggaggcggaggttgcagtgagctgagattgtgccactgcactccagcctgggtgacagagcaagactccatctcataataataataataatggcaaaagcctcggtggctcacgcctgtaatcccagcactttgggaggctgaggcgggtggatcacttgaggccaggtgttcaagagcagcctggtcaacatggtgaaactctgtctctactcaaaaatacaaaaattagcctggtgtggtgacgtacacctgtaattccagctacttgggaggctgaggcaggagaatggcttgaacccgggaggcggaggttgcagtgagccgagatcgcaccactgcactccagcatgagtgacagagactctgtctccaaaaaaaaaaaaaaaaaaaagtaatggcaaaaaccacaattaattttgcatcaacctaataatttaggattcttctgccattttcatttaactgatttaactgaagagcccaattaaattgtgaagggagccctgaaaaaattagctactctttgccactgcttctctgtgaatcaagggcttacccaatgcagaaataaagtagatgttgagaccaattaagatttcacctacaaattctgattttaaatgcctgtgtccatctccacagcctcagtgagaattgattgttttgtagataaatcctaatttaaacattggaaatgcctttttactaataaaatgctacaacaaattattgctta

SEQ ID NO: 157369 - DNA, 6162 bp, Homo sapiens
  Payload ID: 10847
  Gene Symbol: NWD1
  Gene Name: NACHT and WD repeat domain containing 1
  Uniprot ID: Q149M9
  ENST ID: ENST00000438489
  CDS Start-End: 4-234
tggatgcagagagggaagccctgcagagcactgcctaccctgaagtgccagaccttctgccagaggcacggcttgatgtttgaggtcgttgatctgaggtggggtattcggaacattgaagccactgaccacttgaccacagaactctgcttggaggaggttgaccggtgttggaaaacatccatagggccagcttttgttgagaaatgtgctgatccctgtcctggacagtaaagagggaaaaagtaaagaaaagtaccatggccaggccctcatcggtgatcagtacggcccctgtctgattccctcgcggatcgatgagaaggagtgggaggtattgagggaccatctgactgccaggccaagtgacctggagctggtggcacgatacttccagagggacgagaatgcgtttcctcccacctacgtcctgcaggcaccaggtactggggaggcctgtgaaccagaggaggccaccttaacttctgtcctacgctctggagcccaggaggcccggaggctggggctcatcacccaggagcagtggcagcactaccaccggtcagtcattgagtgggagatagagcggagcctgctgagctcagaggaccgggaacagggagccaccgtcttccttagagagatccaagacctccacaaacacatccttgaagactgcgcccttaggatggtggaccggctcgcggatggctgcctggacgctgatgcccagaaccttctcagcagcctcaaaagtcacatcactgacatgcacccaggggtcctcaagacccaccgcctgccgtggagccgcgacttggtgaaccccaagaacaagactcacgcctgctacctgaaggagctgggtgagcagtttgtggtgagggccaatcaccaggtcctcacacgcctccgtgagctggatacggccggacaggagttggcgtggctctaccaagagatccgccaccacctttggcagagctcggaggtcattcagaccttctgcggacgccaggaactcctggcccggcttgggcagcagctcaggcacgatgacagcaagcagcacacccccctggtactctttgggcccccaggcattggaaagacagccctgatgtgcaagctggctgagcagatgccaaggctgctggggcacaagacagtgaccgtcctgcggctgctggggacgtcacaaatgagctcagatgcccgtggcctgctgaagagcatctgcttccaggtgtgcctggcctatgggctgcccttgccccctgcccaggttctggacgcccacaccagggtggtccagtttttccataccctcctccacactgtctcttgcagaaacttcgagtctctcgtgctcctgctggatgctatggatgacctggactctgtccgccatgctcggagggttccctggctgcctctcaactgccccccgagggtgcacctcatcctctcagcttgctcgggggcactgggggttttggacaccttgcagcgggtgctcctggacccggaggcctactgggaggtgaagcccctttccggaaaccaaggccagcagatgatccaactcctgctggcagctgcaaggaggacgctgagcccggtgcacacagatttgctctgggccagcctcccagagtgtgggaacccagggcggctgaggctggcgtttgaggaagcccggaaatgggcctctttcaccgtgcctgtcccgctggccaccaccgcagaggaagccacgcaccaactctgcacccgcctggagcagacacacgggcagctcctcgtggcccacgtgctgggctacattgtgtcttcccgacacggtctctcggaggcggagctgaaggatgttttgtccctggacgacgaggtcctgcaggatgtgtaccgagattggaccccgcccagcaaggagctgctgcgcttcccgcccctgctgtgggtgcggcttcgtcgggatctgggatactacttggcccggcggcccgtggatggcttcaccctcctggccattgcccacagacagctggtcgaggtggtccgtgagcgctacctgtcaggatccgagagagccaagaggcatggcgtcctggccgacttcttctcagggacctggagccagggtaccaagaagctcatcactctgccacttgtggggaaaccactgaacttggaccgaaaggtggccccgcagcctctgtggttctcacatacggttgcaaacctgcggaagctgaaggagttgccctatcacctgcttcactcgggccgcctggaggagctgaaacaggaggttctgggcagcatgagctggatttcctgccggggcatctctgggggcattgaagacctgctggatgactttgacctgtgtgcccctcacctggactcccctgaggttggcctggtccgtgaagccctccagctctgccgccctgctgtggagctccgaggcatggagaggagcctcctgtacacagaactgctggccagactccatttcttcgccacctcacatccagcactggtgggacagctatgccaacaggcccagagctggttccagttgtgcgcacaccctgtgctggtgcccctcggaggattcctccagcccccgggaggacccctccgggcaactctcagcggctgtcacaaaggcatcaccgccatggcatggggtgtggaggagaagctgctggtgattggcacccaggatggcatcatggctgtgtgggacatggaagagcagcatgtgatccacatgctaactggacacacaggagaggtgaggtgtgtgaaaatatttgccaaagggaccctcgccaactctgcttcaaaggattacacgctgcacttgtggaacttactctctggccaggagaaatttaccatttgggatggaggctcaaaaaatcccgctgaacctcagatctggaaccttcatgtggatgaggcacacaaagttgtgtattcagcatctggctcaaagatcaatgcttggaatctggaaactgcagagccggtattccatatcctgggagatgcctctgatccttggatgtgcatggccgtgctggcctcccaggccacactgctgacagtgtccagggatggtgtggtcagtctgtggagctcagctacgggaaaacttcaggggaagcaacatatgtccagcatcaaagaagaaacacctacctgtgccgtctcagtccagaagcaaggaaagcttgttaccgggtttagcaatggctccatctctttggtttcctccaaaggggacagattgctggagaagcttccagatgctgtgaggttcctggtggtctctgaagatgagtccctcctcgccgcaggctttggaagatcggtgcggatattcttggcggactcgaggggctttcgccgattcatggccatggatctggaacatgaagacatggtggagacggctgtttttggtactgagaacaacctgatcatcacggggtcccttgatgcgctcattcaggtgtggagtctgtcagaacaggggacccttctggacatcctggaaggcgtcggggcccccgtgagcctgctggcccgcggcggggctttggtggcatctgcttccccacagtcctcatctttcaaggtctgggatctcagcgatgctcataggtcccgggtgcctgcaccatttctggaccgcaccggcctcaccgcagtgtcccacaatggaagctacgtctacttccccaaaattggggacaaaaacaaagtcactatttgggacttggcagaaggcgaggaacaagattccctggacacctccagtgagatcaggtgtctggaggttgctgagcagcgcaagctcctatttacgggcctcgtgtcgggggtcgtccttgtgttccccctgaattccaggcaggacgtgatatgcattccccctcccgaggcccggaaagcaatcaactgcatgtccctgagcaagtgcgaggaccgcctggccatcgcctatgacaacatcgtcctggtgctggacatcacctccggggacccctgcccggtcatcgatgggccaagatacaccttttacactcagctgcccgagaccctctccagcgtggccattctgacggactaccgcgtggtctacagcatgaccaatggggacctctttctttacgagtgtgcaacttccaaagcgtttcccttggagacccacaggagccgagttgcctgtgtggaggtcagccacaaggagcagctggtggtcagcgggtctgaggatgccctgctgtgtctctgggacctgcaggcacgcaagtggaaattcgagatgagctacacgagttcttactgcagaggggtccaatgtgcttgcttctccaaggatgacaagtatgtgtacgtgggcttaaaggatcgctctatacttgtttggagtgtgctggatggcaccctgctgacagtccagtttgtccatgctgtggtaaacagaatcatcccaaccaccagtggcttcattgcccccaccaggcatggttatctgatccgagagaatttccagtgcctttcagcaaaagcctcaccgcaggaccctcttaagaacttcaagaaggcaatgtggatggtcaaatccaggcagagagaggagctagttgcagctgcaggagctccccaggacttggagtcagaaagtgcccagggaaatgaaaccaaatcaaacaaatgctcacaagtgtgcctgatagtgtaaaaaaataaaaataaaaaaaccctgtgggggtatggggctccagtgagttagccccatttaatctagttaaagcaaaaagaatacgtttgctggtgtatatctggacccatggcttcagattatggcttcagaccttgtctcttctcatctttccattattctttcctctttttcattttcattctcagacttgccacccccaggttagcaacatggtggccaatatgctgctgtctccaatttcaatagaaaagagagcttctctttcccaacagtcctagcctcaactctactggtcccaattggcccatacgcctagccctaaaccaattattatatctgggagaatgcagagctctaatcggctagactgatccaatgtccaccactgggactgagaatagaagagattactcctgagatgcaaactggagttctggtaccagatgaagggggaacggatgaatgtgagatacagcaaatcactgatgtggaccacagaacctcacagtttataaagctgtaggtgctgtcatctgatcctcatcacaactcatactttagggagggcaggagtttctgtatctattttacagatgaggaaactgagccttgcggaagtagttataatttgattcaggtcacaagtccaaggtgcaagagctctgagagtgagccttctgtcccattcctgttagacctcactccaatttcagtctgcagagcacaaccatctcttccacaggcaccacactcaaatgctcacaggagctagtgactaatctagacacttccatgcacctgggtgagcagcagggagagacagagactggacatgtggaaggcagagattgtgtctagggtgggtatgagcagcctgactgtagcccagaatcaccatggccaaacaagcccactgctgtcagtgcttccagttgtaataagcaaagccagaaatccagacttttatgcaaaaatgttctgacttttaaagttggcgattggttgaatttatatctatagtgcatttggcatgtgcgtctttggttaatgagctgacttcaggactcacgctggcagtaaaacaatcaacatgttatagttcatccctctctattccttggctcccaaacttttgggataaagatgtgggtttttaatcttaaaaactggaggctcttggaagtagaaagagctgctgatctctccctgctttgcttttgaactgtctgccttgtgcaagttcaacagtcaaactgttttcattccacttaagtggatctttcttctttgcccacagccttctaaaagcccttctcagtcttctcaggcttttactttaatgctaggatagtctaaatcttcaaggtggctatcccttctcccctccgtggaat

SEQ ID NO: 157370 - DNA, 8393 bp, Homo sapiens
  Payload ID: 10847
  Gene Symbol: NWD1
  Gene Name: NACHT and WD repeat domain containing 1
  ENST ID: ENST00000518676
  CDS Start-End: 646-1185
gaggagtctaaattggtcgttcaactaccagcaaaggctaaagagaggctggagcccccaggacagccagaacgctgacactgcaaagggcctctgtccttactggggaagcccagtcctgctcagctgtcttcttcagcaacaaacagaagtccagaaagagaaacagttgtggaggaagctgttgtgatgataatttactgagcacctactatgtgccaggcacgccagccttaccagacaagatccttgggctcatggaattcactttctcgtgggacagacaaacaataacatgtagaaacatatcagctgttgcaggcagtaaccaagggagcgtggccaggcgctgaagtgaattcgggtccaaggagcctgctgggacccaggaaaacgagagaaggaacagaaattgtggtggaggcaaattcaagatcagaagattggggaggaggtgctaagagaggtctggagagatgctgggacccagaactggggcctcagtgagatcagcaggctgcagctaaactgtggtatccagaccatgcggccgatgccctgggagggagaccacttgcttaagtcctccaggagggcgatggaggagccggcattccaaccaggctcacggatgccaagatatggatgcagagagggaagccctgcagagcactgcctaccctgaagtgccagaccttctgccagaggcacggcttgatgtttgaggtcgttgatctgaggtggggtattcggaacattgaagccactgaccacttgaccacagaactctgcttggaggaggttgaccggtgttggaaaacatccatagggccagcttttgttgccctcatcggtgatcagtacggcccctgtctgattccctcgcggatcgatgagaaggagtgggaggtattgagggaccatctgactgccaggccaagtgacctggagctggtggcacgatacttccagagggacgagaatgcgtttcctcccacctacgtcctgcaggcaccaggtactggggaggcctgtgaaccagaggaggccaccttaacttctgtcctacgctctggagcccaggaggcccggaggctggggctcatcacccaggagcagtggcagcactaccaccggtcaggtgaggccgcagggactcccctctggagacccacaagaaactgaccacgtgttcagaatatccatcccctgttggcaaaaatgcaacagtctgcatttcttgcaaatgccaaaccagtcaacctctggtccctcggctctgagaaaggctgttttactgatccaagatagttcagccatgttcctgatcaatcttggtctcaggatcttcctctcctcgctggctctttcttcttgtctcccagggaggttcctggcacaggggccgtattagtctgttctcatgccactaataaaggcatacttgaggctgggtaatttacaaaggaaagaggtttaatggactcacaattccacatggctggggaggcctcacaatcatggctgaaggcaaaggagaagcaaagaggcacatcttacatggtggcagtcattgagtgggagatagagcggagcctgctgagctcagaggaccgggaacagggagccaccgtcttccttagagagatccaagacctccacaaacacatccttgaagactgcgcccttaggatggtggaccggctcgcggatggctgcctggacgctgatgcccagaaccttctcagcagcctcaaaagtcacatcactgacatgcacccaggggtcctcaagacccaccgcctgccgtggagccgcgacttggtgaaccccaagaacaagactcacgcctgctacctgaaggagctgggtgagcagtttgtggtgagggccaatcaccaggtcctcacacgcctccgtgagctggatacggccggacaggagttggcgtggctctaccaagagatccgccaccacctttggcagagctcggaggtcattcagaccttctgcggacgccaggaactcctggcccggcttgggcagcagctcaggcacgatgacagcaagcagcacacccccctggtactctttgggcccccaggcattggaaagacagccctgatgtgcaagctggctgagcagatgccaaggctgctggggcacaagacagtgaccgtcctgcggctgctggggacgtcacaaatgagctcagatgcccgtggcctgctgaagagcatctgcttccaggtgtgcctggcctatgggctgcccttgccccctgcccaggttctggacgcccacaccagggtggtccagtttttccataccctcctccacactgtctcttgcagaaacttcgagtctctcgtgctcctgctggatgctatggatgacctggactctgtccgccatgctcggagggttccctggctgcctctcaactgccccccgagggtgcacctcatcctctcagcttgctcgggggcactgggggttttggacaccttgcagcgggtgctcctggacccggaggcctactgggaggtgaagcccctttccggaaaccaaggccagcagatgatccaactcctgctggcagctgcaaggaggacgctgagcccggtgcacacagatttgctctgggccagcctcccagagtgtgggaacccagggcggctgaggctggcgtttgaggaagcccggaaatgggcctctttcaccgtgcctgtcccgctggccaccaccgcagaggaagccacgcaccaactctgcacccgcctggagcagacacacgggcagctcctcgtggcccacgtgctgggctacattgtgtcttcccgacacggtctctcggaggcggagctgaaggatgttttgtccctggacgacgaggtcctgcaggatgtgtaccgagattggaccccgcccagcaaggagctgctgcgcttcccgcccctgctgtgggtgcggcttcgtcgggatctgggatactacttggcccggcggcccgtggatggcttcaccctcctggccattgcccacagacagctggtcgaggtggtccgtgagcgctacctgtcaggatccgagagagccaagaggcatggcgtcctggccgacttcttctcagggacctggagccagggtaccaagaagctcatcactctgccacttgtggggaaaccactgaacttggaccgaaaggtggccccgcagcctctgtggttctcacatacggttgcaaacctgcggaagctgaaggagttgccctatcacctgcttcactcgggccgcctggaggagctgaaacaggaggttctgggcagcatgagctggatttcctgccggggcatctctgggggcattgaagacctgctggatgactttgacctgtgtgcccctcacctggactcccctgaggttggcctggtccgtgaagccctccagctctgccgccctgctgtggagctccgaggcatggagaggagcctcctgtacacagaactgctggccagactccatttcttcgccacctcacatccagcactggtgggacagctatgccaacaggcccagagctggttccagttgtgcgcacaccctgtgctggtgcccctcggaggattcctccagcccccgggaggacccctccgggcaactctcagcggctgtcacaaaggcatcaccgccatggcatggggtgtggaggagaagctgctggtgattggcacccaggatggcatcatggctgtgtgggacatggaagagcagcatgtgatccacatgctaactggacacacaggagaggtgaggtgtgtgaaaatatttgccaaagggaccctcgccaactctgcttcaaaggattacacgctgcacttgtggaacttactctctggccaggagaaatttaccatttgggatggaggctcaaaaaatcccgctgaacctcagatctggaaccttcatgtggatgaggcacacaaagttgtgtattcagcatctggctcaaagatcaatgcttggaatctggaaactgcagagccggtattccatatcctgggagatgcctctgatccttggatgtgcatggccgtgctggcctcccaggccacactgctgacagtgtccagggatggtgtggtcagtctgtggagctcagctacgggaaaacttcaggggaagcaacatatgtccagcatcaaagaagaaacacctacctgtgccgtctcagtccagaagcaaggaaagcttgttaccgggtttagcaatggctccatctctttggtttcctccaaaggggacagattgctggagaagcttccagatgctgtgaggttcctggtggtctctgaagatgagtccctcctcgccgcaggctttggaagatcggtgcggatattcttggcggactcgaggggctttcgccgattcatggccatggatctggaacatgaagacatggtggagacggctgtttttggtactgagaacaacctgatcatcacggggtcccttgatgcgctcattcaggtgtggagtctgtcagaacaggggacccttctggacatcctggaaggcgtcggggcccccgtgagcctgctggcccgcggcggggctttggtggcatctgcttccccacagtcctcatctttcaaggtctgggatctcagcgatgctcataggtcccgggtgcctgcaccatttctggaccgcaccggcctcaccgcagtgtcccacaatggaagctacgtctacttccccaaaattggggacaaaaacaaagtcactatttgggacttggcagaaggcgaggaacaagattccctggacacctccagtgagatcaggtgtctggaggttgctgagcagcgcaagctcctatttacgggcctcgtgtcgggggtcgtccttgtgttccccctgaattccaggcaggacgtgatatgcattccccctcccgaggcccggaaagcaatcaactgcatgtccctgagcaagtgcgaggaccgcctggccatcgcctatgacaacatcgtcctggtgctggacatcacctccggggacccctgcccggtcatcgatgggccaagatacaccttttacactcagctgcccgagaccctctccagcgtggccattctgacggactaccgcgtggtctacagcatgaccaatggggacctctttctttacgagtgtgcaacttccaaagcgtttcccttggagacccacaggagccgagttgcctgtgtggaggtcagccacaaggagcagctggtggtcagcgggtctgaggatgccctgctgtgtctctgggacctgcaggcacgcaagtggaaattcgagatgagctacacgagttcttactgcagaggggtccaatgtgcttgcttctccaaggatgacaagtatgtgtacgtgggcttaaaggatcgctctatacttgtttggagtgtgctggatggcaccctgctgacagtccagtttgtccatgctgtggtaaacagaatcatcccaaccaccagtggcttcattgcccccaccaggcatggttatctgatccgagagaatttccagtgcctttcagcaaaagcctcaccgcaggaccctcttaagaacttcaagaaggcaatgtggatggtcaaatccaggcagagagaggagctagttgcagctgcaggagctccccaggacttggagtcagaaagtgcccagggaaatgaaaccaaatcaaacaaatgctcacaagtgtgcctgatagtgtaaaaaaataaaaataaaaaaaccctgtgggggtatggggctccagtgagttagccccatttaatctagttaaagcaaaaagaatacgtttgctggtgtatatctggacccatggcttcagattatggcttcagaccttgtctcttctcatctttccattattctttcctctttttcattttcattctcagacttgccacccccaggttagcaacatggtggccaatatgctgctgtctccaatttcaatagaaaagagagcttctctttcccaacagtcctagcctcaactctactggtcccaattggcccatacgcctagccctaaaccaattattatatctgggagaatgcagagctctaatcggctagactgatccaatgtccaccactgggactgagaatagaagagattactcctgagatgcaaactggagttctggtaccagatgaagggggaacggatgaatgtgagatacagcaaatcactgatgtggaccacagaacctcacagtttataaagctgtaggtgctgtcatctgatcctcatcacaactcatactttagggagggcaggagtttctgtatctattttacagatgaggaaactgagccttgcggaagtagttataatttgattcaggtcacaagtccaaggtgcaagagctctgagagtgagccttctgtcccattcctgttagacctcactccaatttcagtctgcagagcacaaccatctcttccacaggcaccacactcaaatgctcacaggagctagtgactaatctagacacttccatgcacctgggtgagcagcagggagagacagagactggacatgtggaaggcagagattgtgtctagggtgggtatgagcagcctgactgtagcccagaatcaccatggccaaacaagcccactgctgtcagtgcttccagttgtaataagcaaagccagaaatccagacttttatgcaaaaatgttctgacttttaaagttggcgattggttgaatttatatctatagtgcatttggcatgtgcgtctttggttaatgagctgacttcaggactcacgctggcagtaaaacaatcaacatgttatagttcatccctctctattccttggctcccaaacttttgggataaagatgtgggtttttaatcttaaaaactggaggctcttggaagtagaaagagctgctgatctctccctgctttgcttttgaactgtctgccttgtgcaagttcaacagtcaaactgttttcattccacttaagtggatctttcttctttgcccacagccttctaaaagcccttctcagtcttctcaggcttttactttaatgctaggatagtctaaatcttcaaggtggctatcccttctcccctccgtggaattcctgatagagtctcaataaaagcaaccttagaaacagaggcttttgagctgaacaagaccctactgctgtcttattcatccattttccaaaccagttttccaaggcaggttttggtagttctgcaaatgttagtgtcaaatttcatttaaaaatattttaaactgtaattttaagatgtatgcttggatgtattgggcagcagcttctaaggtgttgaagattactaaggttggtgcaaaaagtaactgtggttttcgccattaaaaatattaaaaataatggcaaaaactggctgggcacagtggctcacacctgtggtcccagctctttggaaggccgaggcaggtggatcacctgaggtcaggagtttgagaccagcctggacaacatggtgaaacccttctctactaaaaatacaaaaatcagccaggcatggtggtgagtgcctgtaatctcagttactcaggaggctgagtcaggagaatcacttgaacccgggaggcggaggttgcagtgagctgagattgtgccactgcactccagcctgggtgacagagcaagactccatctcataataataataataatggcaaaagcctcggtggctcacgcctgtaatcccagcactttgggaggctgaggcgggtggatcacttgaggccaggtgttcaagagcagcctggtcaacatggtgaaactctgtctctactcaaaaatacaaaaattagcctggtgtggtgacgtacacctgtaattccagctacttgggaggctgaggcaggagaatggcttgaacccgggaggcggaggttgcagtgagccgagatcgcaccactgcactccagcatgagtgacagagactctgtctccaaaaaaaaaaaaaaaaaaaagtaatggcaaaaaccacaattaattttgcatcaacctaataatttaggattcttctgccattttcatttaactgatttaactgaagagcccaattaaattgtgaagggagccctgaaaaaattagctactctttgccactgcttctctgtgaatcaagggcttacccaatgcagaaataaagtagatgttgagaccaattaagatttcacctacaaattctgattttaaatgcctgtgtccatctccacagcctcagtgagaattgattgttttgtagataaatcctaatttaaacattggaaatgcctttttactaataaaatgctacaacaaa

SEQ ID NO: 157371 - DNA, 7641 bp, Homo sapiens
  Payload ID: 10847
  Gene Symbol: NWD1
  Gene Name: NACHT and WD repeat domain containing 1
  Uniprot ID: Q149M9
  ENST ID: ENST00000524140
  CDS Start-End: 419-4717
agtctaaattggtcgttcaactaccagcaaaggctaaagagaggctggagcccccaggacagccagaacgctgacactgcaaagggcctctgtccttactggggaagcccagtcctgctcagctgtcttcttcagcaacaaacagaagtccagaaagagaaacagttgtggaggaagctgttgtgatgataatttactgagcacctactatgtgccaggcacgccagccttaccagacaagatccttgggctcatggaattcactttctcgtgggacagacaaacaataacatgtagaaacatatcagctgttgaccatgcggccgatgccctgggagggagaccacttgcttaagtcctccaggagggcgatggaggagccggcattccaaccaggctcacggatgccaagatatggatgcagagagggaagccctgcagagcactgcctaccctgaagtgccagaccttctgccagaggcacggcttgatgtttgaggtcgttgatctgaggtggggtattcggaacattgaagccactgaccacttgaccacagaactctgcttggaggaggttgaccggtgttggaaaacatccatagggccagcttttgttgccctcatcggtgatcagtacggcccctgtctgattccctcgcggatcgatgagaaggagtgggaggtattgagggaccatctgactgccaggccaagtgacctggagctggtggcacgatacttccagagggacgagaatgcgtttcctcccacctacgtcctgcaggcaccaggtactggggaggcctgtgaaccagaggaggccaccttaacttctgtcctacgctctggagcccaggaggcccggaggctggggctcatcacccaggagcagtggcagcactaccaccggtcagtcattgagtgggagatagagcggagcctgctgagctcagaggaccgggaacagggagccaccgtcttccttagagagatccaagacctccacaaacacatccttgaagactgcgcccttaggatggtggaccggctcgcggatggctgcctggacgctgatgcccagaaccttctcagcagcctcaaaagtcacatcactgacatgcacccaggggtcctcaagacccaccgcctgccgtggagccgcgacttggtgaaccccaagaacaagactcacgcctgctacctgaaggagctgggtgagcagtttgtggtgagggccaatcaccaggtcctcacacgcctccgtgagctggatacggccggacaggagttggcgtggctctaccaagagatccgccaccacctttggcagagctcggaggtcattcagaccttctgcggacgccaggaactcctggcccggcttgggcagcagctcaggcacgatgacagcaagcagcacacccccctggtactctttgggcccccaggcattggaaagacagccctgatgtgcaagctggctgagcagatgccaaggctgctggggcacaagacagtgaccgtcctgcggctgctggggacgtcacaaatgagctcagatgcccgtggcctgctgaagagcatctgcttccaggtgtgcctggcctatgggctgcccttgccccctgcccaggttctggacgcccacaccagggtggtccagtttttccataccctcctccacactgtctcttgcagaaacttcgagtctctcgtgctcctgctggatgctatggatgacctggactctgtccgccatgctcggagggttccctggctgcctctcaactgccccccgagggtgcacctcatcctctcagcttgctcgggggcactgggggttttggacaccttgcagcgggtgctcctggacccggaggcctactgggaggtgaagcccctttccggaaaccaaggccagcagatgatccaactcctgctggcagctgcaaggaggacgctgagcccggtgcacacagatttgctctgggccagcctcccagagtgtgggaacccagggcggctgaggctggcgtttgaggaagcccggaaatgggcctctttcaccgtgcctgtcccgctggccaccaccgcagaggaagccacgcaccaactctgcacccgcctggagcagacacacgggcagctcctcgtggcccacgtgctgggctacattgtgtcttcccgacacggtctctcggaggcggagctgaaggatgttttgtccctggacgacgaggtcctgcaggatgtgtaccgagattggaccccgcccagcaaggagctgctgcgcttcccgcccctgctgtgggtgcggcttcgtcgggatctgggatactacttggcccggcggcccgtggatggcttcaccctcctggccattgcccacagacagctggtcgaggtggtccgtgagcgctacctgtcaggatccgagagagccaagaggcatggcgtcctggccgacttcttctcagggacctggagccagggtaccaagaagctcatcactctgccacttgtggggaaaccactgaacttggaccgaaaggtggccccgcagcctctgtggttctcacatacggttgcaaacctgcggaagctgaaggagttgccctatcacctgcttcactcgggccgcctggaggagctgaaacaggaggttctgggcagcatgagctggatttcctgccggggcatctctgggggcattgaagacctgctggatgactttgacctgtgtgcccctcacctggactcccctgaggttggcctggtccgtgaagccctccagctctgccgccctgctgtggagctccgaggcatggagaggagcctcctgtacacagaactgctggccagactccatttcttcgccacctcacatccagcactggtgggacagctatgccaacaggcccagagctggttccagttgtgcgcacaccctgtgctggtgcccctcggaggattcctccagcccccgggaggacccctccgggcaactctcagcggctgtcacaaaggcatcaccgccatggcatggggtgtggaggagaagctgctggtgattggcacccaggatggcatcatggctgtgtgggacatggaagagcagcatgtgatccacatgctaactggacacacaggagaggtgaggtgtgtgaaaatatttgccaaagggaccctcgccaactctgcttcaaaggattacacgctgcacttgtggaacttactctctggccaggagaaatttaccatttgggatggaggctcaaaaaatcccgctgaacctcagatctggaaccttcatgtggatgaggcacacaaagttgtgtattcagcatctggctcaaagatcaatgcttggaatctggaaactgcagagccggtattccatatcctgggagatgcctctgatccttggatgtgcatggccgtgctggcctcccaggccacactgctgacagtgtccagggatggtgtggtcagtctgtggagctcagctacgggaaaacttcaggggaagcaacatatgtccagcatcaaagaagaaacacctacctgtgccgtctcagtccagaagcaaggaaagcttgttaccgggtttagcaatggctccatctctttggtttcctccaaaggggacagattgctggagaagcttccagatgctgtgaggttcctggtggtctctgaagatgagtccctcctcgccgcaggctttggaagatcggtgcggatattcttggcggactcgaggggctttcgccgattcatggccatggatctggaacatgaagacatggtggagacggctgtttttggtactgagaacaacctgatcatcacggggtcccttgatgcgctcattcaggtgtggagtctgtcagaacaggggacccttctggacatcctggaaggcgtcggggcccccgtgagcctgctggcccgcggcggggctttggtggcatctgcttccccacagtcctcatctttcaaggtctgggatctcagcgatgctcataggtcccgggtgcctgcaccatttctggaccgcaccggcctcaccgcagtgtcccacaatggaagctacgtctacttccccaaaattggggacaaaaacaaagtcactatttgggacttggcagaaggcgaggaacaagattccctggacacctccagtgagatcaggtgtctggaggttgctgagcagcgcaagctcctatttacgggcctcgtgtcgggggtcgtccttgtgttccccctgaattccaggcaggacgtgatatgcattccccctcccgaggcccggaaagcaatcaactgcatgtccctgagcaagtgcgaggaccgcctggccatcgcctatgacaacatcgtcctggtgctggacatcacctccggggacccctgcccggtcatcgatgggccaagatacaccttttacactcagctgcccgagaccctctccagcgtggccattctgacggactaccgcgtggtctacagcatgaccaatggggacctctttctttacgagtgtgcaacttccaaagcgtttcccttggagacccacaggagccgagttgcctgtgtggaggtcagccacaaggagcagctggtggtcagcgggtctgaggatgccctgctgtgtctctgggacctgcaggcacgcaagtggaaattcgagatgagctacacggcaccctgctgacagtccagtttgtccatgctgtggtaaacagaatcatcccaaccaccagtggcttcattgcccccaccaggcatggttatctgatccgagagaatttccagtgcctttcagcaaaagcctcaccgcaggaccctcttaagaacttcaagaaggcaatgtggatggtcaaatccaggcagagagaggagctagttgcagctgcaggagctccccaggacttggagtcagaaagtgcccagggaaatgaaaccaaatcaaacaaatgctcacaagtgtgcctgatagtgtaaaaaaataaaaataaaaaaaccctgtgggggtatggggctccagtgagttagccccatttaatctagttaaagcaaaaagaatacgtttgctggtgtatatctggacccatggcttcagattatggcttcagaccttgtctcttctcatctttccattattctttcctctttttcattttcattctcagacttgccacccccaggttagcaacatggtggccaatatgctgctgtctccaatttcaatagaaaagagagcttctctttcccaacagtcctagcctcaactctactggtcccaattggcccatacgcctagccctaaaccaattattatatctgggagaatgcagagctctaatcggctagactgatccaatgtccaccactgggactgagaatagaagagattactcctgagatgcaaactggagttctggtaccagatgaagggggaacggatgaatgtgagatacagcaaatcactgatgtggaccacagaacctcacagtttataaagctgtaggtgctgtcatctgatcctcatcacaactcatactttagggagggcaggagtttctgtatctattttacagatgaggaaactgagccttgcggaagtagttataatttgattcaggtcacaagtccaaggtgcaagagctctgagagtgagccttctgtcccattcctgttagacctcactccaatttcagtctgcagagcacaaccatctcttccacaggcaccacactcaaatgctcacaggagctagtgactaatctagacacttccatgcacctgggtgagcagcagggagagacagagactggacatgtggaaggcagagattgtgtctagggtgggtatgagcagcctgactgtagcccagaatcaccatggccaaacaagcccactgctgtcagtgcttccagttgtaataagcaaagccagaaatccagacttttatgcaaaaatgttctgacttttaaagttggcgattggttgaatttatatctatagtgcatttggcatgtgcgtctttggttaatgagctgacttcaggactcacgctggcagtaaaacaatcaacatgttatagttcatccctctctattccttggctcccaaacttttgggataaagatgtgggtttttaatcttaaaaactggaggctcttggaagtagaaagagctgctgatctctccctgctttgcttttgaactgtctgccttgtgcaagttcaacagtcaaactgttttcattccacttaagtggatctttcttctttgcccacagccttctaaaagcccttctcagtcttctcaggcttttactttaatgctaggatagtctaaatcttcaaggtggctatcccttctcccctccgtggaattcctgatagagtctcaataaaagcaaccttagaaacagaggcttttgagctgaacaagaccctactgctgtcttattcatccattttccaaaccagttttccaaggcaggttttggtagttctgcaaatgttagtgtcaaatttcatttaaaaatattttaaactgtaattttaagatgtatgcttggatgtattgggcagcagcttctaaggtgttgaagattactaaggttggtgcaaaaagtaactgtggttttcgccattaaaaatattaaaaataatggcaaaaactggctgggcacagtggctcacacctgtggtcccagctctttggaaggccgaggcaggtggatcacctgaggtcaggagtttgagaccagcctggacaacatggtgaaacccttctctactaaaaatacaaaaatcagccaggcatggtggtgagtgcctgtaatctcagttactcaggaggctgagtcaggagaatcacttgaacccgggaggcggaggttgcagtgagctgagattgtgccactgcactccagcctgggtgacagagcaagactccatctcataataataataataatggcaaaagcctcggtggctcacgcctgtaatcccagcactttgggaggctgaggcgggtggatcacttgaggccaggtgttcaagagcagcctggtcaacatggtgaaactctgtctctactcaaaaatacaaaaattagcctggtgtggtgacgtacacctgtaattccagctacttgggaggctgaggcaggagaatggcttgaacccgggaggcggaggttgcagtgagccgagatcgcaccactgcactccagcatgagtgacagagactctgtctccaaaaaaaaaaaaaaaaaaaagtaatggcaaaaaccacaattaattttgcatcaacctaataatttaggattcttctgccattttcatttaactgatttaactgaagagcccaattaaattgtgaagggagccctgaaaaaattagctactctttgccactgcttctctgtgaatcaagggcttacccaatgcagaaataaagtagatgttgagaccaattaagatttcacctacaaattctgattttaaatgcctgtgtccatctccacagcctcagtgagaattgattgttttgtagataaatcctaatttaaacattggaaatgcctttttactaataaaatgctacaacaaattattgctta

SEQ ID NO: 157372 - DNA, 6964 bp, Homo sapiens
  Payload ID: 10847
  Gene Symbol: NWD1
  Gene Name: NACHT and WD repeat domain containing 1
  Uniprot ID: Q149M9
  ENST ID: ENST00000552788
  CDS Start-End: 1-4695
atgcagagagggaagccctgcagagcactgcctaccctgaagtgccagaccttctgccagaggcacggcttgatgtttgaggtcgttgatctgaggtggggtattcggaacattgaagccactgaccacttgaccacagaactctgcttggaggaggttgaccggtgttggaaaacatccatagggccagcttttgttgccctcatcggtgatcagtacggcccctgtctgattccctcgcggatcgatgagaaggagtgggaggtattgagggaccatctgactgccaggccaagtgacctggagctggtggcacgatacttccagagggacgagaatgcgtttcctcccacctacgtcctgcaggcaccaggtactggggaggcctgtgaaccagaggaggccaccttaacttctgtcctacgctctggagcccaggaggcccggaggctggggctcatcacccaggagcagtggcagcactaccaccggtcagtcattgagtgggagatagagcggagcctgctgagctcagaggaccgggaacagggagccaccgtcttccttagagagatccaagacctccacaaacacatccttgaagactgcgcccttaggatggtggaccggctcgcggatggctgcctggacgctgatgcccagaaccttctcagcagcctcaaaagtcacatcactgacatgcacccaggggtcctcaagacccaccgcctgccgtggagccgcgacttggtgaaccccaagaacaagactcacgcctgctacctgaaggagctgggtgagcagtttgtggtgagggccaatcaccaggtcctcacacgcctccgtgagctggatacggccggacaggagttggcgtggctctaccaagagatccgccaccacctttggcagagctcggaggtcattcagaccttctgcggacgccaggaactcctggcccggcttgggcagcagctcaggcacgatgacagcaagcagcacacccccctggtactctttgggcccccaggcattggaaagacagccctgatgtgcaagctggctgagcagatgccaaggctgctggggcacaagacagtgaccgtcctgcggctgctggggacgtcacaaatgagctcagatgcccgtggcctgctgaagagcatctgcttccaggtgtgcctggcctatgggctgcccttgccccctgcccaggttctggacgcccacaccagggtggtccagtttttccataccctcctccacactgtctcttgcagaaacttcgagtctctcgtgctcctgctggatgctatggatgacctggactctgtccgccatgctcggagggttccctggctgcctctcaactgccccccgagggtgcacctcatcctctcagcttgctcgggggcactgggggttttggacaccttgcagcgggtgctcctggacccggaggcctactgggaggtgaagcccctttccggaaaccaaggccagcagatgatccaactcctgctggcagctgcaaggaggacgctgagcccggtgcacacagatttgctctgggccagcctcccagagtgtgggaacccagggcggctgaggctggcgtttgaggaagcccggaaatgggcctctttcaccgtgcctgtcccgctggccaccaccgcagaggaagccacgcaccaactctgcacccgcctggagcagacacacgggcagctcctcgtggcccacgtgctgggctacattgtgtcttcccgacacggtctctcggaggcggagctgaaggatgttttgtccctggacgacgaggtcctgcaggatgtgtaccgagattggaccccgcccagcaaggagctgctgcgcttcccgcccctgctgtgggtgcggcttcgtcgggatctgggatactacttggcccggcggcccgtggatggcttcaccctcctggccattgcccacagacagctggtcgaggtggtccgtgagcgctacctgtcaggatccgagagagccaagaggcatggcgtcctggccgacttcttctcagggacctggagccagggtaccaagaagctcatcactctgccacttgtggggaaaccactgaacttggaccgaaaggtggccccgcagcctctgtggttctcacatacggttgcaaacctgcggaagctgaaggagttgccctatcacctgcttcactcgggccgcctggaggagctgaaacaggaggttctgggcagcatgagctggatttcctgccggggcatctctgggggcattgaagacctgctggatgactttgacctgtgtgcccctcacctggactcccctgaggttggcctggtccgtgaagccctccagctctgccgccctgctgtggagctccgaggcatggagaggagcctcctgtacacagaactgctggccagactccatttcttcgccacctcacatccagcactggtgggacagctatgccaacaggcccagagctggttccagttgtgcgcacaccctgtgctggtgcccctcggaggattcctccagcccccgggaggacccctccgggcaactctcagcggctgtcacaaaggcatcaccgccatggcatggggtgtggaggagaagctgctggtgattggcacccaggatggcatcatggctgtgtgggacatggaagagcagcatgtgatccacatgctaactggacacacaggagaggtgaggtgtgtgaaaatatttgccaaagggaccctcgccaactctgcttcaaaggattacacgctgcacttgtggaacttactctctggccaggagaaatttaccatttgggatggaggctcaaaaaatcccgctgaacctcagatctggaaccttcatgtggatgaggcacacaaagttgtgtattcagcatctggctcaaagatcaatgcttggaatctggaaactgcagagccggtattccatatcctgggagatgcctctgatccttggatgtgcatggccgtgctggcctcccaggccacactgctgacagtgtccagggatggtgtggtcagtctgtggagctcagctacgggaaaacttcaggggaagcaacatatgtccagcatcaaagaagaaacacctacctgtgccgtctcagtccagaagcaaggaaagcttgttaccgggtttagcaatggctccatctctttggtttcctccaaaggggacagattgctggagaagcttccagatgctgtgaggttcctggtggtctctgaagatgagtccctcctcgccgcaggctttggaagatcggtgcggatattcttggcggactcgaggggctttcgccgattcatggccatggatctggaacatgaagacatggtggagacggctgtttttggtactgagaacaacctgatcatcacggggtcccttgatgcgctcattcaggtgtggagtctgtcagaacaggggacccttctggacatcctggaaggcgtcggggcccccgtgagcctgctggcccgcggcggggctttggtggcatctgcttccccacagtcctcatctttcaaggtctgggatctcagcgatgctcataggtcccgggtgcctgcaccatttctggaccgcaccggcctcaccgcagtgtcccacaatggaagctacgtctacttccccaaaattggggacaaaaacaaagtcactatttgggacttggcagaaggcgaggaacaagattccctggacacctccagtgagatcaggtgtctggaggttgctgagcagcgcaagctcctatttacgggcctcgtgtcgggggtcgtccttgtgttccccctgaattccaggcaggacgtgatatgcattccccctcccgaggcccggaaagcaatcaactgcatgtccctgagcaagtgcgaggaccgcctggccatcgcctatgacaacatcgtcctggtgctggacatcacctccggggacccctgcccggtcatcgatgggccaagatacaccttttacactcagctgcccgagaccctctccagcgtggccattctgacggactaccgcgtggtctacagcatgaccaatggggacctctttctttacgagtgtgcaacttccaaagcgtttcccttggagacccacaggagccgagttgcctgtgtggaggtcagccacaaggagcagctggtggtcagcgggtctgaggatgccctgctgtgtctctgggacctgcaggcacgcaagtggaaattcgagatgagctacacgagttcttactgcagaggggtccaatgtgcttgcttctccaaggatgacaagtatgtgtacgtgggcttaaaggatcgctctatacttgtttggagtgtgctggatggcaccctgctgacagtccagtttgtccatgctgtggtaaacagaatcatcccaaccaccagtggcttcattgcccccaccaggcatggttatctgatccgagagaatttccagtgcctttcagcaaaagcctcaccgcaggaccctcttaagaacttcaagaaggcaatgtggatggtcaaatccaggcagagagaggagctagttgcagctgcaggagctccccaggacttggagtcagaaagtgcccagggaaatgaaaccaaatcaaacaaatgctcacaagtgtgcctgatagtgtaaaaaaataaaaataaaaaaaccctgtgggggtatggggctccagtgagttagccccatttaatctagttaaagcaaaaagaatacgtttgctggtgtatatctggacccatggcttcagattatggcttcagaccttgtctcttctcatctttccattattctttcctctttttcattttcattctcagacttgccacccccaggttagcaacatggtggccaatatgctgctgtctccaatttcaatagaaaagagagcttctctttcccaacagtcctagcctcaactctactggtcccaattggcccatacgcctagccctaaaccaattattatatctgggagaatgcagagctctaatcggctagactgatccaatgtccaccactgggactgagaatagaagagattactcctgagatgcaaactggagttctggtaccagatgaagggggaacggatgaatgtgagatacagcaaatcactgatgtggaccacagaacctcacagtttataaagctgtaggtgctgtcatctgatcctcatcacaactcatactttagggagggcaggagtttctgtatctattttacagatgaggaaactgagccttgcggaagtagttataatttgattcaggtcacaagtccaaggtgcaagagctctgagagtgagccttctgtcccattcctgttagacctcactccaatttcagtctgcagagcacaaccatctcttccacaggcaccacactcaaatgctcacaggagctagtgactaatctagacacttccatgcacctgggtgagcagcagggagagacagagactggacatgtggaaggcagagattgtgtctagggtgggtatgagcagcctgactgtagcccagaatcaccatggccaaacaagcccactgctgtcagtgcttccagttgtaataagcaaagccagaaatccagacttttatgcaaaaatgttctgacttttaaagttggcgattggttgaatttatatctatagtgcatttggcatgtgcgtctttggttaatgagctgacttcaggactcacgctggcagtaaaacaatcaacatgttatagttcatccctctctattccttggctcccaaacttttgggataaagatgtgggtttttaatcttaaaaactggaggctcttggaagtagaaagagctgctgatctctccctgctttgcttttgaactgtctgccttgtgcaagttcaacagtcaaactgttttcattccacttaagtggatctttcttctttgcccacagccttctaaaagcccttctcagtcttctcaggcttttactttaatgctaggatagtctaaatcttcaaggtggctatcccttctcccctccgtggaattcctgatagagtctcaataaaagcaaccttagaaacagaggcttttgagctgaacaagaccctactgctgtcttattcatccattttccaaaccagttttccaaggcaggttttggtagttctgcaaatgttagtgtcaaatttcatttaaaaatattttaaactgtaattttaagatgtatgcttggatgtattgggcagcagcttctaaggtgttgaagattactaaggttggtgcaaaaagtaactgtggttttcgccattaaaaatattaaaaataatggcaaaaactggctgggcacagtggctcacacctgtggtcccagctctttggaaggccgaggcaggtggatcacctgaggtcaggagtttgagaccagcctggacaacatggtgaaacccttctctactaaaaatacaaaaatcagccaggcatggtggtgagtgcctgtaatctcagttactcaggaggctgagtcaggagaatcacttgaacccgggaggcggaggttgcagtgagctgagattgtgccactgcactccagcctgggtgacagagcaagactccatctcataataataataataatggcaaaagcctcggtggctcacgcctgtaatcccagcactttgggaggctgaggcgggtggatcacttgaggccaggtgttcaagagcagcctggtcaacatggtgaaactctgtctctactcaaaaatacaaaaattagcctggtgtggtgacgtacacctgtaattccagctacttgggaggctgaggcaggagaatggcttgaacccgggaggcggaggttgcagtgagccgagatcgcaccactgcactccagcatgagtgacagagactctgtctcc

SEQ ID NO: 157373 - DNA, 6614 bp, Homo sapiens
  Payload ID: 10847
  Gene Symbol: NWD1
  Gene Name: NACHT and WD repeat domain containing 1
  ENST ID: ENST00000549814
  CDS Start-End: 252-4820
gctgacactgcaaagggcctctgtccttactggggaagcccagtcctgctcagctgtcttcttcagcaacaaacagaagtccagaaagagaaacagttgtggaggaagctgttgtgatgataatttactgagcacctactatgtgccaggcacgccagccttaccagacaagatccttgggctcatggaattcactttctcgtgggacagacaaacaataacatgtagaaacatatcagctgttgatatggatgcagagagggaagccctgcagagcactgcctaccctgaagtgccagaccttctgccagaggcacggcttgatgtttgaggtcgttgatctgaggtggggtattcggaacattgaagccactgaccacttgaccacagaactctgcttggaggaggttgaccggtgttggaaaacatccatagggccagcttttgttgccctcatcggtgatcagtacggcccctgtctgattccctcgcggatcgatgagaaggagtgggaggtattgagggaccatctgactgccaggccaagtgacctggagctggtggcacgatacttccagagggacgagaatgcgtttcctcccacctacgtcctgcaggcaccaggtactggggaggcctgtgaaccagaggaggccaccttaacttctgtcctacgctctggagcccaggaggcccggaggctggggctcatcacccaggagcagtggcagcactaccaccggtcagtcattgagtgggagatagagcggagcctgctgagctcagaggaccgggaacagggagccaccgtcttccttagagagatccaagacctccacaaacacatccttgaagactgcgcccttaggatggtggaccggctcgcggatggctgcctggacgctgatgcccagaaccttctcagcagcctcaaaagtcacatcactgacatgcacccaggggtcctcaagacccaccgcctgccgtggagccgcgacttggtgaaccccaagaacaagactcacgcctgctacctgaaggagctgggtgagcagtttgtggtgagggccaatcaccaggtcctcacacgcctccgtgagctggatacggccggacaggagttggcgtggctctaccaagagatccgccaccacctttggcagagctcggaggtcattcagaccttctgcggacgccaggaactcctggcccggcttgggcagcagctcaggcacgatgacagcaagcagcacacccccctggtactctttgggcccccaggcattggaaagacagccctgatgtgcaagctggctgagcagatgccaaggctgctggggcacaagacagtgaccgtcctgcggctgctggggacgtcacaaatgagctcagatgcccgtggcctgctgaagagcatctgcttccaggtgtgcctggcctatgggctgcccttgccccctgcccaggttctggacgcccacaccagggtggtccagtttttccataccctcctccacactgtctcttgcagaaacttcgagtctctcgtgctcctgctggatgctatggatgacctggactctgtccgccatgctcggagggttccctggctgcctctcaactgccccccgagggtgcacctcatcctctcagcttgctcgggggcactgggggttttggacaccttgcagcgggtgctcctggacccggaggcctactgggaggtgaagcccctttccggaaaccaaggccagcagatgatccaactcctgctggcagctgcaaggaggacgctgagcccggtgcacacagatttgctctgggccagcctcccagagtgtgggaacccagggcggctgaggctggcgtttgaggaagcccggaaatgggcctctttcaccgtgcctgtcccgctggccaccaccgcagaggaagccacgcaccaactctgcacccgcctggagcagacacacgggcagctcctcgtggcccacgtgctgggctacattgtgtcttcccgacacggtctctcggaggcggagctgaaggatgttttgtccctggacgacgaggtcctgcaggatgtgtaccgagattggaccccgcccagcaaggagctgctgcgcttcccgcccctgctgtgggtgcggcttcgtcgggatctgggatactacttggcccggcggcccgtggatggcttcaccctcctggccattgcccacagacagctggtcgaggtggtccgtgagcgctacctgtcaggatccgagagagccaagaggcatggcgtcctggccgacttcttctcagggacctggagccagggtaccaagaagctcatcactctgccacttgtggggaaaccactgaacttggaccgaaaggtggccccgcagcctctgtggttctcacatacggttgcaaacctgcggaagctgaaggagttgccctatcacctgcttcactcgggccgcctggaggagctgaaacaggaggttctgggcagcatgagctggatttcctgccggggcatctctgggggcattgaagacctgctggatgactttgacctgtgtgcccctcacctggactcccctgaggttggcctggtccgtgaagccctccagctctgccgccctgctgtggagctccgaggcatggagaggagcctcctgtacacagaactgctggccagactccatttcttcgccacctcacatccagcactggtgggacagctatgccaacaggcccagagctggttccagttgtgcgcacaccctgtgctggtgcccctcggaggattcctccagcccccgggaggacccctccgggcaactctcagcggctgtcacaaaggcatcaccgccatggcatggggtgtggaggagaagctgctggtgattggcacccaggatggcatcatggctgtgtgggacatggaagagcagcatgtgatccacatgctaactggacacacaggagaggtgaggtgtgtgaaaatatttgccaaagggaccctcgccaactctgcttcaaaggattacacgctgcacttgtggaacttactctctggccaggagaaatttaccatttgggatggaggctcaaaaaatcccgctgaacctcagatctggaaccttcatgtggatgaggcacacaaagttgtgtattcagcatctggctcaaagatcaatgcttggaatctggaaactgcagagccggtattccatatcctgggagatgcctctgatccttggatgtgcatggccgtgctggcctcccaggccacactgctgacagtgtccagggatggtgtggtcagtctgtggagctcagctacgggaaaacttcaggggaagcaacatatgtccagcatcaaagaagaaacacctacctgtgccgtctcagtccagaagcaaggaaagcttgttaccgggtttagcaatggctccatctctttggtttcctccaaaggggacagattgctggagaagcttccagatgctgtgaggttcctggtggtctctgaagatgagtccctcctcgccgcaggctttggaagatcggtgcggatattcttggcggactcgaggggctttcgccgattcatggccatggatctggaacatgaagacatggtggagacggctgtttttggtactgagaacaacctgatcatcacggggtcccttgatgcgctcattcaggtctgggatctcagcgatgctcataggtcccgggtgcctgcaccatttctggaccgcaccggcctcaccgcagtgtcccacaatggaagctacgtctacttccccaaaattggggacaaaaacaaagtcactatttgggacttggcagaaggcgaggaacaagattccctggacacctccagtgagatcaggtgtctggaggttgctgagcagcgcaagctcctatttacgggcctcgtgtcgggggtcgtccttgtgttccccctgaattccaggcaggacgtgatatgcattccccctcccgaggcccggaaagcaatcaactgcatgtccctgagcaagtgcgaggaccgcctggccatcgcctatgacaacatcgtcctggtgctggacatcacctccggggacccctgcccggtcatcgatgggccaagatacaccttttacactcagctgcccgagaccctctccagcgtggccattctgacggactaccgcgtggtctacagcatgaccaatggggacctctttctttacgagtgtgcaacttccaaagcgtttcccttggagacccacaggagccgagttgcctgtgtggaggtcagccacaaggagcagctggtggtcagcgggtctgaggatgccctgctgtgtctctgggacctgcaggcacgcaagtggaaattcgagatgagctacacgagttcttactgcagaggggtccaatgtgcttgcttctccaaggatgacaagtatgtgtacgtgggcttaaaggatcgctctatacttgtttggagtgtgctggatggcaccctgctgacagtccagtttgtccatgctgtggtaaacagaatcatcccaaccaccagtggcttcattgcccccaccaggcatggttatctgatccgagagaatttccagtgcctttcagcaaaagcctcaccgcaggaccctcttaagaacttcaagaaggcaatgtggatggtcaaatccaggcagagagaggagctagttgcagctgcaggagctccccaggacttggagtcagaaagtgcccagggaaatgaaaccaaatcaaacaaatgctcacaagtgtgcctgatagtgtaaaaaaataaaaataaaaaaaccctgtgggggtatggggctccagtgagttagccccatttaatctagttaaagcaaaaagaatacgtttgctggtgtatatctggacccatggcttcagattatggcttcagaccttgtctcttctcatctttccattattctttcctctttttcattttcattctcagacttgccacccccaggttagcaacatggtggccaatatgctgctgtctccaatttcaatagaaaagagagcttctctttcccaacagtcctagcctcaactctactggtcccaattggcccatacgcctagccctaaaccaattattatatctgggagaatgcagagctctaatcggctagactgatccaatgtccaccactgggactgagaatagaagagattactcctgagatgcaaactggagttctggtaccagatgaagggggaacggatgaatgtgagatacagcaaatcactgatgtggaccacagaacctcacagtttataaagctgtaggtgctgtcatctgatcctcatcacaactcatactttagggagggcaggagtttctgtatctattttacagatgaggaaactgagccttgcggaagtagttataatttgattcaggtcacaagtccaaggtgcaagagctctgagagtgagccttctgtcccattcctgttagacctcactccaatttcagtctgcagagcacaaccatctcttccacaggcaccacactcaaatgctcacaggagctagtgactaatctagacacttccatgcacctgggtgagcagcagggagagacagagactggacatgtggaaggcagagattgtgtctagggtgggtatgagcagcctgactgtagcccagaatcaccatggccaaacaagcccactgctgtcagtgcttccagttgtaataagcaaagccagaaatccagacttttatgcaaaaatgttctgacttttaaagttggcgattggttgaatttatatctatagtgcatttggcatgtgcgtctttggttaatgagctgacttcaggactcacgctggcagtaaaacaatcaacatgttatagttcatccctctctattccttggctcccaaacttttgggataaagatgtgggtttttaatcttaaaaactggaggctcttggaagtagaaagagctgctgatctctccctgctttgcttttgaactgtctgccttgtgcaagttcaacagtcaaactgttttcattccacttaagtggatctttcttctttgcccacagccttctaaaagcccttctcagtcttctcaggcttttactttaatgctaggatagtctaaatcttcaaggtggctatcccttctcccctccgtggaattcctgatagagtctcaataaaagcaaccttagaaacagaggcttttgagctgaacaagaccctactgctgtcttattcatccattttccaaaccagttttccaaggcaggttttggtagttctgcaaatgttagtgtcaaatttcatttaaaaatattttaaactgtaattttaagatgtatgcttggatgtattgggcagcagcttctaaggtgttgaagattactaaggttggtgcaaaaagtaactgtggttttcgccattaaaaatattaaaaataatggcaaaaactggctgggcacagtggctcacacctgtggtcccagctctttggaaggccgaggcaggtggatcacctgaggtcaggagtttgagaccagcctggacaacatggtga

SEQ ID NO: 157374 - DNA, 8325 bp, Homo sapiens
  Payload ID: 10848
  Gene Symbol: NWD2
  Gene Name: NACHT and WD repeat domain containing 2
  Uniprot ID: Q9ULI1
  ENST ID: ENST00000309447
  CDS Start-End: 849-6077
ggagagatagggatgaagcgatcgtccctccaggacgccagagacaatctggagacttgatgctttaaactctccgggtctggcttggggttgtgtgcgtcgaactttgaggctggattccctgcacttgggcagagacgcacagacgcccgagcgtgtggattcccgaaaattctcagggcttgtgtgacctttaggagagttggagggggcgtagtagaaatctcaggctaattgatttcttgtcctccaccacggaggcagacaggagccctcggctgtccacagaggagtccaggaggctcctgcgcacccccgaggcccccgcgcccaagccccggccgtcctctaagccgcaagttatttctgcgcccgagagaggcgggctcggataaagtcgggacgccttctggtacataaagtttcatctgctctcctcgctcgcacggtccctgccgcctggcggccccctcctcccacggcgggcgcgggcggggagatggccgccggcgcttcccggcgcaaacgggcgctgcgcgcgtagccgccgccacgctgacctcccgctccagctggctgctgctcggagccctagcagcgggcgaaggcggaggcccagaagggcaggagaccgccgcgacaggagcccgagggtccgtatggcttctcctcgccggcgggtgctgtgcgccacggagctcgccaaaggcgcttcgggctcggagcggctctgagccgcgccgcctgctgagatcgaccgcctgctgagccgttccgtggagctgcgggcaggaacccgaggagcaggaggtggcggcggcggcagtggctgttcctcccagagggcgatgtggccggccggcgcgggcaccaagctgccctgtccccgagactctgcgctccggcgggcggctttctctgggaacctcacggccctgccctctcacctcgtgcccgccggccgcagcgtccgggtcttcatcagcgccaaccctgaagatacgggagcagaaagacaggcgctaagagaaaatgtatatcctaaactgagagaattctgcagagaaaactatggattggaatttcaggtcatagatctgtactggggagtggaagaagatgagtgggacagcccagagctccagaagacccgcatgaagctgctggagaattgcttgaaaacttctgcaggtccatgttttgttggactattaggtgaaaaatatgggaatatccgaatccctggagaagttgaagcctcagagtttgaaatgattttggatgccgccatagaggcaaagctggagaccaagttgctggaggagtggtactgtcgagatgagaactcggtgccagcagcctattacctcagacccaagtcagaaatgctgagaagcaatagaaatgcaatgcagccttctaccaatgctgaaaacgagaagacatggcaagagatatcagatgagatcaagaagatatttaaggctgctgtaaagctgttacacgaaaagggtaaaatgaaacacagccaggctaagaggtacctgttctcagctatagaggatgagtttgactttgctctgggaaaacaaactccagcatttctaaagaagtgtgtttgctacattaggaaaattgctaacattgagcgctttgtgaaaatcccagagatgggaaaatacatggatataactggaacagaaccgaggattattcgggacccagaagcccaagagaagctgataaaactcagggatgaatttattcctactattgttgcatcatctaatctgagagtgtacacatctgttactcattgtgacatgaaactaggctactcccaagaaatagaaaatcattacatcgaaggacttggtaaacaattttatgaggacatgattgatataattcaggcaacgatacaacagaattttgacactgaaactgatacactctatgatgaaatccttcaacattcatcattatgtaaaacatacgcctccttctatgagtacaaatgtgaatctctaaacatagtgcataactacattcttccaagcaaagctggacacatcaaccctcttattatatatggtgggccatgcactgggaagacccttctgctagctgaagtagcaaagaaggcttatggctggctacatgaggacacaggaccagaatctgacccagtagtcatcgtgagatttctaggaacgacagacatgagctctgaccttaggactctccttctaagtgtttgtgaacaattggcagttaactaccggtgtctggttcaaagctaccctaagaagatccatgacctctgtgacttatttataaatcttttgaatgagtcttcactgcagagacctctagtcataatattcgatgcactagagcagctctcagagaatgatgatgccaggaagctttggtggctcccagctcacctgccccgctttgtccggatagtcctttccacgctgcccaacaaacatgggatcttgcagaaactaaggtgccttatccatgaagaagacaactacatcgagctgattccccgagacaggaagatgtgcagccaggtcctcaaacaccagctgctgcgcgtcaaaaggaaggtcacatcaggccagcagatttatgtgaacaatgcattatccaagtgcacactgccaatgtttgtgaacctgaccttcagggaggtgaggcactggagatctcacaaagacgtcgatgaatcctccctctctgtcaccgttcatgaaagtatagagcagttattctggtccttggagaagaagtgtggtcagaaactggtctctagggctcttggttacatcaccatggccaaaatgggtctgagtgaaatggaactggaggatgtgttagccctagacaacagtgtaatgagtgagctcaaagaaaacaccagacccagcaatcccctgagagtaccttacttgtacattgcaaggctcaaggagggtctcagtggatacctaatagaaagacatgtgaaaaatgtcacactcctagtctgggccaacagacacctgcagctcatagcccagaagctatatctgcaggatgacaatgacctgcgtgaaatgcacaccatcttagcagattattttctgggggtttggtcagggggcaggaggaaagccttctgccttgaggacccctacttgaatggctgccttgacttggagaacagaagtttgctggaggaagaaaagcacttcatggaacaggcttcctttgacaggcaggctccagaccagccctgggttttccagtgtaatcccctggaacctgacatctttttcgttaatcatcggaaaatgtctgagctgttgtaccacttgacgaggtgtggaaaaaccgatgacctgctttacggcatcatcatgaacttcagctggctttataccatgatcaaaattggccagtttgacaaagtgctttcagacattgagctggcttacaactactcgcaagagaaggagctgaagttcctggccaacaccctccgcagcatcaaaaacaaggtcactgcatttcccggctccctttcagcagagcttcagcaaagactgctgcctgttgtaagctccctgcccaaacttagacatcttcttttagagtgtgataaagatgggcccaaatattgctccattgtaccactgcattcatccatggatgtgacatacagcccagagcgtcttcccttatcatccagtcacctgcatgtcacagagatcctgcctacctgtaaccccagcactgtcctcacagctttagaaaatggttccatcagcacctgggatgtagagactcgacagctactcaggcaaatcaccacagcccagtctgtcatcctgggcatgaaactcaccagtgatgaaaagtaccttgtggtggctacaacaaataacaccttgttgatttatgacaatgtcaattcttgcctcctgtctgaagtagaaatcaaggggaccaagcatggaagcagcgccacctacatcaatggatttacactgtccgccaaccacgcccttgcatggctcgaagccagcaaagatgtcactgtcatcgatctgctgtacggatggccgctttaccagttccactgctggtatgaagtgacgtgcgtccagtgctccctggatggtctgtatgctttctgtggccaatacctgaacacaaccaccatatttcatttagggagtggagaaaagttatgtacagtgacatcagaattttcaggtggatttgtgaagtttcttcttatcttggacacagctcaggaaatggtcatggtagacagtgaaggaagtctttctgtttggaatactgaggacatttccagcccccagctgactgatgactttgattgccgaagagaagacagtgaggtggtcagcattgagctttcagaagaccaaagtgcagttctgatctgtaaagccctcagcattgagctcttagatactggtctgtggaaggtggctgaaaagttcagagccaagcacaacgaacgctttatatctgccgtgctgtctaaaaatggagattgtatcatcgccaccatggaaaatacctcagctgtgtttttttggaggcgggacacaggacagtgtatggcaagcttgcaggaaatctcaggttccattgttaagttagtgaaatccagtcaccacaatatgctactgtctttatcaaccagtggtgttctttccatttgggacatagatataatcacagctatgtccaacatagataagactggaaaacccatccaaagtctgttgttgcctgctagaggggaaatcatttactccctggatggatccgattgtgttcataagtggaacttcagcagtggcttcatcgaagcagtattcaagcatgaaggaatagttgaacactgtgtgttaacatccaccggagatataatggtgacatcagatgacaaaagcagccagtatgtctggcacaccagcagtggtgaaaacctttttcgaattaacgggcagagaatatctcagctgctgattacacacaatgaccagtttgtggtctcgctctgtgaggaaaatgcctccagggtttggaggctcgccacaggccacagggtctgcaacattctgaccactttgcagaatgcctttattacctccgcaaataccttcgtggtgggaatgactaaaagcaaagtgttggcagtcagtctttggacaggaagtatcaccaagaaattttgctgtgaagatgggaccaccatcgtgaattttaaattaatccctgactgtcctgatatcatcgtgtttatcacatcggccgagactgtgaacatctggagtctgacagatgaagtgatctgtcggcgcgtgcaacttccaaacaacttcttgaaaaatctggaggactttgaaatttctcccaatggaaagctaggcattatagccaggggagatgaaaacatcaatgtgctagatttatacagtggtaaattgcgggtggttcacgcctctgggatcatctggcggcagaggttgtctcgggatggtcgctacctggtatacatttgtttccgaaatggggaggaggaggatgaaaatggtgcaatattcagtttaattgtaatgagactggcagatggcaaaaatatcggtgcttgttccctttacaaaacaccaactttccttgcactctcccagaggcacctgaacatcattgtgggctttgatgatgggagtatagggatctacacggtagtagaccgtgtagatgctgcactgaaaatcaaaattgccacttcaaatagcagacaaattttcaacaatgcaacacacacctccaggccaaagtgtaacagttattgttttaaaatatctgtggattgcttatggagagagtccactgaggtctttgcaagagacagccccatcacagttagtgactctactgagtccaatgaagcaacaccctccaagaaacacaactcttgttatgagcgggtatgctcggccctagaagccaggggccacagctatgcccctgataactgacaaaatgttttccagctaagcagaaatatgtgatccacgtacagaagggaaaaaaatgtgccccaaatgataaactattcatttattaaaaggcaggagcgatgctggaattccagtgttttattaagatgttcatgaaatggacaaataggttagtcttgggtgtggtctttttgtcaaagtgtatccagaatgtcagaatttctagtagtaatatttaaatggttacttcatctgaaaggcagaggctaaaagtttttaaattagctgtgtggtgaggcagcataatacatcccactggttaagatgagagaggctagagttatatacagatcatttggatgggaattagttctacaaaaatcagctgaaatcatgaagacaaagagctgcttgacttcaaatgattgtgtgataagtaaacacagccttaatctctctttacattttacagtcctgacaactgtgtacacctagtctgcagtgaacggtctaaaggtgcaaaatatgtaacaaaaatacccaagtgtattcccagtttcccgagagatatgacctgaaacatgagactgtggactggactgggacaagaactaactaccactatcatagggctactgaacatggagagtcagtctttattaaaagacagttgcaacaattgcatgcgagggtttctgtataacagaatatatgatttttaaactatttcctgggttgcaaaagaacacatttagtaagaaacaacaatcttttcgcatctttttgaaatgcatatttgtgctgggtgtaaagaagattacaggaagggcattacaaatctggtcaaaacacctgtccatttccatcattgtactaacagaagtctgtactatttggtcagtttgtatggaagcataaatattccctaaattcctgcagttagtcttcatagaaagcaagctttctcaacatgccatctctgagatactgatgacgtttgccttactcacattccttctctttcctgtgtaaaatgcagatagatgaccaaatactctgggataaactgaatatgcctgtctttgtgctaaaatattccataaatcttaagggtgtccaaaagttctttattgtccttgtttgtaatcactttcttacttctacacaccatctgtatgcttctttatctgttactcttcctgattgaggactcttctgagccttttatagtcctatccatttcaaagcagaagctgtggaatggtattaaatattttttaaaattaattcacctgtttaaaagaaaacattgcatctcaaaaggtgaagatgattgttctttcttccatatcctccttacggcatgtccttggataacttttcaaaaggtatccacacttttggttgagtttagttttcttagaaagtagagaagtaacactttactagaataatgaacaaggaattgatttgctctaggcccagctctgccataaactcattgtgtattcctagacaggtctttaacttcatcagtgtgttgtttttgtgaagtgcaaaataaagatagtgatagtttctgctgtagccctcatagggacattgggaagcagtataagaaaaacttcagcaacatcatgattattgatgctaataggaaaaataaattcatgtaacccatagagaatccaggtcaattgtatttcctcttggaaagcagtttaacatgtaagcgttcaaagatgtgattcagataaaaatacccaggtccatagtgaaagatgtttttcagtatgttacttatggtttagctactagccagggaggtggtagcccagagaaggcaaaccacatacagatcacctggagttgattatatgagtctatgcttttgagctctttaggcaacacattctcattcctgtcattatcagttgaacctccatgccacacatttctaagaattaaatgcctagatggattaaatgtagtatgtgaatgttctatgtaaaagccaatagagtatacaagtgacttgaatgatttttcctaacttgtttgcaactgatagctcatattgaatgtttttatgtaaactttgtatcgttgggaagaattacccaatcagagatttatattttcataaatgttacatttagttaaattttgttacagagttgttacactagaaaattatttcagtcttcaaacaatatacagtcttgtgtatgtattatttgtatgaataaaagataaactacttaga

SEQ ID NO: 157375 - DNA, 4972 bp, Homo sapiens
  Payload ID: 10849
  Gene Symbol: NAPEPLD
  Gene Name: N-acyl phosphatidylethanolamine phospholipase D
  Uniprot ID: Q6IQ20
  ENST ID: ENST00000341533
  CDS Start-End: 439-1620
cccgcggcccgggatcccgagtgtccggagctccgtggtttctgttggacctcgcgggaggcggttttctcccgcctgctgtgctctgtgacctctctgctgcctcctccacggtctctgggcggagcaatccacactgctgagcctggggtggtttggaattcttcggcgaagtggagcgggctgagagtgggtttcccgtccccgagccctccctcatctcggagatgccgcacttgtgagcgacagggcttcatttgaattttcgcacctcgcgagttgcggagcctgcatctctgaagctgcctcggtgaagagccacagcattattttttttctctttgggagagtagctgtctgggatttgagatcctatcttccctgcaaattaccaggttgcatcttcactgataggaatacatttcttcaccaaaggacatggatgaaaatgaaagcaaccagtctctgatgacaagcagccaatatcctaaagaagcagtaagaaaacgtcaaaattcagcacggaattccggagcaagtgattcttctaggttttctaggaaaagcttcaaactggattatagactagaagaagatgtaactaaatccaagaaaggaaaagatgggagatttgtgaatccgtggccaacatggaaaaacccctctattccaaatgttctcagatggctgataatggagaaagatcacagcagtgttccaagttctaaagaggaactagacaaagaactcccagtgcttaagccatattttatcactaaccctgaagaagctggagtgagggaagctggcttaagagtcacatggctgggacatgccacggtaatggtggaaatggatgagctcatatttctcacggatcccatctttagctctcgtgcttcaccatcgcagtacatgggtccaaagcgatttcgtcgttccccgtgcacaataagtgaactccctccaatagatgcggtccttatcagtcacaaccactatgaccatctggactacaattctgtcattgctttgaatgagcgatttggtaatgagttgagatggtttgtgcctttgggtctccttgactggatgcaaaaatgtggctgtgagaatgtgattgagttggactggtgggaggagaattgtgtccccggacatgataaggtcacttttgtctttacaccttcccagcactggtgtaaaaggactctaatggatgacaacaaggtgctatggggcagctggtctgtcttggggccttggaatcgattttttttcgcaggagatactggttattgccctgcttttgaagagataggaaaaagatttggaccttttgaccttgcagctattcccatcggagcttatgaaccgaggtggtttatgaaataccagcatgtagacccagaagaagctgtaaggattcacactgatgtccaaacaaagaaatctatggcaattcactggggaacttttgccttagcaaatgagcattacttagagcctccagtgaagctgaatgaagctctagagagatacggacttaacgctgaagatttttttgtcttgaagcatggagaatcaagatacctaaataatgatgatgaaaacttttaataaataatttcctgaggtgaaaaaccgatattgaagattcatttttcttttttccattcttcaggaccttcggcaaggtgagtcaaggctctctacctacctagatgtttttcagaggcctacaaatacaagtatctttcttatatgcacattctaataaatgatgaaattcagtccaacatgcttattataaacatagcaattcttgctctatcaaattagcttatatgccaaatattaaatatggtttatttaggtaagcataaaaacataggggctatcatttttaaagacttgattttctctattgtggtaaaatatataaatacatatttgccattttaaacatttaccattttaaccatttttaagtgtacagttctttcgcattaatgcacccatgaccaccattcacttaaatttttaaaagaacagtatattctttttttcctagagccttcagatgagagggaacagtatattctattgcacgtctacaattcccaaaagacctcttactttgggaggccaaggtgggtgggtcacttgaacccaggagtttgacatcaacctgggcaacatggtgacctcccgtctctctcggaaaaaaaaaaagaaaaaagaaaaagccgggtgaggtggtgtgtacctgtagtcacaggtacttgggaggctgaggtgggaggatcacttgagcccaggagatagaggctgcagtgagctgtgatcgtaccactgcactccagcctgggcgacaaaatgagaccctgtctcaaaagaaagccctctccttagctgagcagaggaagggaaggagtgtggctatgagaatatgatttatgccattttctgtttttaaatctagaagatcttctaagcacaaatacagctacaatgaaatattttacagacaaaatgttaatagaccatattctttgaattaaatttgtttttaattttctctacacattttttttttcctggagtctcttagctctaaatatatcaatcagatttataattttttttacctgattcagatgtcttacatttttatattaaatgaaccttaagcatgattcttttggtaagccagtatgaatgccagtggttggggggcggggggggagtcagttgacataagatttagtcctaataaggactctgtattcacttgattattctgacccttcctaagggagggaggtggattagataccactggaggcccattctgtattcctaatccagtctcagcactttattcatacaaaataatcaaaataggttttctacaccaaatgctacccaggcagtgctctataatttatttgcacacctgtatgtgtggtgccacgttagccactaaatctgaacttttaccctgctttcatcatggatttttttgtgtaacctgaaacaagtcaccagtgctcactgtgcctgtttcctcatttgcaacaagaggataattccgacctacctctgaaaaatgtgtagattaaatgagtttttaaagcactttagaaaatataagggagaaaatgatttcttaagatatcactgcctaatatagacaggtatatttgaaagctaaatacaggttaatgcttttgataatgtattgttcctgttgcaaatttaagcattatatattaggagactaaacattgaaaactttcactgatttttaaattggagtaatagcctaaataagtgtaaataatctttatcaaaatttagtgtttatctacaaagatgcgaatcagtcaaggggaaatgtgtatgcaatgtgtgtgtatatgatgtatgcgaacatatgtgattttggggtactaaagcacaaaaaaatcccccataaaataaaccttcctgaaaagactgatcataaactttttcactccaagcagatgtgaatcaagatgttaggtttatggtgagttagctttgaggtgtgttgccctaatactagccagcgttgttgtagccatattccctgctgctgcacgccgaattgaaaatccatctcttacctcttctctatgaagcaagccaggtatgtcttgcttaagtatttcttctccatgaatggccttaacattattttgtattcacgtgtactgtttaactgagggtctcaaagcactttaaactgttgtgttctatttccactcgtctggcctgcctcatttttctaggcccttttgtaagctgtaattttttattaccactcatgttctttctacactgacactattcattaagaacatcaagcttcatctctgcttacagaatctcaccttattgagtgggttccactttatttttcatttgttatctacattttgaagggtttatgtgcaaagtgaaaacaaattttgaaaaataagacaaatccattctcttcttcaattcagtctaatatgcattgtagtgtcttttaatcagtcttatcctctaagtcaacttcattttcctcttcgtgaatacccatagcaatatgtaagattttattgaagtttcctgtgataactgaggaatactttgctatgcctcactgcccaatagggtgggtcatcaattaggagaaatcccaaattataaaagccaacatatgccgtgacctacgtaggaaaagatgtatttgtgcatcttctttctgggtagttaaaaattactccctcttttctctagcattttgacatttcagactcaatgctctgatctctagggagtgtgattattcaaactaatgagaggacaagaagacacagttttagaatctactgctgctaaagcacattaaaaacaaatcctggtttttaatgtatgcatagtttcatatttaatgaatatgctttcattaaatagggaggtagatttgaaaaaaccgttataaagaaatgtgccttttggggaatgaatacttttgttcatgtctagcccactgggaattttgttttcaccttatactgagtcctttttctaatgtaaaaatatttcttccaagtttgatttctgtatcagggtaacattgagaacacacatatttctgtttgaggatttgtgacttcctatggaaacagtcttgcatctatgtatttacaaatgaaatttaaagtattcttaaagctttgccttaaatactgcttgcatactgatttacttaatgctaagcatggcaggggttataaatttaaatactataagacctggctgaatcccagatgtatcaataaattgttatagtagcttatggaaaatgctattaaagataaattttcatacattgtatttttagtcaagtaaaatatggatgaaaattaataaagtactgtcaagggaaaaaata

SEQ ID NO: 157376 - DNA, 1822 bp, Homo sapiens
  Payload ID: 10849
  Gene Symbol: NAPEPLD
  Gene Name: N-acyl phosphatidylethanolamine phospholipase D
  Uniprot ID: Q6IQ20
  ENST ID: ENST00000427257
  CDS Start-End: 299-1480
gaaggaggccaccgctggccctgctgtcagattcgaaggtcataataagggagtgacccggcgacgactcgccccaacgatggcgaggcggcgagagctgaagcgctgcctgcagctgctggcgtcctcggcggagccagcgcggcgggctcgggttaggaagaacccgagcgcctgccgcggtcgcccctcccgctacgcggcggcgctttgcgcggggactctgtggccggaagccgcggaactgaggcggcgcgcgctcccggccaccccaagcgcgagttcttcaccaaaggacatggatgaaaatgaaagcaaccagtctctgatgacaagcagccaatatcctaaagaagcagtaagaaaacgtcaaaattcagcacggaattccggagcaagtgattcttctaggttttctaggaaaagcttcaaactggattatagactagaagaagatgtaactaaatccaagaaaggaaaagatgggagatttgtgaatccgtggccaacatggaaaaacccctctattccaaatgttctcagatggctgataatggagaaagatcacagcagtgttccaagttctaaagaggaactagacaaagaactcccagtgcttaagccatattttatcactaaccctgaagaagctggagtgagggaagctggcttaagagtcacatggctgggacatgccacggtaatggtggaaatggatgagctcatatttctcacggatcccatctttagctctcgtgcttcaccatcgcagtacatgggtccaaagcgatttcgtcgttccccgtgcacaataagtgaactccctccaatagatgcggtccttatcagtcacaaccactatgaccatctggactacaattctgtcattgctttgaatgagcgatttggtaatgagttgagatggtttgtgcctttgggtctccttgactggatgcaaaaatgtggctgtgagaatgtgattgagttggactggtgggaggagaattgtgtccccggacatgataaggtcacttttgtctttacaccttcccagcactggtgtaaaaggactctaatggatgacaacaaggtgctatggggcagctggtctgtcttggggccttggaatcgattttttttcgcaggagatactggttattgccctgcttttgaagagataggaaaaagatttggaccttttgaccttgcagctattcccatcggagcttatgaaccgaggtggtttatgaaataccagcatgtagacccagaagaagctgtaaggattcacactgatgtccaaacaaagaaatctatggcaattcactggggaacttttgccttagcaaatgagcattacttagagcctccagtgaagctgaatgaagctctagagagatacggacttaacgctgaagatttttttgtcttgaagcatggagaatcaagatacctaaataatgatgatgaaaacttttaataaatgtgagcacaggcacttttaatgaaaaaggcatcatctaagtttaaaaacaaatgaaaagacttagaaattcatgaatattgtgattattttacatttggaaacaacttctgcaagtttatgttttatgttttgtgtaataacttgcttcctagtatgatcagctcatgtacactatgagagggttcaggggtgggtcatttaaataatgaattggctaatgtggattttaaatttcatatcatgatataagcactgcaatggaaatgtttttactaaaacattatatttttgtggtactagaatttcctgaggtgaaaaaccgatattgaagattca

SEQ ID NO: 157377 - DNA, 658 bp, Homo sapiens
  Payload ID: 10849
  Gene Symbol: NAPEPLD
  Gene Name: N-acyl phosphatidylethanolamine phospholipase D
  ENST ID: ENST00000420631
  CDS Start-End: 1-431
cccagcactggtgtaaaaggactctaatggatgacaacaaggtgctatggggcagctggtctgtcttggggccttggaatcgattttttttcgcaggagatactggttattgccctgcttttgaagagataggaaaaagatttggaccttttgaccttgcagctattcccatcggagcttatgaaccgaggtggtttatgaaataccagcatgtagacccagaagaagctgtaaggattcacactgatgtccaaacaaagaaatctatggcaattcactggggaacttttgccttagcaaatgagcattacttagagcctccagtgaagctgaatgaagctctagagagatacggacttaacgctgaagatttttttgtcttgaagcatggagaatcaagatacctaaataatgatgatgaaaacttttaataaataatttcctgaggtgaaaaaccgatattgaagattcatttttcttttttccattcttcaggaccttcggcaagagccttcagatgagagggaacagtatattctattgcacgtctacaattcccaaaagacctcttactttgggaggccaaggtgggtgggtcacttgaacccaggagtttgacatcaacctgggcaacatggtgacctcccgtctctctcgg

SEQ ID NO: 157378 - DNA, 565 bp, Homo sapiens
  Payload ID: 10849
  Gene Symbol: NAPEPLD
  Gene Name: N-acyl phosphatidylethanolamine phospholipase D
  ENST ID: ENST00000418294
  CDS Start-End: 194-565
acactgctgagcctggggtggtttggaattcttcggcgaagtggagcgggctgagagtgggtttcccgtccccgagccctccctcatctcggagatgccgcacttgtgagcgacagggcttcatttgaattttcgcacctcgcgagttgcggagcctgcatctctgaagctgcctcgttcttcaccaaaggacatggatgaaaatgaaagcaaccagtctctgatgacaagcagccaatatcctaaagaagcagtaagaaaacgtcaaaattcagcacggaattccggagcaagtgattcttctaggttttctaggaaaagcttcaaactggattatagactagaagaagatgtaactaaatccaagaaaggaaaagatgggagatttgtgaatccgtggccaacatggaaaaacccctctattccaaatgttctcagatggctgataatggagaaagatcacagcagtgttccaagttctaaagaggaactagacaaagaactcccagtgcttaagccatattttatcactaaccctgaagaagctggagtgagggaagctggc

SEQ ID NO: 157379 - DNA, 4988 bp, Homo sapiens
  Payload ID: 10849
  Gene Symbol: NAPEPLD
  Gene Name: N-acyl phosphatidylethanolamine phospholipase D
  Uniprot ID: Q6IQ20
  ENST ID: ENST00000417955
  CDS Start-End: 156-1337
ctcgcgggaggcggttttctcccgcctgctgtgctctgtgacctctctgctgcctcctccacggtctctgggcggagcaatccacactgctgagcctggggtggtttggaattcttcggcgaagtggagcgggctgagattcttcaccaaaggacatggatgaaaatgaaagcaaccagtctctgatgacaagcagccaatatcctaaagaagcagtaagaaaacgtcaaaattcagcacggaattccggagcaagtgattcttctaggttttctaggaaaagcttcaaactggattatagactagaagaagatgtaactaaatccaagaaaggaaaagatgggagatttgtgaatccgtggccaacatggaaaaacccctctattccaaatgttctcagatggctgataatggagaaagatcacagcagtgttccaagttctaaagaggaactagacaaagaactcccagtgcttaagccatattttatcactaaccctgaagaagctggagtgagggaagctggcttaagagtcacatggctgggacatgccacggtaatggtggaaatggatgagctcatatttctcacggatcccatctttagctctcgtgcttcaccatcgcagtacatgggtccaaagcgatttcgtcgttccccgtgcacaataagtgaactccctccaatagatgcggtccttatcagtcacaaccactatgaccatctggactacaattctgtcattgctttgaatgagcgatttggtaatgagttgagatggtttgtgcctttgggtctccttgactggatgcaaaaatgtggctgtgagaatgtgattgagttggactggtgggaggagaattgtgtccccggacatgataaggtcacttttgtctttacaccttcccagcactggtgtaaaaggactctaatggatgacaacaaggtgctatggggcagctggtctgtcttggggccttggaatcgattttttttcgcaggagatactggttattgccctgcttttgaagagataggaaaaagatttggaccttttgaccttgcagctattcccatcggagcttatgaaccgaggtggtttatgaaataccagcatgtagacccagaagaagctgtaaggattcacactgatgtccaaacaaagaaatctatggcaattcactggggaacttttgccttagcaaatgagcattacttagagcctccagtgaagctgaatgaagctctagagagatacggacttaacgctgaagatttttttgtcttgaagcatggagaatcaagatacctaaataatgatgatgaaaacttttaataaatgtgagcacaggcacttttaatgaaaaaggcatcatctaagtttaaaaacaaatgaaaagacttagaaattcatgaatattgtgattattttacatttggaaacaacttctgcaagtttatgttttatgttttgtgtaataacttgcttcctagtatgatcagctcatgtacactatgagagggttcaggggtgggtcatttaaataatgaattggctaatgtggattttaaatttcatatcatgatataagcactgcaatggaaatgtttttactaaaacattatatttttgtggtactagaatttcctgaggtgaaaaaccgatattgaagattcatttttcttttttccattcttcaggaccttcggcaaggtgagtcaaggctctctacctacctagatgtttttcagaggcctacaaatacaagtatctttcttatatgcacattctaataaatgatgaaattcagtccaacatgcttattataaacatagcaattcttgctctatcaaattagcttatatgccaaatattaaatatggtttatttaggtaagcataaaaacataggggctatcatttttaaagacttgattttctctattgtggtaaaatatataaatacatatttgccattttaaacatttaccattttaaccatttttaagtgtacagttctttcgcattaatgcacccatgaccaccattcacttaaatttttaaaagaacagtatattctttttttcctagagccttcagatgagagggaacagtatattctattgcacgtctacaattcccaaaagacctcttactttgggaggccaaggtgggtgggtcacttgaacccaggagtttgacatcaacctgggcaacatggtgacctcccgtctctctcggaaaaaaaaaaagaaaaaagaaaaagccgggtgaggtggtgtgtacctgtagtcacaggtacttgggaggctgaggtgggaggatcacttgagcccaggagatagaggctgcagtgagctgtgatcgtaccactgcactccagcctgggcgacaaaatgagaccctgtctcaaaagaaagccctctccttagctgagcagaggaagggaaggagtgtggctatgagaatatgatttatgccattttctgtttttaaatctagaagatcttctaagcacaaatacagctacaatgaaatattttacagacaaaatgttaatagaccatattctttgaattaaatttgtttttaattttctctacacattttttttttcctggagtctcttagctctaaatatatcaatcagatttataattttttttacctgattcagatgtcttacatttttatattaaatgaaccttaagcatgattcttttggtaagccagtatgaatgccagtggttggggggcggggggggagtcagttgacataagatttagtcctaataaggactctgtattcacttgattattctgacccttcctaagggagggaggtggattagataccactggaggcccattctgtattcctaatccagtctcagcactttattcatacaaaataatcaaaataggttttctacaccaaatgctacccaggcagtgctctataatttatttgcacacctgtatgtgtggtgccacgttagccactaaatctgaacttttaccctgctttcatcatggatttttttgtgtaacctgaaacaagtcaccagtgctcactgtgcctgtttcctcatttgcaacaagaggataattccgacctacctctgaaaaatgtgtagattaaatgagtttttaaagcactttagaaaatataagggagaaaatgatttcttaagatatcactgcctaatatagacaggtatatttgaaagctaaatacaggttaatgcttttgataatgtattgttcctgttgcaaatttaagcattatatattaggagactaaacattgaaaactttcactgatttttaaattggagtaatagcctaaataagtgtaaataatctttatcaaaatttagtgtttatctacaaagatgcgaatcagtcaaggggaaatgtgtatgcaatgtgtgtgtatatgatgtatgcgaacatatgtgattttggggtactaaagcacaaaaaaatcccccataaaataaaccttcctgaaaagactgatcataaactttttcactccaagcagatgtgaatcaagatgttaggtttatggtgagttagctttgaggtgtgttgccctaatactagccagcgttgttgtagccatattccctgctgctgcacgccgaattgaaaatccatctcttacctcttctctatgaagcaagccaggtatgtcttgcttaagtatttcttctccatgaatggccttaacattattttgtattcacgtgtactgtttaactgagggtctcaaagcactttaaactgttgtgttctatttccactcgtctggcctgcctcatttttctaggcccttttgtaagctgtaattttttattaccactcatgttctttctacactgacactattcattaagaacatcaagcttcatctctgcttacagaatctcaccttattgagtgggttccactttatttttcatttgttatctacattttgaagggtttatgtgcaaagtgaaaacaaattttgaaaaataagacaaatccattctcttcttcaattcagtctaatatgcattgtagtgtcttttaatcagtcttatcctctaagtcaacttcattttcctcttcgtgaatacccatagcaatatgtaagattttattgaagtttcctgtgataactgaggaatactttgctatgcctcactgcccaatagggtgggtcatcaattaggagaaatcccaaattataaaagccaacatatgccgtgacctacgtaggaaaagatgtatttgtgcatcttctttctgggtagttaaaaattactccctcttttctctagcattttgacatttcagactcaatgctctgatctctagggagtgtgattattcaaactaatgagaggacaagaagacacagttttagaatctactgctgctaaagcacattaaaaacaaatcctggtttttaatgtatgcatagtttcatatttaatgaatatgctttcattaaatagggaggtagatttgaaaaaaccgttataaagaaatgtgccttttggggaatgaatacttttgttcatgtctagcccactgggaattttgttttcaccttatactgagtcctttttctaatgtaaaaatatttcttccaagtttgatttctgtatcagggtaacattgagaacacacatatttctgtttgaggatttgtgacttcctatggaaacagtcttgcatctatgtatttacaaatgaaatttaaagtattcttaaagctttgccttaaatactgcttgcatactgatttacttaatgctaagcatggcaggggttataaatttaaatactataagacctggctgaatcccagatgtatcaataaattgttatagtagcttatggaaaatgctattaaagataaattttcatacattgtatttttagtcaagtaaaatatggatgaaaattaataaagtactgtcaagggaaaaaa

SEQ ID NO: 157380 - DNA, 2672 bp, Homo sapiens
  Payload ID: 10849
  Gene Symbol: NAPEPLD
  Gene Name: N-acyl phosphatidylethanolamine phospholipase D
  Uniprot ID: Q6IQ20
  ENST ID: ENST00000422589
  CDS Start-End: 95-1276
ggagagtagctgtctgggatttgagatcctatcttccctgcaaattaccaggttgcatcttcactgataggaatacatttcttcaccaaaggacatggatgaaaatgaaagcaaccagtctctgatgacaagcagccaatatcctaaagaagcagtaagaaaacgtcaaaattcagcacggaattccggagcaagtgattcttctaggttttctaggaaaagcttcaaactggattatagactagaagaagatgtaactaaatccaagaaaggaaaagatgggagatttgtgaatccgtggccaacatggaaaaacccctctattccaaatgttctcagatggctgataatggagaaagatcacagcagtgttccaagttctaaagaggaactagacaaagaactcccagtgcttaagccatattttatcactaaccctgaagaagctggagtgagggaagctggcttaagagtcacatggctgggacatgccacggtaatggtggaaatggatgagctcatatttctcacggatcccatctttagctctcgtgcttcaccatcgcagtacatgggtccaaagcgatttcgtcgttccccgtgcacaataagtgaactccctccaatagatgcggtccttatcagtcacaaccactatgaccatctggactacaattctgtcattgctttgaatgagcgatttggtaatgagttgagatggtttgtgcctttgggtctccttgactggatgcaaaaatgtggctgtgagaatgtgattgagttggactggtgggaggagaattgtgtccccggacatgataaggtcacttttgtctttacaccttcccagcactggtgtaaaaggactctaatggatgacaacaaggtgctatggggcagctggtctgtcttggggccttggaatcgattttttttcgcaggagatactggttattgccctgcttttgaagagataggaaaaagatttggaccttttgaccttgcagctattcccatcggagcttatgaaccgaggtggtttatgaaataccagcatgtagacccagaagaagctgtaaggattcacactgatgtccaaacaaagaaatctatggcaattcactggggaacttttgccttagcaaatgagcattacttagagcctccagtgaagctgaatgaagctctagagagatacggacttaacgctgaagatttttttgtcttgaagcatggagaatcaagatacctaaataatgatgatgaaaacttttaataaataatttcctgaggtgaaaaaccgatattgaagattcatttttcttttttccattcttcaggaccttcggcaagatgtgaatcaagatgttaggtttatggtgagttagctttgaggtgtgttgccctaatactagccagcgttgttgtagccatattccctgctgctgcacgccgaattgaaaatccatctcttacctcttctctatgaagcaagccaggtatgtcttgcttaagtatttcttctccatgaatggccttaacattattttgtattcacgtgtactgtttaactgagggtctcaaagcactttaaactgttgtgttctatttccactcgtctggcctgcctcatttttctaggcccttttgtaagctgtaattttttattaccactcatgttctttctacactgacactattcattaagaacatcaagcttcatctctgcttacagaatctcaccttattgagtgggttccactttatttttcatttgttatctacattttgaagggtttatgtgcaaagtgaaaacaaattttgaaaaataagacaaatccattctcttcttcaattcagtctaatatgcattgtagtgtcttttaatcagtcttatcctctaagtcaacttcattttcctcttcgtgaatacccatagcaatatgtaagattttattgaagtttcctgtgataactgaggaatactttgctatgcctcactgcccaatagggtgggtcatcaattaggagaaatcccaaattataaaagccaacatatgccgtgacctacgtaggaaaagatgtatttgtgcatcttctttctgggtagttaaaaattactccctcttttctctagcattttgacatttcagactcaatgctctgatctctagggagtgtgattattcaaactaatgagaggacaagaagacacagttttagaatctactgctgctaaagcacattaaaaacaaatcctggtttttaatgtatgcatagtttcatatttaatgaatatgctttcattaaatagggaggtagatttgaaaaaaccgttataaagaaatgtgccttttggggaatgaatacttttgttcatgtctagcccactgggaattttgttttcaccttatactgagtcctttttctaatgtaaaaatatttcttccaagtttgatttctgtatcagggtaacattgagaacacacatatttctgtttgaggatttgtgacttcctatggaaacagtcttgcatctatgtatttacaaatgaaatttaaagtattcttaaagctttgccttaaatactgcttgcatactgatttacttaatgctaagcatggcaggggttataaatttaaatactataagacctggctgaatcccagat

SEQ ID NO: 157381 - DNA, 575 bp, Homo sapiens
  Payload ID: 10849
  Gene Symbol: NAPEPLD
  Gene Name: N-acyl phosphatidylethanolamine phospholipase D
  ENST ID: ENST00000425379
  CDS Start-End: 559-575
gcgcccgcggcccgggatcccgagtgtccggagctccgtggtttctgttggacctcgcgggaggcggttttctcccgcctgctgtgctctgtgacctctctgctgcctcctccacggtctctgggcggagcaatccacactgctgagcctggggtggtttggaattcttcggcgaagtggagcgggctgagagtgggtttcccgtccccgagccctccctcatctcggagatgccgcacttgtgagcgacagggcttcatttgaattttcgcacctcgcgagttgcggagcctgcatctctgaagctgcctcggtgaagagccacagcattattttttttctctttgggagagtagctgtctgggatttgagatcctatcttccctgcaaattaccagttacattggttatgaattagccgcagacatggacatcgtttagaaagaagttatgtaatctttaaaaagaagattacctatatcccacaatagtgtgatttttgttgcaagaaaatactgggtctgttaaagaagaaatttaggttcttcaccaaaggacatggatgaaaatgaaag

SEQ ID NO: 157382 - DNA, 2380 bp, Homo sapiens
  Payload ID: 10849
  Gene Symbol: NAPEPLD
  Gene Name: N-acyl phosphatidylethanolamine phospholipase D
  Uniprot ID: Q6IQ20
  ENST ID: ENST00000465647
  CDS Start-End: 280-1461
aattcttcggcgaagtggagcgggctgagagtgggtttcccgtccccgagccctccctcatctcggagatgccgcacttgtgagcgacagggcttcatttgaattttcgcacctcgcgagttgcggagcctgcatctctgaagctgcctcggtgaagagccacagcattattttttttctctttgggagagtagctgtctgggatttgagatcctatcttccctgcaaattaccaggttgcatcttcactgataggaatacatttcttcaccaaaggacatggatgaaaatgaaagcaaccagtctctgatgacaagcagccaatatcctaaagaagcagtaagaaaacgtcaaaattcagcacggaattccggagcaagtgattcttctaggttttctaggaaaagcttcaaactggattatagactagaagaagatgtaactaaatccaagaaaggaaaagatgggagatttgtgaatccgtggccaacatggaaaaacccctctattccaaatgttctcagatggctgataatggagaaagatcacagcagtgttccaagttctaaagaggaactagacaaagaactcccagtgcttaagccatattttatcactaaccctgaagaagctggagtgagggaagctggcttaagagtcacatggctgggacatgccacggtaatggtggaaatggatgagctcatatttctcacggatcccatctttagctctcgtgcttcaccatcgcagtacatgggtccaaagcgatttcgtcgttccccgtgcacaataagtgaactccctccaatagatgcggtccttatcagtcacaaccactatgaccatctggactacaattctgtcattgctttgaatgagcgatttggtaatgagttgagatggtttgtgcctttgggtctccttgactggatgcaaaaatgtggctgtgagaatgtgattgagttggactggtgggaggagaattgtgtccccggacatgataaggtcacttttgtctttacaccttcccagcactggtgtaaaaggactctaatggatgacaacaaggtgctatggggcagctggtctgtcttggggccttggaatcgattttttttcgcaggagatactggttattgccctgcttttgaagagataggaaaaagatttggaccttttgaccttgcagctattcccatcggagcttatgaaccgaggtggtttatgaaataccagcatgtagacccagaagaagctgtaaggattcacactgatgtccaaacaaagaaatctatggcaattcactggggaacttttgccttagcaaatgagcattacttagagcctccagtgaagctgaatgaagctctagagagatacggacttaacgctgaagatttttttgtcttgaagcatggagaatcaagatacctaaataatgatgatgaaaacttttaataaatgtgagcacaggcacttttaatgaaaaaggcatcatctaagtttaaaaacaaatgaaaagacttagaaattcatgaatattgtgattattttacatttggaaacaacttctgcaagtttatgttttatgttttgtgtaataacttgcttcctagtatgatcagctcatgtacactatgagagggttcaggggtgggtcatttaaataatgaattggctaatgtggattttaaatttcatatcatgatataagcactgcaatggaaatgtttttactaaaacattatatttttgtggtactagaatttcctgaggtgaaaaaccgatattgaagattcatttttcttttttccattcttcaggaccttcggcaaggtgagtcaaggctctctacctacctagatgtttttcagaggcctacaaatacaagtatctttcttatatgcacattctaataaatgatgaaattcagtccaacatgcttattataaacatagcaattcttgctctatcaaattagcttatatgccaaatattaaatatggtttatttaggtaagcataaaaacataggggctatcatttttaaagacttgattttctctattgtggtaaaatatataaatacatatttgccattttaaacatttaccattttaaccatttttaagtgtacagttctttcgcattaatgcacccatgaccaccattcacttaaatttttaaaagaacagtatattctttttttcctagagccttcagatgagagggaacagtatattctattgcacgtctacaattcccaaaagacctcttactttgggaggccaaggtgggtgggtcacttgaacccaggagtttgacatcaacctgggcaacatggtgacctcccgtctctctcggaaaaaaaaaaagaa

SEQ ID NO: 157383 - DNA, 4988 bp, Homo sapiens; identical to SEQ ID NO: 157379
  Payload ID: 10849
  Gene Symbol: NAPEPLD
  Gene Name: N-acyl phosphatidylethanolamine phospholipase D
  Uniprot ID: Q6IQ20
  ENST ID: ENST00000622712
  CDS Start-End: 156-1337

SEQ ID NO: 157384 - DNA, 4972 bp, Homo sapiens; identical to SEQ ID NO: 157375
  Payload ID: 10849
  Gene Symbol: NAPEPLD
  Gene Name: N-acyl phosphatidylethanolamine phospholipase D
  Uniprot ID: Q6IQ20
  ENST ID: ENST00000611100
  CDS Start-End: 439-1620

SEQ ID NO: 157385 - DNA, 1822 bp, Homo sapiens
  Payload ID: 10849
  Gene Symbol: NAPEPLD
  Gene Name: N-acyl phosphatidylethanolamine phospholipase D
  Uniprot ID: Q6IQ20
  ENST ID: ENST00000633783
  CDS Start-End: 299-1480
gaaggaggccaccgctggccctgctgtcagattcgaaggtcataataagggagtgacccggcgacgactcgccccaacgatggcgaggcggcgagagctgaagcgctgcctgcagctgctggcgtcctcggcggagccagcgcggcgggctcgggttaggaagaacccgagctcctgccgcggtcgcccctcccgctacgcggcggcgctttgcgcggggactctgtggccggaagccgcggaactgaggcggcgcgcgctcccggccaccccaagcgcgagttcttcaccaaaggacatggatgaaaatgaaagcaaccagtctctgatgacaagcagccaatatcctaaagaagcagtaagaaaacgtcaaaattcagcacggaattccggagcaagtgattcttctaggttttctaggaaaagcttcaaactggattatagactagaagaagatgtaactaaatccaagaaaggaaaagatgggagatttgtgaatccgtggccaacatggaaaaacccctctattccaaatgttctcagatggctgataatggagaaagatcacagcagtgttccaagttctaaagaggaactagacaaagaactcccagtgcttaagccatattttatcactaaccctgaagaagctggagtgagggaagctggcttaagagtcacatggctgggacatgccacggtaatggtggaaatggatgagctcatatttctcacggatcccatctttagctctcgtgcttcaccatcgcagtacatgggtccaaagcgatttcgtcgttccccgtgcacaataagtgaactccctccaatagatgcggtccttatcagtcacaaccactatgaccatctggactacaattctgtcattgctttgaatgagcgatttggtaatgagttgagatggtttgtgcctttgggtctccttgactggatgcaaaaatgtggctgtgagaatgtgattgagttggactggtgggaggagaattgtgtccccggacatgataaggtcacttttgtctttacaccttcccagcactggtgtaaaaggactctaatggatgacaacaaggtgctatggggcagctggtctgtcttggggccttggaatcgattttttttcgcaggagatactggttattgccctgcttttgaagagataggaaaaagatttggaccttttgaccttgcagctattcccatcggagcttatgaaccgaggtggtttatgaaataccagcatgtagacccagaagaagctgtaaggattcacactgatgtccaaacaaagaaatctatggcaattcactggggaacttttgccttagcaaatgagcattacttagagcctccagtgaagctgaatgaagctctagagagatacggacttaacgctgaagatttttttgtcttgaagcatggagaatcaagatacctaaataatgatgatgaaaacttttaataaatgtgagcacaggcacttttaatgaaaaaggcatcatctaagtttaaaaacaaatgaaaagacttagaaattcatgaatattgtgattattttacatttggaaacaacttctgcaagtttatgttttatgttttgtgtaataacttgcttcctagtatgatcagctcatgtacactatgagagggttcaggggtgggtcatttaaataatgaattggctaatgtggattttaaatttcatatcatgatataagcactgcaatggaaatgtttttactaaaacattatatttttgtggtactagaatttcctgaggtgaaaaaccgatattgaagattca

SEQ ID NO: 157386 - DNA, 658 bp, Homo sapiens; identical to SEQ ID NO: 157377
  Payload ID: 10849
  Gene Symbol: NAPEPLD
  Gene Name: N-acyl phosphatidylethanolamine phospholipase D
  ENST ID: ENST00000633771
  CDS Start-End: 1-431

SEQ ID NO: 157387 - DNA, 565 bp, Homo sapiens; identical to SEQ ID NO: 157378
  Payload ID: 10849
  Gene Symbol: NAPEPLD
  Gene Name: N-acyl phosphatidylethanolamine phospholipase D
  ENST ID: ENST00000633498
  CDS Start-End: 194-565

SEQ ID NO: 157388 - DNA, 2380 bp, Homo sapiens; identical to SEQ ID NO: 157382
  Payload ID: 10849
  Gene Symbol: NAPEPLD
  Gene Name: N-acyl phosphatidylethanolamine phospholipase D
  Uniprot ID: Q6IQ20
  ENST ID: ENST00000632159
  CDS Start-End: 280-1461

SEQ ID NO: 157389 - DNA, 2672 bp, Homo sapiens; identical to SEQ ID NO: 157380
  Payload ID: 10849
  Gene Symbol: NAPEPLD
  Gene Name: N-acyl phosphatidylethanolamine phospholipase D
  Uniprot ID: Q6IQ20
  ENST ID: ENST00000632703
  CDS Start-End: 95-1276

SEQ ID NO: 157390 - DNA, 575 bp, Homo sapiens; identical to SEQ ID NO: 157381
  Payload ID: 10849
  Gene Symbol: NAPEPLD
  Gene Name: N-acyl phosphatidylethanolamine phospholipase D
  ENST ID: ENST00000633315
  CDS Start-End: 559-575

SEQ ID NO: 157391 - DNA, 1900 bp, Homo sapiens
  Payload ID: 10850
  Gene Symbol: NAAA
  Gene Name: N-acylethanolamine acid amidase
  Uniprot ID: Q02083
  ENST ID: ENST00000286733
  CDS Start-End: 103-1182
tccagcgatcgcagcccagccccagctcctcctcctccacggcttacccgggctccgacagcggctgcaggtctccaagttgcggccgctggagcccgagccatgcggaccgcggaccgggaggcgcgcccggggcttccgtccctgctgctgctgctgctggccggggccgggctgtcagccgcctcgcccccagcagcgccgcgcttcaacgtgagcctggactcggtccccgagctgcgctggctgcccgtgctgcggcactacgacttggacttggtgcgcgccgcgatggcgcaagtcatcggggacagagtccccaagtgggtgcacgtgttaatcggaaaagtggtcctggagctggagcgcttcctgccccagcccttcaccggcgagatccgcggcatgtgtgacttcatgaacctcagcctggcggactgccttctggtcaacctggcctacgagtcctccgtgttctgcaccagtattgtggctcaagactccagaggccacatttaccatggtcggaatttggattatccttttgggaatgtcttacgcaagctgacagtggatgtgcaattcttaaagaatgggcagattgcattcacaggaactacttttattggctatgtaggattatggactggccagagcccacacaagtttacagtttctggtgatgaacgagataaaggctggtggtgggagaatgctatcgctgccctgtttcggagacacattcccgtcagctggctgatccgcgctaccctgagtgagtcggaaaacttcgaagcagctgttggcaagttggccaagactccccttattgctgatgtttattacattgttggtggcacgtccccccgggagggggtggtcatcacgaggaacagagatggcccagcagacatttggcctctagatcctttgaatggagcgtggttccgagttgagacaaattacgaccactggaagccagcacccaaggaagatgaccggagaacatctgccatcaaggcccttaatgctacaggacaagcaaacctcagcctggaggcacttttccagattttgtcggtggttccagtttataacaacttcacaatttatactacggtaatgagcgccggtagcccagacaagtacatgactaggatcagaaacccgagtagaaagtaagtcagcagaagagcgagttcgcccgtgctgtgaaagatgattttttaaaaaatgaaattcttgaagagctgcaccttaaaaaataagacaaagtgaaagtattgtattatgttacaaacaatgcaggctccttcctcatttaactttacaaccttgcgaagtgggtccaggagatttggagtttgtggtaaagccagtaatgggcattgtcctgcattcccttcccttcatggtttgcctcgatcctctctaagcttctatcctggcctgaataactcaaagataattggtctcagagatcaagccatatcctcaggccttatttccatcttctcatgattctgccatcatacctttgcttctccgctaatgaaatgagctggcaagacctctgttcattgtgaagtgcttctgaaagagcctaagaaaaaaggctcatctgaaagaaatggagaactctatttcgaaccaagcctgtttgaatgtgtgttagtctgatctttgatcatgtgtttccatgtaatgggagtctcgttttttataatgtttctaacgttttattgaaaaacctatggccctccttctttctcaatagctactttcttactgctttttgaaaataatatgcaaccaaattatttcttaatgtcacataattaagtaataaaatgtcaaaagaaatgttggcaaggagaataaaaaaatttccaagaaactt

SEQ ID NO: 157392 - DNA, 1750 bp, Homo sapiens
  Payload ID: 10850
  Gene Symbol: NAAA
  Gene Name: N-acylethanolamine acid amidase
  ENST ID: ENST00000507187
  CDS Start-End: 35-538
aggtctccaagttgcggccgctggagcccgagccatgcggaccgcggaccgggaggcgcgcccggggcttccgtccctgctgctgctgctgctggccggggccgggctgtcagccgcctcgcccccagcagcgccgcgcttcaacgtgagcctggactcggtccccgagctgcgctggctgcccgtgctgcggcactacgacttggacttggtgcgcgccgcgatggcgcaagtcatcggggacagagtccccaagtgggtgcacgtgttaatcggaaaagtggtcctggagctggagcgcttcctgccccagcccttcaccggcgagatccgcggcatgtgtgacttcatgaacctcagcctggcggactgccttctggtcaacctggcctacgagtcctccgtgttctgcaccagtattgtggctcaagactccagaggccacatttaccatggtcggaatttggattatccttttgggaatgtcttacgcaagctgacagtggatgtgcaattcttaaagaatgggcaggtataatccgtaccatataagataaaaaatcagaaagatttgcaaactcaagttagcagtcatttggatggcctgctaacttaagtgtgttatcagtgtaagacacaaaaaaatcacacccctggaaaaacaaagccagaagagaggtttgcatcaattatgcttataggaaggacggtcatttattatttattattcagtgtctacttaaagaggtcacccagttttccatagggaaatctcttttagagagtgatcaatcatccacttatgcagagtcagctctttcctctgctttcccatgcccaggctgcttctggaatatggaggggctgggtagtgcaataactagaaacacccaactttgggatctgacagtcccaggtttaaatcttgattctatcaattactgtacttcctttgtgaacctgagaaattactcattccctaattttgcagactacagctcatggaggctcataactactttactgcgatagttataaatgttaaatgaagtagtctatgtaaagttgtagccaaataataaatggtccttcattctgcaagtgtgattgacccacaccactttcttgtgtatgatctttaaaaaattatacttagatcttttgtttatagcatggtccctttaaaactataatctagtgtgtgctgttgtcaactgtgtaaacttttagagagacagaattaatcaatgttcattgagtacgcaaagcatgttttgctgtaaaacagaatacagagtgcaaaagccagattttggctgtaaggacaaggactatattccctttgttctttgcatttaggggttgattcacaaatactaaaaactcatttactaactactcagtcatctgcttttacaaacactttttttcataaaaaattcaaacagtacagaaatatttaaagtaaaagtttctcctttccagtcccatttctttactttgccactattaacaatttgatttctagctgaattactttaaaaatgattttaagtggtaacgataatataaatgcataataaattctcaaaggaaatctgctaaatattaagttattactgaatgaaggataatattatttattatttattcatgttttttctccattgttctataatgagctaatactcttaataaagagacaaaggaataaatgcaatgaaaataaattatttcagctgctctgaaa

SEQ ID NO: 157393 - DNA, 534 bp, Homo sapiens
  Payload ID: 10850
  Gene Symbol: NAAA
  Gene Name: N-acylethanolamine acid amidase
  ENST ID: ENST00000513045
  CDS Start-End: 1-418
agataaaggctggtggtgggagaatgctatcgctgccctgtttcggagacacattcccgtcagctggctgatccgcgctaccctgagtgagtcggaaaacttcgaagcagctgttggcaagttggccaagactccccttattgctgatgtttattacattgttggtggcacgtccccccgggagggggtggtcatcacgaggaacagagatggcccagcagacatttggcctctagatcctttgaatggagcgtggttccgagttgagacaaattacgaccactggaagccagcacccaaggaagatgaccggagaacatctgccatcaaggcccttaatgctacaggacaagcaaacctcagcctggaggcacttttccagcttcacaatttatactacggtaatgagcgccggtagcccagacaagtacatgactaggatcagaaacccgagtagaaagtaagtcagcagaagagcgagttcgcccgtgctgtgaaagatgattttttaaaaaatgaaattcttgaagagct

SEQ ID NO: 157394 - DNA, 1425 bp, Homo sapiens
  Payload ID: 10850
  Gene Symbol: NAAA
  Gene Name: N-acylethanolamine acid amidase
  ENST ID: ENST00000505594
  CDS Start-End: 193-951
acgccctaaggatgtagccccgctcgcagtgcacacgcagtcgcacgccgccgacctctgagcgggtcagacgcccttgtgctttttgtttctagggacagagtccccaagtgggtgcacgtgttaatcggaaaagtggtcctggagctggagcgcttcctgccccagcccttcaccggcgagatccgcggcatgtgtgacttcatgaacctcagcctggcggactgccttctggtcaacctggcctacgagtcctccgtgttctgcaccagtattgtggctcaagactccagaggccacatttaccatggtcggaatttggattatccttttgggaatgtcttacgcaagctgacagtggatgtgcaattcttaaagaatgggcagattgcattcacaggaactacttttattggctatgtaggattatggactggccagagcccacacaagtttacagtttctggtgatgaacgagataaaggctggtggtgggagaatgctatcgctgccctgtttcggagacacattcccgtcagctggctgatccgcgctaccctgagtgagtcggaaaacttcgaagcagctgttggcaagttggccaagactccccttattgctgatgtttattacattgttggtggcacgtccccccgggagggggtggtcatcacgaggaacagagatggcccagcagacatttggcctctagatcctttgaatggagcgtggttccgagttgagacaaattacgaccactggaagccagcacccaaggaagatgaccggagaacatctgccatcaaggcccttaatgctacaggacaagcaaacctcagcctggaggcacttttccaggtaacttgtgtcacagtgtcctgcatacctaggatgtttggtgttttgttaatagtgaatatgaaaaactccgtgaaatcttctggtagatgaaaacgttagggtaaaagttttatttggttgaaatcatgtattaaaagtggtggctcacacctgtaatcccagcactttgggaggcctaggcaggcagatcacgaggtcaggagattgagacaatcctggctaacacagtgaaaccctgtctctactaaaaatacaaaaaattagccaggtgtagtggcgggtgcctgtagtccaagctactccagaggctgaggcaggagaatggcgtgtacccggaaggcggagcttgcagtgagccgagattgcgccactgcactccagcctgacagagcgagactccgtctcaaaaaaaaaaaaaattatatgacattttctcaacttgcttttatataagttaaaatgtccatcttcaccaaagtttttctttatattaaaaagaaaaagtcatagttgtaatatatgttcattgtttaaaagaaaaaaagagaaagaattaaaaagtca

SEQ ID NO: 157395 - DNA, 1300 bp, Homo sapiens
  Payload ID: 10850
  Gene Symbol: NAAA
  Gene Name: N-acylethanolamine acid amidase
  Uniprot ID: Q02083
  ENST ID: ENST00000507956
  CDS Start-End: 25-996
gttgcggccgctggagcccgagccatgcggaccgcggaccgggaggcgcgcccggggcttccgtccctgctgctgctgctgctggccggggccgggctgtcagccgcctcgcccccagcagcgccgcgcttcaacgtgagcctggactcggtccccgagctgcgctggctgcccgtgctgcggcactacgacttggacttggtgcgcgccgcgatggcgcaagtcatcggggacagagtccccaagtgggtgcacgtgttaatcggaaaagtggtcctggagctggagcgcttcctgccccagcccttcaccggcgagatccgcggcatgtgtgacttcatgaacctcagcctggcggactgccttctggtcaacctggcctacgagtcctccgtgttctgcaccagtattgtggctcaagactccagaggccacatttaccatggtcggaatttggattatccttttgggaatgtcttacgcaagctgacagtggatgtgcaattcttaaagaatgggcagattgcattcacaggaactacttttattggctatgtaggattatggactggccagagcccacacaagtttacagtttctggtgatgaacgagataaaggctggtggtgggagaatgctatcgctgccctgtttcggagacacattcccgtcagctggctgatccgcgctaccctgagtgagtcggaaaacttcgaagcagctgttggcaagttggccaagactccccttattgctgatgtttattacattgttggtggcacgtccccccgggagggggtggtcatcacgaggaacagagatggcccagcagacatttggcctctagatcctttgaatggagcgtggttccgagttgagacaaattacgaccactggaagccagcacccaaggaagatgaccggagaacatctgccatcaaggcccttaatgctacaggacaagcaaacctcagcctggaggcacttttccagtgaaagcaggccaggtgcggtggctcacgcctgtaatcccagccctttgggaggccaaggcgggtggatcacttgaggtcaggagttcaagaccagcctggccaacatggtgaaacctcgtctctactaaaaatacaaaaatcaaccaggcatgacggtgcacgcctgttatcacagctacttgggaagcagcggctggagaattgcttgaacctgggaagtcgaggctgcaagtgagctgagatcatgccatggcagtctagcctgggcaacagagcgagactctgtttcaaaaaaaaaaagaaaa

SEQ ID NO: 157396 - DNA, 734 bp, Homo sapiens
  Payload ID: 10850
  Gene Symbol: NAAA
  Gene Name: N-acylethanolamine acid amidase
  ENST ID: ENST00000602782
  CDS Start-End: 1-668
gcaccagtattgtggctcaagactccagaggccacatttaccatggtcggaatttggattatccttttgggaatgtcttacgcaagctgacagtggatgtgcaattcttaaagaatgggcagattgcattcacaggaactacttttattggctatgtaggattatggactggccagagcccacacaagtttacagtttctggtgatgaacgagataaaggctggtggtgggagaatgctatcgctgccctgtttcggagacacattcccgtcagctggctgatccgcgctaccctgagtgagtcggaaaacttcgaagcagctgttggcaagttggccaagactccccttattgctgatgtttattacattgttggtggcacgtccccccgggagggggtggtcatcacgaggaacagagatggcccagcagacatttggcctctagatcctttgaatggagcgtggttccgagttgagacaaattacgaccactggaagccagcacccaaggaagatgaccggagaacatctgccatcaaggcccttaatgctacaggacaagcaaacctcagcctggaggcacttttccagattttgtcggtggttccagtttataacaaattatttcccttggctgaattcccagaagtaggattactgagttaacagttatgaatgtttaaatggtttctgaaatggtttggtcaaaataaaattgttagaaattataaa

SEQ ID NO: 157397 - DNA, 2609 bp, Homo sapiens
  Payload ID: 10851
  Gene Symbol: ASAH1
  Gene Name: N-acylsphingosine amidohydrolase (acid ceramidase) 1
  Uniprot ID: Q13510
  ENST ID: ENST00000262097
  CDS Start-End: 313-1500
ggctcggtccgactattgcccgcggtgggggagggggatggatcacgccacgcgccaaaggcgatcgcgactctccttctgcaggtagcctggaaggctctctctctttctctacgccacccttttcgtggcactgaaaagccccgtcctctcctcccagtcccgcctcctccgagcgttccccctactgcctggaatggtgcggtcccaggtcgcgggtcacgcggcggagggggcgtggcctgcccccggcccagccggctcttctttgcctctgctggagtccggggagtggcgttggctgctagagcgatgccgggccggagttgcgtcgccttagtcctcctggctgccgccgtcagctgtgccgtcgcgcagcacgcgccgccgtggacagaggactgcagaaaatcaacctatcctccttcaggaccaacgtacagaggtgcagttccatggtacaccataaatcttgacttaccaccctacaaaagatggcatgaattgatgcttgacaaggcaccagtgctaaaggttatagtgaattctctgaagaatatgataaatacattcgtgccaagtggaaaaattatgcaggtggtggatgaaaaattgcctggcctacttggcaactttcctggcccttttgaagaggaaatgaagggtattgccgctgttactgatatacctttaggagagattatttcattcaatattttttatgaattatttaccatttgtacttcaatagtagcagaagacaaaaaaggtcatctaatacatgggagaaacatggattttggagtatttcttgggtggaacataaataatgatacctgggtcataactgagcaactaaaacctttaacagtgaatttggatttccaaagaaacaacaaaactgtcttcaaggcttcaagctttgctggctatgtgggcatgttaacaggattcaaaccaggactgttcagtcttacactgaatgaacgtttcagtataaatggtggttatctgggtattctagaatggattctgggaaagaaagatgtcatgtggatagggttcctcactagaacagttctggaaaatagcacaagttatgaagaagccaagaatttattgaccaagaccaagatattggccccagcctactttatcctgggaggcaaccagtctggggaaggttgtgtgattacacgagacagaaaggaatcattggatgtatatgaactcgatgctaagcagggtagatggtatgtggtacaaacaaattatgaccgttggaaacatcccttcttccttgatgatcgcagaacgcctgcaaagatgtgtctgaaccgcaccagccaagagaatatctcatttgaaaccatgtatgatgtcctgtcaacaaaacctgtcctcaacaagctgaccgtatacacaaccttgatagatgttaccaaaggtcaattcgaaacttacctgcgggactgccctgacccttgtataggttggtgagcacacgtctggcctacagaatgcggcctctgagacatgaagacaccatctccatgtgaccgaacactgcagctgtctgaccttccaaagactaagactcgcggcaggttctctttgagtcaatagcttgtcttcgtccatctgttgacaaatgacagatcttttttttttccccctatcagttgatttttcttatttacagataacttctttaggggaagtaaaacagtcatctagaattcactgagttttgtttcactttgacatttggggatctggtgggcagtcgaaccatggtgaactccacctccgtggaataaatggagattcagcgtgggtgttgaatccagcacgtctgtgtgagtaacgggacagtaaacactccacattcttcagtttttcacttctacctacatatttgtatgtttttctgtataacagccttttccttctggttctaactgctgttaaaattaatatatcattatctttgctgttattgacagcgatataattttattacatatgattagagggatgagacagacattcacctgtatatttcttttaatgggcacaaaatgggcccttgcctctaaatagcactttttggggttcaagaagtaatcagtatgcaaagcaatcttttatacaataattgaagtgttccctttttcataattactctacttcccagtaaccctaaggaagttgctaacttaaaaaactgcatcccacgttctgttaatttagtaaataaacaagtcaaagacttgtggaaaataggaagtgaacccatattttaaattctcataagtagcattcatgtaataaacaggtttttagtttgttcttcagattgatagggagttttaaagaaattttagtagttactaaaattatgttactgtatttttcagaaatcaaactgcttatgaaaagtactaatagaacttgttaacctttctaaccttcacgattaactgtgaaatgtacgtcatttgtgcaagaccgtttgtccacttcattttgtataatcacagttgtgttcctgacactcaataaacagtcactggaaagagtgccagtcagcagtcatgcacgctgat

SEQ ID NO: 157398 - DNA, 1690 bp, Homo sapiens
  Payload ID: 10851
  Gene Symbol: ASAH1
  Gene Name: N-acylsphingosine amidohydrolase (acid ceramidase) 1
  Uniprot ID: Q13510
  ENST ID: ENST00000314146
  CDS Start-End: 185-1354
gggcaggatttcctgctggactttgaaatccaacccggtcacctacccgcgcgactgtgtccacggatggcacgaaagccaagcgagtccccctgccgagctactcgcgtccgcctcctcccaagctgagctctgctccgcccacctgagtccttcgccagttaggaggaaacacagccgcttaatgaactgctgcatcgggctgggagagaaagctcgcgggtcccaccgggcctcctacccaagtctcagcgcgcttttcaccgaggcctcaattctgggatttggcagctttgctgtgaaagcccaatggacagaggactgcagaaaatcaacctatcctccttcaggaccaactgtcttccctgctgttataaggtacagaggtgcagttccatggtacaccataaatcttgacttaccaccctacaaaagatggcatgaattgatgcttgacaaggcaccagtgcctggcctacttggcaactttcctggcccttttgaagaggaaatgaagggtattgccgctgttactgatatacctttaggagagattatttcattcaatattttttatgaattatttaccatttgtacttcaatagtagcagaagacaaaaaaggtcatctaatacatgggagaaacatggattttggagtatttcttgggtggaacataaataatgatacctgggtcataactgagcaactaaaacctttaacagtgaatttggatttccaaagaaacaacaaaactgtcttcaaggcttcaagctttgctggctatgtgggcatgttaacaggattcaaaccaggactgttcagtcttacactgaatgaacgtttcagtataaatggtggttatctgggtattctagaatggattctgggaaagaaagatgtcatgtggatagggttcctcactagaacagttctggaaaatagcacaagttatgaagaagccaagaatttattgaccaagaccaagatattggccccagcctactttatcctgggaggcaaccagtctggggaaggttgtgtgattacacgagacagaaaggaatcattggatgtatatgaactcgatgctaagcagggtagatggtatgtggtacaaacaaattatgaccgttggaaacatcccttcttccttgatgatcgcagaacgcctgcaaagatgtgtctgaaccgcaccagccaagagaatatctcatttgaaaccatgtatgatgtcctgtcaacaaaacctgtcctcaacaagctgaccgtatacacaaccttgatagatgttaccaaaggtcaattcgaaacttacctgcgggactgccctgacccttgtataggttggtgagcacacgtctggcctacagaatgcggcctctgagacatgaagacaccatctccatgtgaccgaacactgcagctgtctgaccttccaaagactaagactcgcggcaggttctctttgagtcaatagcttgtcttcgtccatctgttgacaaatgacagatcttttttttttccccctatcagttgatttttcttatttacagataacttctttaggggaagtaaaacagtcatctagaattcactgagttttgtttcactttgacatttggggatctggtgggcagtcgaaccatggtgaactccacctccgtggaataaatggagattcagcgtg

SEQ ID NO: 157399 - DNA, 2511 bp, Homo sapiens
  Payload ID: 10851
  Gene Symbol: ASAH1
  Gene Name: N-acylsphingosine amidohydrolase (acid ceramidase) 1
  Uniprot ID: Q13510
  ENST ID: ENST00000381733
  CDS Start-End: 168-1403
ggactttgaaatccaacccggtcacctacccgcgcgactgtgtccacggatggcacgaaagccaagcgagtccccctgccgagctactcgcgtccgcctcctcccaagctgagctctgctccgcccacctgagtccttcgccagttaggaggaaacacagccgcttaatgaactgctgcatcgggctgggagagaaagctcgcgggtcccaccgggcctcctacccaagtctcagcgcgcttttcaccgaggcctcaattctgggatttggcagctttgctgtgaaagcccaatggacagaggactgcagaaaatcaacctatcctccttcaggaccaacgtacagaggtgcagttccatggtacaccataaatcttgacttaccaccctacaaaagatggcatgaattgatgcttgacaaggcaccagtgctaaaggttatagtgaattctctgaagaatatgataaatacattcgtgccaagtggaaaaattatgcaggtggtggatgaaaaattgcctggcctacttggcaactttcctggcccttttgaagaggaaatgaagggtattgccgctgttactgatatacctttaggagagattatttcattcaatattttttatgaattatttaccatttgtacttcaatagtagcagaagacaaaaaaggtcatctaatacatgggagaaacatggattttggagtatttcttgggtggaacataaataatgatacctgggtcataactgagcaactaaaacctttaacagtgaatttggatttccaaagaaacaacaaaactgtcttcaaggcttcaagctttgctggctatgtgggcatgttaacaggattcaaaccaggactgttcagtcttacactgaatgaacgtttcagtataaatggtggttatctgggtattctagaatggattctgggaaagaaagatgtcatgtggatagggttcctcactagaacagttctggaaaatagcacaagttatgaagaagccaagaatttattgaccaagaccaagatattggccccagcctactttatcctgggaggcaaccagtctggggaaggttgtgtgattacacgagacagaaaggaatcattggatgtatatgaactcgatgctaagcagggtagatggtatgtggtacaaacaaattatgaccgttggaaacatcccttcttccttgatgatcgcagaacgcctgcaaagatgtgtctgaaccgcaccagccaagagaatatctcatttgaaaccatgtatgatgtcctgtcaacaaaacctgtcctcaacaagctgaccgtatacacaaccttgatagatgttaccaaaggtcaattcgaaacttacctgcgggactgccctgacccttgtataggttggtgagcacacgtctggcctacagaatgcggcctctgagacatgaagacaccatctccatgtgaccgaacactgcagctgtctgaccttccaaagactaagactcgcggcaggttctctttgagtcaatagcttgtcttcgtccatctgttgacaaatgacagatcttttttttttccccctatcagttgatttttcttatttacagataacttctttaggggaagtaaaacagtcatctagaattcactgagttttgtttcactttgacatttggggatctggtgggcagtcgaaccatggtgaactccacctccgtggaataaatggagattcagcgtgggtgttgaatccagcacgtctgtgtgagtaacgggacagtaaacactccacattcttcagtttttcacttctacctacatatttgtatgtttttctgtataacagccttttccttctggttctaactgctgttaaaattaatatatcattatctttgctgttattgacagcgatataattttattacatatgattagagggatgagacagacattcacctgtatatttcttttaatgggcacaaaatgggcccttgcctctaaatagcactttttggggttcaagaagtaatcagtatgcaaagcaatcttttatacaataattgaagtgttccctttttcataattactctacttcccagtaaccctaaggaagttgctaacttaaaaaactgcatcccacgttctgttaatttagtaaataaacaagtcaaagacttgtggaaaataggaagtgaacccatattttaaattctcataagtagcattcatgtaataaacaggtttttagtttgttcttcagattgatagggagttttaaagaaattttagtagttactaaaattatgttactgtatttttcagaaatcaaactgcttatgaaaagtactaatagaacttgttaacctttctaaccttcacgattaactgtgaaatgtacgtcatttgtgcaagaccgtttgtccacttcattttgtataatcacagttgtgttcctgacactcaataaacagtcactggaaagagtgccagtcagcagtcatgcacgctga

SEQ ID NO: 157400 - DNA, 2507 bp, Homo sapiens
  Payload ID: 10851
  Gene Symbol: ASAH1
  Gene Name: N-acylsphingosine amidohydrolase (acid ceramidase) 1
  ENST ID: ENST00000520781
  CDS Start-End: 313-1425
ggctcggtccgactattgcccgcggtgggggagggggatggatcacgccacgcgccaaaggcgatcgcgactctccttctgcaggtagcctggaaggctctctctctttctctacgccacccttttcgtggcactgaaaagccccgtcctctcctcccagtcccgcctcctccgagcgttccccctactgcctggaatggtgcggtcccaggtcgcgggtcacgcggcggagggggcgtggcctgcccccggcccagccggctcttctttgcctctgctggagtccggggagtggcgttggctgctagagcgatgccgggccggagttgcgtcgccttagtcctcctggctgccgccgtcagctgtgccgtcgcgcagcacgcgccgccgtggacagaggactgcagaaaatcaacctatcctccttcaggaccaacgtacagaggtgcagttccatggtacaccataaatcttgacttaccaccctacaaaagatggcatgaattgatgcttgacaaggcaccagtgctaaaggttatagtgaattctctgaagaatatgataaatacattcgtgccaagtggaaaaattatgcaggtggtggatgaaaaattgcctggcctacttggcaactttcctggcccttttgaagaggaaatgaagggtattgccgctgttactgatatacctttaggtcatctaatacatgggagaaacatggattttggagtatttcttgggtggaacataaataatgatacctgggtcataactgagcaactaaaacctttaacagtgaatttggatttccaaagaaacaacaaaactgtcttcaaggcttcaagctttgctggctatgtgggcatgttaacaggattcaaaccaggactgttcagtcttacactgaatgaacgtttcagtataaatggtggttatctgggtattctagaatggattctgggaaagaaagatgtcatgtggatagggttcctcactagaacagttctggaaaatagcacaagttatgaagaagccaagaatttattgaccaagaccaagatattggccccagcctactttatcctgggaggcaaccagtctggggaaggttgtgtgattacacgagacagaaaggaatcattggatgtatatgaactcgatgctaagcagggtagatggtatgtggtacaaacaaattatgaccgttggaaacatcccttcttccttgatgatcgcagaacgcctgcaaagatgtgtctgaaccgcaccagccaagagaatatctcatttgaaaccatgtatgatgtcctgtcaacaaaacctgtcctcaacaagctgaccgtatacacaaccttgatagatgttaccaaaggtcaattcgaaacttacctgcgggactgccctgacccttgtataggttggtgagcacacgtctggcctacagaatgcggcctctgagacatgaagacaccatctccatgtgaccgaacactgcagctgtctgaccttccaaagactaagactcgcggcaggttctctttgagtcaatagcttgtcttcgtccatctgttgacaaatgacagatcttttttttttccccctatcagttgatttttcttatttacagataacttctttaggggaagtaaaacagtcatctagaattcactgagttttgtttcactttgacatttggggatctggtgggcagtcgaaccatggtgaactccacctccgtggaataaatggagattcagcgtgggtgttgaatccagcacgtctgtgtgagtaacgggacagtaaacactccacattcttcagtttttcacttctacctacatatttgtatgtttttctgtataacagccttttccttctggttctaactgctgttaaaattaatatatcattatctttgctgttattgacagcgatataattttattacatatgattagagggatgagacagacattcacctgtatatttcttttaatgggcacaaaatgggcccttgcctctaaatagcactttttggggttcaagaagtaatcagtatgcaaagcaatcttttatacaataattgaagtgttccctttttcataattactctacttcccagtaaccctaaggaagttgctaacttaaaaaactgcatcccacgttctgttaatttagtaaataaacaagtcaaagacttgtggaaaataggaagtgaacccatattttaaattctcataagtagcattcatgtaataaacaggtttttagtttgttcttcagattgatagggagttttaaagaaattttagtagttactaaaattatgttactgtatttttcagaaatcaaactgcttatgaaaagtactaatagaacttgttaacctttctaaccttcacgattaactgtgaaatgtacgtcatttgtgcaagaccgtttgtccacttcattttgtataatcacagttgtgttcctgacactcaataaacagtcactggaaagag

SEQ ID NO: 157401 - DNA, 2184 bp, Homo sapiens
  Payload ID: 10852
  Gene Symbol: ASAH2
  Gene Name: N-acylsphingosine amidohydrolase (non-lysosomal ceramidase) 2
  ENST ID: ENST00000329428
  CDS Start-End: 1-2181
atgagtgccatcacagtggcccttctcagcctcttgtttatcaccagtgggaccattgaaaaccacaaagatttaggaggccattttttttcaaccacccaaagccctccagccacccagggctccacagctgcccaacgctccacagccacccagcattccacagccacccagagctccacagccactcaaacttctccagtgcctttaaccccagagtctcctctatttcagaacttcagtggctaccatattggtgttggacgagctgactgcacaggacaagtagcagatatcaatttgatgggctatggcaaatccggccagaatgcacagggcatcctcaccaggctatacagtcgtgccttcatcatggcagaacctgatgggtccaatcgaacagtgtttgtcagcatcgacataggcatggtatcacaaaggctcaggctggaggtcctgaacagactgcagagtaaatatggctccctgtacagaagagataatgtcatcctgagtggcactcacactcattcaggtcctgcaggatatttccagtataccgtgtttgtaattgccagtgaaggatttagcaatcaaacttttcagcacatggtcactggtatcttgaagagcattgacatagcacacacaaatatgaaaccaggcaaaatcttcatcaataaaggaaatgtggatggtgtgcagatcaacagaagtccgtattcttaccttcaaaatccgcagtcagagagagcaaggtattcttcaaatacagacaaggaaatgatagttttgaaaatggtagatttgaatggagatgacttgggccttatcagctggtttgccatccacccggtcagcatgaacaacagtaaccatcttgtaaacagtgacaatgtgggctatgcatcttacctgcttgagcaagagaagaacaaaggatatctacctggacaggggccatttgtagcagcctttgcttcatcaaacctaggagatgtgtcccccaacattcttggaccacgttgcatcaacacaggagagtcctgtgataacgccaatagcacttgtcccattggtgggcctagcatgtgcattgctaagggacctggacaggatatgtttgacagcacacaaattataggacgggccatgtatcagagagcaaagtcaaaaacatgtaaaccagcattgggctacagttttgcagctggcactattgatggagttggaggcctcaattttacacaggggaaaacagaaggggatccattttgggacaccattcgggaccagatcctgggaaagccatctgaagaaattaaagaatgtcataaaccaaagcccatccttcttcacaccggagaactatcaaaacctcacccctggcatccagacattgttgatgttcagattattacccttgggtccttggccataactgccatccccggggagtttacgaccatgtctggacgaagacttcgagaggcagttcaagcagaatttgcatctcatgggatgcagaacatgactgttgttatttcaggtctatgcaacgtctatacacattacattaccacttatgaagaataccaggctcagcgatatgaggcagcatcgacaatttatggaccgcacacattatctgcttacattcagctcttcagaaaccttgctaaggctattgctacggacacggtagccaacctgagcagaggtccagaacctccctttttcaaacaattaatagttccattaattcctagtattgtggatagagcaccaaaaggcagaactttcggggatgtcctgcagccagcaaaacctgaatacagagtgggggaagttgctgaagttatatttgtaggtgctaacccgaagaattcagtacaaaaccagacccatcagaccttcctcactgtggagaaatatgaggctacttcaacatcgtggcagatagtgtgtaatgatgcctcctgggagactcgtttttattggcacaagggactcctgggtctgagtaatgcaacagtggaatggcatattccagacactgcccagcctggaatctacagaataagatattttggacacaatcggaagcaggacattctgaagcctgctgtcatactttcatttgaaggcacttccccggcttttgaagttgtaactatttagtga

SEQ ID NO: 157402 - DNA, 6880 bp, Homo sapiens
  Payload ID: 10852
  Gene Symbol: ASAH2
  Gene Name: N-acylsphingosine amidohydrolase (non-lysosomal ceramidase) 2
  Uniprot ID: Q9NR71
  ENST ID: ENST00000395526
  CDS Start-End: 1-2343
atggccaaacgcaccttctctaacttggagacattcctgattttcctccttgtaatgatgagtgccatcacagtggcccttctcagcctcttgtttatcaccagtgggaccattgaaaaccacaaagatttaggaggccattttttttcaaccacccaaagccctccagccacccagggctccacagctgcccaacgctccacagccacccagcattccacagccacccagagctccacagccactcaaacttctccagtgcctttaaccccagagtctcctctatttcagaacttcagtggctaccatattggtgttggacgagctgactgcacaggacaagtagcagatatcaatttgatgggctatggcaaatccggccagaatgcacagggcatcctcaccaggctatacagtcgtgccttcatcatggcagaacctgatgggtccaatcgaacagtgtttgtcagcatcgacataggcatggtatcacaaaggctcaggctggaggtcctgaacagactgcagagtaaatatggctccctgtacagaagagataatgtcatcctgagtggcactcacactcattcaggtcctgcaggatatttccagtataccgtgtttgtaattgccagtgaaggatttagcaatcaaacttttcagcacatggtcactggtatcttgaagagcattgacatagcacacacaaatatgaaaccaggcaaaatcttcatcaataaaggaaatgtggatggtgtgcagatcaacagaagtccgtattcttaccttcaaaatccgcagtcagagagagcaaggtattcttcaaatacagacaaggaaatgatagttttgaaaatggtagatttgaatggagatgacttgggccttatcagctggtttgccatccacccggtcagcatgaacaacagtaaccatcttgtaaacagtgacaatgtgggctatgcatcttacctgcttgagcaagagaagaacaaaggatatctacctggacaggggccatttgtagcagcctttgcttcatcaaacctaggagatgtgtcccccaacattcttggaccacgttgcatcaacacaggagagtcctgtgataacgccaatagcacttgtcccattggtgggcctagcatgtgcattgctaagggacctggacaggatatgtttgacagcacacaaattataggacgggccatgtatcagagagcaaaggaactctatgcctctgcctcccaggaggtaacaggaccactggcttcagcacaccagtgggtggatatgacagatgtgactgtctggctcaattccacacatgcatcaaaaacatgtaaaccagcattgggctacagttttgcagctggcactattgatggagttggaggcctcaattttacacaggggaaaacagaaggggatccattttgggacaccattcgggaccagatcctgggaaagccatctgaagaaattaaagaatgtcataaaccaaagcccatccttcttcacaccggagaactatcaaaacctcacccctggcatccagacattgttgatgttcagattattacccttgggtccttggccataactgccatccccggggagtttacgaccatgtctggacgaagacttcgagaggcagttcaagcagaatttgcatctcatgggatgcagaacatgactgttgttatttcaggtctatgcaacgtctatacacattacattaccacttatgaagaataccaggctcagcgatatgaggcagcatcgacaatttatggaccgcacacattatctgcttacattcagctcttcagaaaccttgctaaggctattgctacggacacggtagccaacctgagcagaggtccagaacctccctttttcaaacaattaatagttccattaattcctagtattgtggatagagcaccaaaaggcagaactttcggggatgtcctgcagccagcaaaacctgaatacagagtgggggaagttgctgaagttatatttgtaggtgctaacccgaagaattcagtacaaaaccagacccatcagaccttcctcactgtggagaaatatgaggctacttcaacatcgtggcagatagtgtgtaatgatgcctcctgggagactcgtttttattggcacaagggactcctgggtctgagtaatgcaacagtggaatggcatattccagacactgcccagcctggaatctacagaataagatattttggacacaatcggaagcaggacattctgaagcctgctgtcatactttcatttgaaggcacttccccggcttttgaagttgtaactatttagtgaaaagttgatagatcatttaaagaacagctttactctctacacattatataagtgatttcaaatgaatgtgaactagtgaactaccatgttgacttctataatcgtccctgtttggggacagatagtttactgctaatggggtggaggggtgtgtgtgtgtgtgtgtgtgtgtgtgtgtgtgtgtgtgtgtgtgagagagagagagagagagagagagagagagagaggtttgtcccatatatcttgctccagcagccatatatcttgtggtctacagcctaaagcatgatttcccttgaagtcttggggttgtttaaaggagagtcccttcaatataaaacctctgaaatattagtgagaatggctcactaatgtgaacaatgtttaaattatttatttatatatagaattactgaatattagtactgggaaaatttatagaaatcatctagtcttacccttcatcttacatataagaaaaatggtcttttcttctaatcacatttacaaaatatgatataaaccttgaccatgaatgtatgagcctaattagagaaacagaaaatcagcatgtcagttttccttcattcaaaataacatagtctttctaagcagtcattctggagttaacatgcctagttcagagccgctgtggatgctcaaatcatttctggaattgccttcaggacacaattatgagaaagtcagacttccaatattttgatcatgccttgtgttttcctaagtgtccttatcccactggattgtgtctcttactcccaagacttattccaaatgattttttgactcttttcattaatcaaattcaccccaaaccagaaagttttgccattagtgtagatattaaaaatattactggctgggaaagcactcctcaaagcagaggttctaaattaatttatctgttcttttaccatttgctcactcactcactcatggacccattcaatcatagaatatttaagatttatatgcccagaattataatagtgcctaggccttgataattagtgaatttgtacttggggtgaatgtgtaagtgtcaaaaggtaactattatgaaggagaaaataatcgatttaatatgtaaattctggggaagcatttaaaaaatcagtaatcttcaagttatatcttgtgtatcatctgtgttggatactctaatttggggggaaagaggctccagacagtttgctaaatactattttgaaagttatttttgggcattgtaaaataccttgcttcataccccaaagaataagatatgacagtctgacatcgattgtctgaaagtactaattgcatttaaaattctttaagttaactacaacctcccagactgcaaagcaaatttccaaaccccaggtcatacttttgtatgtatgtaaaagctttagcattttagggaaaaaaatcaatctgtattttaaaaataaactttgaggtttgaaaataataacaatattcataatggtagtattaacatctattatgtataacttaatctcaacataatttattgaattagaatgaacctggaacactttttgatgaattggtatcctagaggctgtttccttgggcattaactgctggaggattaggtaatcagggattccaagtgttgtgatcttttttctgatgatgccacagtcttcagtgtaaaagttcagaagcctaaaagaacaagtgatcctgaaagtagctgattccagacaagaaaattatattagaacttatgatatggttttttaaagtatttgttattactcagaagggttcatgaatcagtttccactacctctattccttctattgaagctttcctcaaatctacttgtgattcctgatagctcactggcaactgtaccaaggtggccactgtatcatctactgatcctactgcacctagcactcttggctccagataacgcacagaaacctattttctcaccagctgtcatttcttctagggcatgcagttctatgttcgcagttcatgtgtaaaaataaaaccaaattcctggattatcaatatcagttctttacctgtgcataaaagaatatcatgaagtaattgaacttatctgttgatataaaaacacagatccaattcatgtctgtggatgctgcagggactggctcactggagccaaaccatgtggcagaaactcctgaaattggtggaaaaagtggaatatggcagattgggtaggtaggagaacaattttggagattttgtttctcatgttaaaatgtctgcattttatttgctgtaccctgcctactctggttttaaggattttttgacttctttgaaaagcactgaataatctcttttccaggtctagattttttgatgagtactgtgtaaaattgtcaatattcaatggattatttaataataaattaagaattacactcataaaagtattgtctaatgaaaggtaatgtagacaaacgaacacttttttaaaaaaagaggtggaacaaaaggtggtagattacatgtaagttaggttggaaagtgatacaaatgacttgtaaataaccactgaagcacaagggaaccacttctttatcagttcctttctaacttctgaagatgtactgctggtaaaacacatgtatggttgacaattcttttattttctttctcttttttactagttgggcaaaaaaatttcctaggcaggtagctaactatgaaattgtttcatgcgctaattctgaacaaaaagaccaagaatgaatttacttatgaatgtccttttctaatgtgccctcttatgcttctcctccaatgtaagcaagcttactgtctttttctaagattagcgcatggattctatctttagccaaaaggtttcatcactagatgaacttctcatgtgtttagttcttccaaatgatgctcttgcttcctgggtatccaacctgacttgctggtttatattggcttccaaaattttagagtgatagggtatcggagagggaaatttgcacattccttatgcaatttgttagtatgcattcagctgtaactcagaaaatattcctgatcaacatccatccaaacactaaagacatttataacctcacatagcagtaagtcttgaagtgataaattcaggtttggtgcagccactcagtggctcttcttaatatattgacttaattcttaggcttatcctcttagctaaaagatcgctacctcaagtctacatataattgaatgcagcagcaaaatgggaggagagagttctctttataatccccttttagaaggtggaaaatagtaagaacacaagttgaattttccttctatttctttgttcagaactgtgccacacagctactcttacctgcaagggaagctggaaaaaagaatatttagtattttgtgcttctagagagtgaggcaagttctgatagtaagaaagaagagatagccgaagtagctgtcataaaattatgttagtcaagacagattagttatgctacaacattagagatttatttcttgatctcatgacctgtccattggggttagctgaaggatctgttccacatctcatttgagttcacaggctgacagagacttccattctaaacattcttccattgtgagggaacaggaacaggtgcttccatgattagggggaagggacagggagaatcatgcaatagttcgtgaagcttccacattactgtgcatttttcactgggcaggtgacagaaccaggatatttgcaagcagccctaaaggttaccacagtgggcaagcaataatatctgcatatccaaattaactgctctttgaaataattagaactcgttttactctagaaaatatattttggaaaagaacacacattggaataatgacgaaaaaaattgctttctgtattgcaaaatgtatacgttactttaacagatttatatcaagcacctatatactttatggcagaaattatgctaaatcctaagaatgaaacaataatgaaggcaaagctattccctgccaaaaggaacttagcgtttaacgaacaaagcaaacagatgaacaggtaattactgtacagagtgacccatattgttattgttcagggaattagagagggcacctaatatggtcttggggatgtttcagtaagtttcctggaagaaataacatataagctaagacttaaaagacatgtagaaattagctagaagaaaggcaatggtgtgtgcatgtatgtgtgtattagtgtgtgtttgtgtttgtgtactgggcaaatagactattccatgtagagggaatattgagtactttatcaagactatagttagagtataaggaaagagttgacagtgaggcagcaccaaactttaccttcataaatagcaatttggttttatacttgtattagcatttttcccccttgagactcttcccctataacatcaatgtccttgaatgtatttgccatttgctctaataataaaatacactttctataaccaaaaa

SEQ ID NO: 157403 - DNA, 2311 bp, Homo sapiens
  Payload ID: 10852
  Gene Symbol: ASAH2
  Gene Name: N-acylsphingosine amidohydrolase (non-lysosomal ceramidase) 2
  Uniprot ID: Q9NR71
  ENST ID: ENST00000447815
  CDS Start-End: 1-2238
atggccaaacgcaccttctctaacttggagacattcctgattttcctccttgtaatgatgagtgccatcacagtggcccttctcagcctcttgtttatcaccagtgggaccattgaaaaccacaaagatttaggaggccattttttttcaaccacccaaagccctccagccacccagggctccacagctgcccaacgctccacagccacccagcattccacagccacccagagctccacagccactcaaacttctccagtgcctttaaccccagagtctcctctatttcagaacttcagtggctaccatattggtgttggacgagctgactgcacaggacaagtagcagatatcaatttgatgggctatggcaaatccggccagaatgcacagggcatcctcaccaggctatacagtcgtgccttcatcatggcagaacctgatgggtccaatcgaacagtgtttgtcagcatcgacataggcatggtatcacaaaggctcaggctggaggtcctgaacagactgcagagtaaatatggctccctgtacagaagagataatgtcatcctgagtggcactcacactcattcaggtcctgcaggatatttccagtataccgtgtttgtaattgccagtgaaggatttagcaatcaaacttttcagcacatggtcactggtatcttgaagagcattgacatagcacacacaaatatgaaaccaggcaaaatcttcatcaataaaggaaatgtggatggtgtgcagatcaacagaagtccgtattcttaccttcaaaatccgcagtcagagagagcaaggtattcttcaaatacagacaaggaaatgatagttttgaaaatggtagatttgaatggagatgacttgggccttatcagctggtttgccatccacccggtcagcatgaacaacagtaaccatcttgtaaacagtgacaatgtgggctatgcatcttacctgcttgagcaagagaagaacaaaggatatctacctggacaggggccatttgtagcagcctttgcttcatcaaacctaggagatgtgtcccccaacattcttggaccacgttgcatcaacacaggagagtcctgtgataacgccaatagcacttgtcccattggtgggcctagcatgtgcattgctaagggacctggacaggatatgtttgacagcacacaaattataggacgggccatgtatcagagagcaaagtcaaaaacatgtaaaccagcattgggctacagttttgcagctggcactattgatggagttggaggcctcaattttacacaggggaaaacagaaggggatccattttgggacaccattcgggaccagatcctgggaaagccatctgaagaaattaaagaatgtcataaaccaaagcccatccttcttcacaccggagaactatcaaaacctcacccctggcatccagacattgttgatgttcagattattacccttgggtccttggccataactgccatccccggggagtttacgaccatgtctggacgaagacttcgagaggcagttcaagcagaatttgcatctcatgggatgcagaacatgactgttgttatttcaggtctatgcaacgtctatacacattacattaccacttatgaagaataccaggctcagcgatatgaggcagcatcgacaatttatggaccgcacacattatctgcttacattcagctcttcagaaaccttgctaaggctattgctacggacacggtagccaacctgagcagaggtccagaacctccctttttcaaacaattaatagttccattaattcctagtattgtggatagagcaccaaaaggcagaactttcggggatgtcctgcagccagcaaaacctgaatacagagtgggggaagttgctgaagttatatttgtaggtgctaacccgaagaattcagtacaaaaccagacccatcagaccttcctcactgtggagaaatatgaggctacttcaacatcgtggcagatagtgtgtaatgatgcctcctgggagactcgtttttattggcacaagggactcctgggtctgagtaatgcaacagtggaatggcatattccagacactgcccagcctggaatctacagaataagatattttggacacaatcggaagcaggacattctgaagcctgctgtcatactttcatttgaaggcacttccccggcttttgaagttgtaactatttagtgaaaagttgatagatcatttaaagaacagctttactctctacacattatataagtgatttcaaatgaatgtg

SEQ ID NO: 157404 - DNA, 1942 bp, Homo sapiens
  Payload ID: 10852
  Gene Symbol: ASAH2
  Gene Name: N-acylsphingosine amidohydrolase (non-lysosomal ceramidase) 2
  ENST ID: ENST00000443575
  CDS Start-End: 1-1869
atggactctgagaaatcttctgagtggcggagtgatgtcctgaacagactgcagagtaaatatggctccctgtacagaagagataatgtcatcctgagtggcactcacactcattcaggtcctgcaggatatttccagtataccgtgtttgtaattgccagtgaaggatttagcaatcaaacttttcagcacatggtcactggtatcttgaagagcattgacatagcacacacaaatatgaaaccaggcaaaatcttcatcaataaaggaaatgtggatggtgtgcagatcaacagaagtccgtattcttaccttcaaaatccgcagtcagagagagcaaggtattcttcaaatacagacaaggaaatgatagttttgaaaatggtagatttgaatggagatgacttgggccttatcagctggtttgccatccacccggtcagcatgaacaacagtaaccatcttgtaaacagtgacaatgtgggctatgcatcttacctgcttgagcaagagaagaacaaaggatatctacctggacaggggccatttgtagcagcctttgcttcatcaaacctaggagatgtgtcccccaacattcttggaccacgttgcatcaacacaggagagtcctgtgataacgccaatagcacttgtcccattggtgggcctagcatgtgcattgctaagggacctggacaggatatgtttgacagcacacaaattataggacgggccatgtatcagagagcaaaggaactctatgcctctgcctcccaggaggtaacaggaccactggcttcagcacaccagtgggtggatatgacagatgtgactgtctggctcaattccacacatgcatcaaaaacatgtaaaccagcattgggctacagttttgcagctggcactattgatggagttggaggcctcaattttacacaggggaaaacagaaggggatccattttgggacaccattcgggaccagatcctgggaaagccatctgaagaaattaaagaatgtcataaaccaaagcccatccttcttcacaccggagaactatcaaaacctcacccctggcatccagacattgttgatgttcagattattacccttgggtccttggccataactgccatccccggggagtttacgaccatgtctggacgaagacttcgagaggcagttcaagcagaatttgcatctcatgggatgcagaacatgactgttgttatttcaggtctatgcaacgtctatacacattacattaccacttatgaagaataccaggctcagcgatatgaggcagcatcgacaatttatggaccgcacacattatctgcttacattcagctcttcagaaaccttgctaaggctattgctacggacacggtagccaacctgagcagaggtccagaacctccctttttcaaacaattaatagttccattaattcctagtattgtggatagagcaccaaaaggcagaactttcggggatgtcctgcagccagcaaaacctgaatacagagtgggggaagttgctgaagttatatttgtaggtgctaacccgaagaattcagtacaaaaccagacccatcagaccttcctcactgtggagaaatatgaggctacttcaacatcgtggcagatagtgtgtaatgatgcctcctgggagactcgtttttattggcacaagggactcctgggtctgagtaatgcaacagtggaatggcatattccagacactgcccagcctggaatctacagaataagatattttggacacaatcggaagcaggacattctgaagcctgctgtcatactttcatttgaaggcacttccccggcttttgaagttgtaactatttagtgaaaagttgatagatcatttaaagaacagctttactctctacacattatataagtgatttcaaatgaatgtg

SEQ ID NO: 157405 - DNA, 555 bp, Homo sapiens
  Payload ID: 10852
  Gene Symbol: ASAH2
  Gene Name: N-acylsphingosine amidohydrolase (non-lysosomal ceramidase) 2
  ENST ID: ENST00000474434
  CDS Start-End: 1-156
gctcagcgatatgaggcagcatcgacaatttatggaccgcacacattatctgcttacattcagctcttcagaaaccttgctaaggctattgctacggaacttcacttgtggaaatcttccctttggatgcagttgtttatgaagctgcaactgtgatgtcagaaggacacggtagccaacctgagcagaggtccagaacctccctttttcaaacaattaatagttccattaattcctagtattgtggatagagcaccaaaaggcagaactttcggggatgtcctgcagccagcaaaacctgaatacagagtgggggaagttgctgaagttatatttgtaggtgctaacccgaagaattcagtacaaaaccagacccatcagaccttcctcactgtggagaaatatgaggctacttcaacatcgtggcagatagtgtgtaatgatgcctcctgggagactcgtttttattggcacaagggactcctgggtctgagtaatgcaacagtggaatggcatattccagacactgcccagcctggaatctacagaataaga

SEQ ID NO: 157406 - DNA, 539 bp, Homo sapiens
  Payload ID: 10852
  Gene Symbol: ASAH2
  Gene Name: N-acylsphingosine amidohydrolase (non-lysosomal ceramidase) 2
  ENST ID: ENST00000489640
  CDS Start-End: 1-435
gctcagcgatatgaggcagcatcgacaatttatggaccgcacacattatctgcttacattcagctcttcagaaaccttgctaaggctattgctacgggggaagttgctgaagttatatttgtaggtgctaacccgaagaattcagtacaaaaccagacccatcagaccttcctcactgtggagaaatatgaggctacttcaacatcgtggcagatagtgtgtaatgatgcctcctgggagactcgtttttattggcacaagggactcctgggtctgagtaatgcaacagtggaatggcatattccagacactgcccagcctggaatctacagaataagatattttggacacaatcggaagcaggacattctgaagcctgctgtcatactttcatttgaaggcacttccccggcttttgaagttgtaactatttagtgaaaagttgatagatcatttaaagaacagctttactctctacacattatataagtgatttcaaatgaatgtgaactagtgaactaccatgttgacttctataa

SEQ ID NO: 157407 - DNA, 632 bp, Homo sapiens
  Payload ID: 10853
  Gene Symbol: ASAH2B
  Gene Name: N-acylsphingosine amidohydrolase (non-lysosomal ceramidase) 2B
  Uniprot ID: P0C7U1
  ENST ID: ENST00000374006
  CDS Start-End: 66-563
gtggaagcggacctgaggagtcgcaattgtgaacaggttcggtgctgcggctggggctcagcgatatgaggcagcatcgacaatttatggaccgcacgcattatctgcttacattcagctcttcagaaaccttgctaaggctattgctacgtattgtggatagagcaccaaaaggcagaactttcggggatgtcctgcagccagcaaaacctgaatacagagtgggggaagttgctgaagttatatttgtaggtgctaacccgaagaattcagtacaaaaccagacccatcagaccttcctcactgtggagaaatatgaggctacttcaacatcgtggcagatagtgtgtaatgatgcctcctgggagactcgtttttattggcacaagggactcctgggtctgagtaatgcaacagtggaatggcatattccagacactgcccagcctggaatctacagaataagatattttggacacaatcggaagcaggacattctgaagcctgctgtcatactttcatttgaaggcacttccccggcttttgaagttgtaactatttagtgaaaagttgatagatcatttaaagaacagctttactctctacacattatataagtgatttcaaatgaa

SEQ ID NO: 157408 - DNA, 3715 bp, Homo sapiens
  Payload ID: 10853
  Gene Symbol: ASAH2B
  Gene Name: N-acylsphingosine amidohydrolase (non-lysosomal ceramidase) 2B
  Uniprot ID: P0C7U1
  ENST ID: ENST00000374007
  CDS Start-End: 785-1267
taattttcttcctttcttttttttcctgcgagacggtgggcgggggtatctccctaagttgcccaggctggtcttgaactcctgggctcaagcgatcctcccgcctcagcctcccaaagggctgggattacaggcatgagccaccgcttcctgccaaaagagggctttagggcacccccagaacctgagatctccctcatctgtcatctttaaagagaaggaagtcgactcccagtcgagccatagtccatttgtcccgggcacggtgactccggggtggccaggaccaaatgtgtctccttctggcttttgcaccgcaccaactaatccgcggcaggccgcacagctgccctggccttcgcggaggactaaggcgagggcggtgtacgctgctccggagtcccaccgcgggagttgaggcagcggattccgagggcagggtggggcggaatcgggagggatgcggacccggtggaacgcactgcgcagacggcgccggcgcccgcacacagctgttgactagtcttccagctctcccctggaagtcgtccaggcgccggtctcttttttctgcctttttgtttccctccccgcgagtcggcgcgacggtgaatttccgtttccggcggtgtggaagcggacctgaggagtcgcaattgtgaacaggttcggtgctgcggctggggctcagcgatatgaggcagcatcgacaatttatggaccgcacgcattatctgcttacattcagctcttcagaaaccttgctaaggctattgctacggacatggtagccaacctgagcagaggtccagaacctccctttttcaaacaattaatagttccattaattcctagtattgtggatagagcaccaaaaggcagaactttcggggatgtcctgcagccagcaaaacctgaatacagagtgggggaagttgctgaagttatatttgtaggtgctaacccgaagaattcagtacaaaaccagacccatcagaccttcctcactgtggagaaatatgaggctacttcaacatcgtggcagatagtgtgtaatgatgcctcctgggagactcgtttttattggcacaagggactcctgggtctgagtaatgcaacagtggaatggcatattccagacactgcccagcctggaatctacagaataagatattttggacacaatcggaagcaggacattctgaagcctgctgtcatactttcatttgaaggcacttccccggcttttgaagttgtaactatttagtgaaaagttgatagatcatttaaagaacagctttactctctacacattatataagtgatttcaaatgaatgtgaactagtgaactaccatgttgacttctataatcgtccctgtttggggacagatagtttactgctaatggggtggaggggtgtgtgtgtgtgtgtgtgtgtgtgtgtgtgtgtgtgtgtgtgtgtatgtgagagagagagagagagagagaggtttgtcccatatatcttgttccagcagccatatatcttgtggtctacagcctaaagcatgatttcccttgaagtcttggggttgtttaaaggagagtcccttcaatataaaacctctgaaatattagtgagaatggctcactaatgtgaacaatgtttaaattatttatttatatatagaattactgaatattagtactgggaaaatttatagaaatcatctagtcttacccttcatcttacatataagaaaaatggtcttttcttctaatcacatttacaaaatatgatataaaccttgaccatgaatgtatgagcctaattagagaaacagaaaatcagcatgtcagttttccttcattcaaaataacatagtctttctaagcagtcattctggagttaacatgcctagttcagagccgctgtggatgctcaaatcatttctggaattgccttcaggacacaattatgagaaagtcagacttccaatattttgatcatgccttgtgtcttcctaagtgtccttatcccactggattgtgtctcttactcccaagacttattccaaatgattttttgactcttttcattaatcaaattcaccccaaaccagaaagttttgccattagcgtagatattaaaaatattactggctgggaaagcactcctcaaagcagaggttctaaattaatttatctgttcttttaccatttgctcactcactcactcatggacccattcaatcatagaatatttaagatttatatgcccagaattataatagtgcctaggccttgataattagtgaatttgtacttggggtgaatgtgtaagtgtcaaaaggtaactattatgaaggagaaaataatcgatttaatatgtaaattctggggaggcatttaaaaaatcagtaatcttcaagttatatcttgtgtatcatctgtgttggatactctaatttggggggaaagaggctccagacagtttgctaaatactattttgaaagttatttttgggcattgtaaaataccttgcttcataccccaaagaataagatatgacaatctgacatcgattgtctgaaagtactaattgcatttaaaattctttaagttaactacaacctcccagactgcaaagcaaatttccaaaccccaggtcatacttttgtatgtatgtaaaagctttagcattttagggaaaaaaatcaatctgtatttcaaaaataaactttgaggtttgaaaataataacaatattcataatggtagtattaacatctattatgtataacttaatctcaacataatttattgaattagaatgaacctggaacactttttgatgaattggtatcctagaggctgtttccttgggccttaactgctggaggattaggtaatcagggattccaagtgttgtgatcttttttctgatgacgccacagtcttcagtgtaaaagttcagaagcctaaaagaacaagtgatcctgaaagtagctgattccagacaagaaaattatattagaactcatgatatggttttttaaagtatttgttattactcagaagggttcatgaatcagtttccactacctctattccttctattgaagctttcctcaaatctacttgtgattcctgatagctcactggcaactgtaccaaggtggccactgtatcatctactgatccttctgcacctagcactcttggctccagataacgcacagaaacctattttctcaccagctgtcatttcttctagggcatgcagttctatgttcacagttcatgtgtaaaaataaaaccaaattcctggattatcaatatcagttctttacctgtgcataaaagaatatcatgaagtaattgaacttatctgttgatataaaaacacagatccaattcgtgtctgtggatgctgcaaggactggctcactggagccaaaccatgtggcggaaactcctgaaattggtggaaaaagtggaatatggcagattgggtaggtaggagaacaattttggagattttgtttctcatgttaaagtgtctgcattttatttgctgtaccctgcctactctggttttaaggattttttgacttcttcgaaaagcactgaataatctctttgccgggtctagattttttgatgagtactgtgtaaaattgtcaatattcaatggattatttaataataaattaagaattacactcataaaa

SEQ ID NO: 157409 - DNA, 1722 bp, Homo sapiens
  Payload ID: 10854
  Gene Symbol: NADK
  Gene Name: NAD kinase
  ENST ID: ENST00000342348
  CDS Start-End: 45-1289
agagcttaggcttctagtgtgggcgcacagtcaggaccataccgatggggcggccgcgtgttcgccaagcgtggcctggatgctgtggacacactggccggctcccagcaggcaggggctacctcgcgagccacatgtgtgacccggcaggtgctgagctcataggggatggcatgagtgaccccacgcctcccagtaatgcctgcacagggcacattcaggaccccgcgagccagcggctgacgtggaacaagtccccaaagagcgtccttgtcatcaagaagatgagagatgccagcctactgcagccgttcaaggagctctgcacgcacctcatggaggagaacatgatcgtgtatgtggaaaagaaagtgctagaagaccctgccatcgccagcgatgaaagctttggggcagtgaagaagaaattctgtacctttcgagaagattatgatgacatttccaatcagatagacttcatcatctgcctggggggagacgggacgctgctgtacgcttcctcgcttttccagggcagcgtccctccggtcatggccttccacctgggctccctgggcttcctgaccccattcagctttgagaactttcagtcccaagttactcaggtgatagaggggaacgcagctgttgttctccggagtcggctgaaggtcagggtggtgaaggagctccgggggaagaagacggccgtgcacaatgggctgggtgagaacggctcgcaggctgcaggcctggacatggatgtcgggaagcaggccatgcagtaccaggtcctgaatgaggtggtgattgacagaggcccctcctcctacctgtccaatgtggatgtctacctggacggacacctcatcaccacggtgcagggcgacggagtgatcgtgtccaccccgacgggcagcacggcgtatgcggccgcggccggggcctccatgatccaccccaacgtgccggccatcatgatcacgcccatctgcccccactcgctgtccttccggcccatcgtggtccccgcaggggtcgagctgaagatcatgctgtcacctgaagcaaggaacacagcatgggtgtcctttgatggacggaagagacaagagatccgccatggagacagcatcagcatcactacctcatgctacccgctcccctccatctgtgtgcgggaccccgtgagcgactggtttgagagcctcgcccagtgcctgcattggaacgtccggaagaagcaagcccacttcgaggaggaggaggaggaggaggaggagggctaggtcaagcccctatccaggcccgaatccttccgctgccctccaagcgccctctggggacagaccaatctgcgtgtgtctgtgaccgcctgtctcagtggcacggccacttcctttctgtagctgggttagagcctgggtctgccttttgtccagatcagctgtttttttaaaatgtctgactttttttgcatttctaaagaagcgtgagaaatgggctgggagtgcttctgtcctgctgacaccccgcggtgggtccctggagcgcggcctccagctgccgcaatttccatgccaggatatttttccgcaaatcagtcggttgaaattcagaggagtcagaatgactcgacctgtccttcaatgttgataataaatgtctcagccaaaaaccttccttgagctgccatgcttttccccttgacctgcacctctt

SEQ ID NO: 157410 - DNA, 3235 bp, Homo sapiens
  Payload ID: 10854
  Gene Symbol: NADK
  Gene Name: NAD kinase
  Uniprot ID: O95544
  ENST ID: ENST00000341426
  CDS Start-End: 223-1563
agtgggcgggcgcggcgcattgctgctcggcggcgccggcgccggggtccgggcggccatggggcaacaggcggccagggcgccaagggccaggtagcgacggctggcggcggcgcggcggcggggcctgcgggctcggtccggcatgtagacgcccccgcaggcgcccgcggcagcgaacggcatcagtgtttttctgaccgaagttctcatttcctgacaatggaaatggaacaagaaaaaatgaccatgaataaggaattgagtccagacgcggctgcttactgctgctcggcctgccacggcgatgagacctggagttacaaccaccccatccggggccgggccaagtctcgcagcctgtctgcctcgcccgccctggggagcaccaaggagttcaggaggacacgctctcttcatgggccatgcccggtgaccacttttggaccaaaggcctgtgtgctgcagaacccccagaccatcatgcacattcaggaccccgcgagccagcggctgacgtggaacaagtccccaaagagcgtccttgtcatcaagaagatgagagatgccagcctactgcagccgttcaaggagctctgcacgcacctcatggaggagaacatgatcgtgtatgtggaaaagaaagtgctagaagaccctgccatcgccagcgatgaaagctttggggcagtgaagaagaaattctgtacctttcgagaagattatgatgacatttccaatcagatagacttcatcatctgcctggggggagacgggacgctgctgtacgcttcctcgcttttccagggcagcgtccctccggtcatggccttccacctgggctccctgggcttcctgaccccattcagctttgagaactttcagtcccaagttactcaggtgatagaggggaacgcagctgttgttctccggagtcggctgaaggtcagggtggtgaaggagctccgggggaagaagacggccgtgcacaatgggctgggtgagaacggctcgcaggctgcaggcctggacatggatgtcgggaagcaggccatgcagtaccaggtcctgaatgaggtggtgattgacagaggcccctcctcctacctgtccaatgtggatgtctacctggacggacacctcatcaccacggtgcagggcgacggagtgatcgtgtccaccccgacgggcagcacggcgtatgcggccgcggccggggcctccatgatccaccccaacgtgccggccatcatgatcacgcccatctgcccccactcgctgtccttccggcccatcgtggtccccgcaggggtcgagctgaagatcatgctgtcacctgaagcaaggaacacagcatgggtgtcctttgatggacggaagagacaagagatccgccatggagacagcatcagcatcactacctcatgctacccgctcccctccatctgtgtgcgggaccccgtgagcgactggtttgagagcctcgcccagtgcctgcattggaacgtccggaagaagcaagcccacttcgaggaggaggaggaggaggaggaggagggctaggtcaagcccctatccaggcccgaatccttccgctgccctccaagcgccctctggggacagaccaatctgcgtgtgtctgtgaccgcctgtctcagtggcacggccacttcctttctgtagctgggttagagcctgggtctgccttttgtccagatcagctgtttttttaaaatgtctgactttttttgcatttctaaagaagcgtgagaaatgggctgggagtgcttctgtcctgctgacaccccgcggtgggtccctggagcgcggcctccagctgccgcaatttccatgccaggatatttttccgcaaatcagtcggttgaaattcagaggagtcagaatgactcgacctgtccttcaatgttgataataaatgtctcagccaaaaaccttccttgagctgccatgcttttccccttgacctgcacctcttcccctaaaacttctgcagggaagcccctggcggaggcgccattgaaagcatggtcttgccagtggctggcaaggcggttttgttctgctcagtttctggagagggttggatgcgtcccctgccatccagccctccccgcttgaggccagcactgagtctgggacactcagcgggaagggggctggcatcgccagcgacccacacattcctcacgtagcttctgctcccaggaaggtagtttaaatcctgtatatactttttagagactcttttaaactttctgaagtgctgatgtacatactttctcgtacacacttttgtgaagatttcaaggggaagggagtcgtctgccattcaatgtttacatttatgttctgcaagacgctgtcctcagggaccattaggggaccattctgttcagtgcgatcctgatggtccgggagatgagggtttccggggctagtgatcgtgatcccttttatttgcaactgtaatgagaatttttcacactaacacagcgagggactcaacacgctgattctcctcctgcctctcccgtgagtctccagcctgcccagcaccggcagctgtggagcacgtggatgctgcctaccccggcgcccgcgtcttccacgggcacaggtgtgtggaggccgtggtcggaccctggtgtcctggttactgctgcccgggtgtcttttttttgagtaactgctctctgagttttgcacacgaagttgccctcatctgctggagatcgataaggaaggcacaagacgttctcctctgcccgtgaggagcttcccgcagccgcctggcccagcctgggcacgttctccgaggcatgtgtctccctgctcaccctcgtctgggcacctcagcatctgtggacttgagcgtccaaaaaccctgagtgtgattctgggcagccggcctggcttgaagtccgccatgaccctgggcacaggggaagcccagccgtgggcttaggagagagggaccagcgcccagcgttagggctggaagacggcagtgttcagaattccagccgctcatctgaacacagaaggtgtgaactgacctctaaagcagcgtgagatgggaatgatctagaaaactttggatttttgaagtaaattttaatgtttcatattaatttcttgaaaatgtattaaatgtcattgaaagccttattacgcttttcagatcctttcaataaacaagacttgtagaaaataa

SEQ ID NO: 157411 - DNA, 3098 bp, Homo sapiens
  Payload ID: 10854
  Gene Symbol: NADK
  Gene Name: NAD kinase
  Uniprot ID: O95544
  ENST ID: ENST00000341991
  CDS Start-End: 86-1426
gtagacgtggcgggcggacccgggggcgccctccggacgcggcaggcatcagtgtttttctgaccgaagttctcatttcctgacaatggaaatggaacaagaaaaaatgaccatgaataaggaattgagtccagacgcggctgcttactgctgctcggcctgccacggcgatgagacctggagttacaaccaccccatccggggccgggccaagtctcgcagcctgtctgcctcgcccgccctggggagcaccaaggagttcaggaggacacgctctcttcatgggccatgcccggtgaccacttttggaccaaaggcctgtgtgctgcagaacccccagaccatcatgcacattcaggaccccgcgagccagcggctgacgtggaacaagtccccaaagagcgtccttgtcatcaagaagatgagagatgccagcctactgcagccgttcaaggagctctgcacgcacctcatggaggagaacatgatcgtgtatgtggaaaagaaagtgctagaagaccctgccatcgccagcgatgaaagctttggggcagtgaagaagaaattctgtacctttcgagaagattatgatgacatttccaatcagatagacttcatcatctgcctggggggagacgggacgctgctgtacgcttcctcgcttttccagggcagcgtccctccggtcatggccttccacctgggctccctgggcttcctgaccccattcagctttgagaactttcagtcccaagttactcaggtgatagaggggaacgcagctgttgttctccggagtcggctgaaggtcagggtggtgaaggagctccgggggaagaagacggccgtgcacaatgggctgggtgagaacggctcgcaggctgcaggcctggacatggatgtcgggaagcaggccatgcagtaccaggtcctgaatgaggtggtgattgacagaggcccctcctcctacctgtccaatgtggatgtctacctggacggacacctcatcaccacggtgcagggcgacggagtgatcgtgtccaccccgacgggcagcacggcgtatgcggccgcggccggggcctccatgatccaccccaacgtgccggccatcatgatcacgcccatctgcccccactcgctgtccttccggcccatcgtggtccccgcaggggtcgagctgaagatcatgctgtcacctgaagcaaggaacacagcatgggtgtcctttgatggacggaagagacaagagatccgccatggagacagcatcagcatcactacctcatgctacccgctcccctccatctgtgtgcgggaccccgtgagcgactggtttgagagcctcgcccagtgcctgcattggaacgtccggaagaagcaagcccacttcgaggaggaggaggaggaggaggaggagggctaggtcaagcccctatccaggcccgaatccttccgctgccctccaagcgccctctggggacagaccaatctgcgtgtgtctgtgaccgcctgtctcagtggcacggccacttcctttctgtagctgggttagagcctgggtctgccttttgtccagatcagctgtttttttaaaatgtctgactttttttgcatttctaaagaagcgtgagaaatgggctgggagtgcttctgtcctgctgacaccccgcggtgggtccctggagcgcggcctccagctgccgcaatttccatgccaggatatttttccgcaaatcagtcggttgaaattcagaggagtcagaatgactcgacctgtccttcaatgttgataataaatgtctcagccaaaaaccttccttgagctgccatgcttttccccttgacctgcacctcttcccctaaaacttctgcagggaagcccctggcggaggcgccattgaaagcatggtcttgccagtggctggcaaggcggttttgttctgctcagtttctggagagggttggatgcgtcccctgccatccagccctccccgcttgaggccagcactgagtctgggacactcagcgggaagggggctggcatcgccagcgacccacacattcctcacgtagcttctgctcccaggaaggtagtttaaatcctgtatatactttttagagactcttttaaactttctgaagtgctgatgtacatactttctcgtacacacttttgtgaagatttcaaggggaagggagtcgtctgccattcaatgtttacatttatgttctgcaagacgctgtcctcagggaccattaggggaccattctgttcagtgcgatcctgatggtccgggagatgagggtttccggggctagtgatcgtgatcccttttatttgcaactgtaatgagaatttttcacactaacacagcgagggactcaacacgctgattctcctcctgcctctcccgtgagtctccagcctgcccagcaccggcagctgtggagcacgtggatgctgcctaccccggcgcccgcgtcttccacgggcacaggtgtgtggaggccgtggtcggaccctggtgtcctggttactgctgcccgggtgtcttttttttgagtaactgctctctgagttttgcacacgaagttgccctcatctgctggagatcgataaggaaggcacaagacgttctcctctgcccgtgaggagcttcccgcagccgcctggcccagcctgggcacgttctccgaggcatgtgtctccctgctcaccctcgtctgggcacctcagcatctgtggacttgagcgtccaaaaaccctgagtgtgattctgggcagccggcctggcttgaagtccgccatgaccctgggcacaggggaagcccagccgtgggcttaggagagagggaccagcgcccagcgttagggctggaagacggcagtgttcagaattccagccgctcatctgaacacagaaggtgtgaactgacctctaaagcagcgtgagatgggaatgatctagaaaactttggatttttgaagtaaattttaatgtttcatattaatttcttgaaaatgtattaaatgtcattgaaagccttattacgcttttcagatcctttcaataaacaagacttgtagaaaataa

SEQ ID NO: 157412 - DNA, 3653 bp, Homo sapiens
  Payload ID: 10854
  Gene Symbol: NADK
  Gene Name: NAD kinase
  Uniprot ID: O95544
  ENST ID: ENST00000378625
  CDS Start-End: 206-1981
aaatcccccaagttctcatgatccttgcttccctttccagtcacccttggtgccctgtacttcactgtggtcctgaactgaagagctgtgtttttcaggaagacttggccaggccgtgttccgtgtctctggattcaagtcccaggagtcctgaccagagagcaggcatcagtgtttttctgaccgaagttctcatttcctgacaatggaaatggaacaagaaaaaatgaccatgaataaggaattgagtccagacgcggctgcttactgctgctcggcctgccacggcgatgagacctggagttacaaccaccccatccggggccgggccaagtctcgcagcctgtctgcctcgcccgccctggggagcaccaaggagttcaggaggacacgctctcttcatgggccatgcccggtgaccacttttggaccaaaggcctgtgtgctgcagaacccccagaccatcatagccactcctttgtcactcgcatctcagctgctgccttcaccagccgtcagtcactcgggccagggcggggtcaccggacaggtgcatgttctgcctcagccctcagaccagggcgtactcagtggtccccgagctgcccgaggccagacagccccgcaggaggaagcggtgacccaggaagaggtcgaggcgctggtttgtggtcacacacagcggtgggtgcctgggccggtgtacgacgccgctgctggtggctctggctgggctcagctgagcctcagggctggaatgggtgtaggccaggccactgggcacattcaggaccccgcgagccagcggctgacgtggaacaagtccccaaagagcgtccttgtcatcaagaagatgagagatgccagcctactgcagccgttcaaggagctctgcacgcacctcatggaggcacgcggggcaggggggaagggggcctggggtgcacatggagttgggggggcctccatccacatcaccgccccgagggtggggtctgcaggtggaatgagcaggttggcactttgcttccaggagaacatgatcgtgtatgtggaaaagaaagtgctagaagaccctgccatcgccagcgatgaaagctttggggcagtgaagaagaaattctgtacctttcgagaagattatgatgacatttccaatcagatagacttcatcatctgcctggggggagacgggacgctgctgtacgcttcctcgcttttccagggcagcgtccctccggtcatggccttccacctgggctccctgggcttcctgaccccattcagctttgagaactttcagtcccaagttactcaggtgatagaggggaacgcagctgttgttctccggagtcggctgaaggtcagggtggtgaaggagctccgggggaagaagacggccgtgcacaatgggctgggtgagaacggctcgcaggctgcaggcctggacatggatgtcgggaagcaggccatgcagtaccaggtcctgaatgaggtggtgattgacagaggcccctcctcctacctgtccaatgtggatgtctacctggacggacacctcatcaccacggtgcagggcgacggagtgatcgtgtccaccccgacgggcagcacggcgtatgcggccgcggccggggcctccatgatccaccccaacgtgccggccatcatgatcacgcccatctgcccccactcgctgtccttccggcccatcgtggtccccgcaggggtcgagctgaagatcatgctgtcacctgaagcaaggaacacagcatgggtgtcctttgatggacggaagagacaagagatccgccatggagacagcatcagcatcactacctcatgctacccgctcccctccatctgtgtgcgggaccccgtgagcgactggtttgagagcctcgcccagtgcctgcattggaacgtccggaagaagcaagcccacttcgaggaggaggaggaggaggaggaggagggctaggtcaagcccctatccaggcccgaatccttccgctgccctccaagcgccctctggggacagaccaatctgcgtgtgtctgtgaccgcctgtctcagtggcacggccacttcctttctgtagctgggttagagcctgggtctgccttttgtccagatcagctgtttttttaaaatgtctgactttttttgcatttctaaagaagcgtgagaaatgggctgggagtgcttctgtcctgctgacaccccgcggtgggtccctggagcgcggcctccagctgccgcaatttccatgccaggatatttttccgcaaatcagtcggttgaaattcagaggagtcagaatgactcgacctgtccttcaatgttgataataaatgtctcagccaaaaaccttccttgagctgccatgcttttccccttgacctgcacctcttcccctaaaacttctgcagggaagcccctggcggaggcgccattgaaagcatggtcttgccagtggctggcaaggcggttttgttctgctcagtttctggagagggttggatgcgtcccctgccatccagccctccccgcttgaggccagcactgagtctgggacactcagcgggaagggggctggcatcgccagcgacccacacattcctcacgtagcttctgctcccaggaaggtagtttaaatcctgtatatactttttagagactcttttaaactttctgaagtgctgatgtacatactttctcgtacacacttttgtgaagatttcaaggggaagggagtcgtctgccattcaatgtttacatttatgttctgcaagacgctgtcctcagggaccattaggggaccattctgttcagtgcgatcctgatggtccgggagatgagggtttccggggctagtgatcgtgatcccttttatttgcaactgtaatgagaatttttcacactaacacagcgagggactcaacacgctgattctcctcctgcctctcccgtgagtctccagcctgcccagcaccggcagctgtggagcacgtggatgctgcctaccccggcgcccgcgtcttccacgggcacaggtgtgtggaggccgtggtcggaccctggtgtcctggttactgctgcccgggtgtcttttttttgagtaactgctctctgagttttgcacacgaagttgccctcatctgctggagatcgataaggaaggcacaagacgttctcctctgcccgtgaggagcttcccgcagccgcctggcccagcctgggcacgttctccgaggcatgtgtctccctgctcaccctcgtctgggcacctcagcatctgtggacttgagcgtccaaaaaccctgagtgtgattctgggcagccggcctggcttgaagtccgccatgaccctgggcacaggggaagcccagccgtgggcttaggagagagggaccagcgcccagcgttagggctggaagacggcagtgttcagaattccagccgctcatctgaacacagaaggtgtgaactgacctctaaagcagcgtgagatgggaatgatctagaaaactttggatttttgaagtaaattttaatgtttcatattaatttcttgaaaatgtattaaatgtcattgaaagccttattacgcttttcagatcctttcaataaacaagacttgtagaaaataa

SEQ ID NO: 157413 - DNA, 890 bp, Homo sapiens
  Payload ID: 10854
  Gene Symbol: NADK
  Gene Name: NAD kinase
  ENST ID: ENST00000469045
  CDS Start-End: 1-133
gtccccaaagagcgtccttgtcatcaagaagatgagagatgccagcctactgcagccgttcaaggagctctgcacgcacctcatggagaagagcaggcgtgggggttgcggcgcccaggaaagccactcctgaaataacagccttagtcaattcctgagagggagccccctccgcccagtcatctcttaaaggagaacatgatcgtgtatgtggaaaagaaagtgctagaagaccctgccatcgccagcgatgaaagctttggggcagtgaagaagaaattctgtacctttcgagaagattatgatgacatttccaatcagatagacttcatcatctgcctggggggagacgggacgctgctgtacgcttcctcgcttttccagggcagcgtccctccggtcatggccttccacctgggctccctgggcttcctgaccccattcagctttgagaactttcagtcccaagttactcaggtgatagaggggaacgcagctgttgttctccggagtcggctgaaggtcagggtggtgaaggagctccgggggaagaagacggccgtgcacaatgggctgggtgagaacggctcgcaggctgcaggcctggacatggatgtcgggaagcaggccatgcagtaccaggtcctgaatgaggtggtgattgacagaggcccctcctcctacctgtccaatgtggatgtctacctggacggacacctcatcaccacggtgcagggcgacggagtgatcgtgtccaccccgacgggcagcacggcgtatgcggccgcggccggggcctccatgatccaccccaacgtgccggccatcatgatcacgcccatctgcccccactcgctgtccttccggcccatcgtggtccccgcaggggt

SEQ ID NO: 157414 - DNA, 475 bp, Homo sapiens
  Payload ID: 10854
  Gene Symbol: NADK
  Gene Name: NAD kinase
  ENST ID: ENST00000489538
  CDS Start-End: 1-225
gagaacatgatcgtgtatgtggaaaagaaagtgctagaagaccctgccatcgccagcgatgaaagctttggggcagtgaagaagaaattctgtacctttcgagaagattatgatgacatttccaatcagatagacttcatcatctgcctggggggagacgggacgctgctgtacgcttcctcgcttttccagggaacgcagctgttgttctccggagtcggctgaaggtcagggtggtgaaggagctccgggggaagaagacggccgtgcacaatgggctgggtgagaacggctcgcaggctgcaggcctggacatggatgtcgggaagcaggccatgcagtaccaggtcctgaatgaggtggtgattgacagaggcccctcctcctacctgtccaatgtggatgtctacctggacggacacctcatcaccacggtgcagggcgacggagtgatcgtgtccaccccgacgggcag

SEQ ID NO: 157415 - DNA, 683 bp, Homo sapiens
  Payload ID: 10854
  Gene Symbol: NADK
  Gene Name: NAD kinase
  ENST ID: ENST00000497186
  CDS Start-End: 1-93
gccagcctactgcagccgttcaaggagctctgcacgcacctcatggagaagagcaggcgtgggggttgcggcgcccaggaaagccactcctgaaataacagccttagtcaattcctgagagggagccccctccgcccagtcatctcttaaaggtcctgcttcctcctggcgcgttggtgatgaagtttcagcgagaacatgatcgtgtatgtggaaaagaaagtgctagaagaccctgccatcgccagcgatgaaagctttggggcagtgaagaagaaattctgtacctttcgagaagattatgatgacatttccaatcagatagacttcatcatctgcctggggggagacgggacgctgctgtacgcttcctcgcttttccagggcagcgtccctccggtcatggccttccacctgggctccctgggcttcctgaccccattcagctttgagaactttcagtcccaagttactcaggtgatagaggggaacgcagctgttgttctccggagtcggctgaaggtcagggtggtgaaggagctccgggggaagaagacggccgtgcacaatgggctgggtgagaacggctcgcaggctgcaggcctggacatggatgtcgggaagcaggccatgcagtaccaggtcctgaatgaggtggtgattgacagaggcccctcctccta

SEQ ID NO: 157416 - DNA, 269 bp, Homo sapiens
  Payload ID: 10854
  Gene Symbol: NADK
  Gene Name: NAD kinase
  ENST ID: ENST00000498806
  CDS Start-End: 1-117
gtcctgaatgaggtggtgattgacagaggcccctcctcctacctgtccaatgtggatgtctacctggacggacacctcatcaccacggtgcagggcgacgatcatgctgtcacctgaagcaaggaacacagcatgggtgtcctttgatggacggaagagacaagagatccgccatggagacagcatcagcatcactacctcatgctacccgctcccctccatctgtgtgcgggaccccgtgagcgactggtttgagagcctcgcccagt

SEQ ID NO: 157417 - DNA, 2507 bp, Homo sapiens
  Payload ID: 10855
  Gene Symbol: NADK2
  Gene Name: NAD kinase 2, mitochondrial
  Uniprot ID: Q4G0N4
  ENST ID: ENST00000282512
  CDS Start-End: 237-1076
ggtgcggggaggtcgcccccgggcggcgaagcagccattatgcaggccttgcattgaaaggctctagttacagtggacttcttgaacgacatcatattcacaccaaaaatgtagaacatattatagatagtttacggaatgagggaattgaggttcgtctagtaaagaggagagaatatgatgaagagactgttcgatgggcagatgctgtcatagctgcaggaggtgatggcacaatgctgctggcagcgagtaaagtcttggacagacttaaaccagttataggggtaaacactgatccagaacggtctgagggtcatttatgcctgcccgttcgatatacacattcctttccagaagccttacagaagttctatcgtggtgagttcaggtggttgtggaggcagagaatcaggttataccttgaagggactggcataaaccctgtacctgtggaccttcacgagcagcagctaagcttgaatcagcacaatagagcccttaacattgaaagagctcatgatgaaaggtctgaggcttcaggaccccaacttctgccagtgagagcactaaatgaagtcttcattggggagagtctgtcatccagggcttcctactatgagatttcagttgatgatggtccatgggaaaaacagaagagttcagggctcaatttgtgtactggaacaggatcaaaggcctggtcattcaatattaacagggttgcaactcaggctgtagaagatgttttaaatattgcaaaacgacaaggaaatttgagtcttccattgaacagagaattggtagagaaagtaacaaatgaatataatgaatcactgctctacagtccggaagaaccaaaaatacttttcagtattcgagaaccaatagcaaatagagttttctcaagcagtcgtcagcgttgtttctcctcaaaggtttgtgttcgttctcgttgttgggatgcctgtatggttgtggatggaggaacttcttttgagtttaatgatggtgcaattgcttcgatgatgatcaataaagaagatgagcttcgaactgtgcttcttgaacagtgaaggatttcctcatgacaaattttgattactggcgagaatatttttacttcagaaacagactaccagtcgtaaagtgacattttttggttattgttgagactgcttgcccgtgggctcagaagtgagatttgcattattcttctgttggattctgatagaaaaaaagacattcactgtataagaaaatggatggactgaaccaattagaattgataccagtgaaatttttatattgcttacaattggtaaccaagagtgctgatacctttttaaatttagaggggcaggcttaaataaaggactaaatatttaggatttgaaacttaactgtataagtgtgttttccttccctttcctcctaattgtgggattgtcagaactgaacacatatcatttgattagtgcatattttttatagtacctgaaaaccaagattttgaaaaaattttcaagacagagaattttgataaatcctgacattgacctaattgacataggtaaatatgtttgtatatgtgctaataattttctaatttcggaacacgatgatgttatgactattgatttaaaaatttcaaataataatttttgaaattatagatgaatgctttcatttgagtttcattctgtaattcagcagttctgggtgaaatacagatagcaaaacaaatcatgatgctgttacaaatgtattagttatccaataagtgttttaagtcaatttttttaaaatgatatgagtcttacaggtttcttccatctttaaaatgctcaaacatggattcagggactaaaaggatgaactgattagacattttctattaggagtttggtaaaatattgtaaaaatatcttcacctgtgttaggagtattatcagaaagaatggattctttaataaatatgtaaaacacagtagttttggaattgccttccttagtattgtggttttcacctagcttatattccaagatttacagaatagcttttaggataagatgttaggactttttttttttccccatgagaattcctttatttttggaggaaattattatctaattattgatctacttataagtaatcctagaatttttgccaaaagatcctgtcgttgcataatcaaacagttggtattctcgtgccgttgttcaaagtcatgtgtttctttcatttggtgctgaaaatttctgttcaatcattgacaaatatttattgaacacccactctgtgccatgtaaaactatgtcaggtgctggatatgttgatgaatgaaacagactctatccttatacaatttgagtcttgtgggctcagaagtaaattctgtgaaagctggacggatagtcgaattgagtgctcttagttttgccaatatttaacatgttgttcttatcaattttttaaaataaatgttaatgtacaaagttaa

SEQ ID NO: 157418 - DNA, 2243 bp, Homo sapiens
  Payload ID: 10855
  Gene Symbol: NADK2
  Gene Name: NAD kinase 2, mitochondrial
  Uniprot ID: Q4G0N4
  ENST ID: ENST00000381937
  CDS Start-End: 1-1329
atgacttgctaccgaggcttcttgctgggcagctgttgtcgcgtggcgggcggccgggcggcggcgctgcggggaccgggtgcgggaggccccgccgcgcggccccggctgggcggtgacggtggcggccggcggcacctggggcaggggcagccgcgcgagctggcgggctgtggcagccgcgcggacggcggcttccgcccctcccgggtggtggtggtggccaaaaccacccggtacgagttcgagcagcagcggtaccgttacgcggagctctcggaggaggacctgaagcagctgcttgcattgaaaggctctagttacagtggacttcttgaacgacatcatattcacaccaaaaatgtagaacatattatagatagtttacggaatgagggaattgaggttcgtctagtaaagaggagagaatatgatgaagagactgttcgatgggcagatgctgtcatagctgcaggaggtgatggcacaatgctgctggcagcgagtaaagtcttggacagacttaaaccagttataggggtaaacactgatccagaacggtctgagggtcatttatgcctgcccgttcgatatacacattcctttccagaagccttacagaagttctatcgtggtgagttcaggtggttgtggaggcagagaatcaggttataccttgaagggactggcataaaccctgtacctgtggaccttcacgagcagcagctaagcttgaatcagcacaatagagcccttaacattgaaagagctcatgatgaaaggtctgaggcttcaggaccccaacttctgccagtgagagcactaaatgaagtcttcattggggagagtctgtcatccagggcttcctactatgagatttcagttgatgatggtccatgggaaaaacagaagagttcagggctcaatttgtgtactggaacaggatcaaaggcctggtcattcaatattaacagggttgcaactcaggctgtagaagatgttttaaatattgcaaaacgacaaggaaatttgagtcttccattgaacagagaattggtagagaaagtaacaaatgaatataatgaatcactgctctacagtccggaagaaccaaaaatacttttcagtattcgagaaccaatagcaaatagagttttctcaagcagtcgtcagcgttgtttctcctcaaaggtttgtgttcgttctcgttgttgggatgcctgtatggttgtggatggaggaacttcttttgagtttaatgatggtgcaattgcttcgatgatgatcaataaagaagatgagcttcgaactgtgcttcttgaacagtgaaggatttcctcatgacaaattttgattactggcgagaatatttttacttcagaaacagactaccagtcgtaaagtgacattttttggttattgttgagactgcttgcccgtgggctcagaagtgagatttgcattattcttctgttggattctgatagaaaaaaagacattcactgtataagaaaatggatggactgaaccaattagaattgataccagtgaaatttttatattgcttacaattggtaaccaagagtgctgatacctttttaaatttagaggggcaggcttaaataaaggactaaatatttaggatttgaaacttaactgtataagtgtgttttccttccctttcctcctaattgtgggattgtcagaactgaacacatatcatttgattagtgcatattttttatagtacctgaaaaccaagattttgaaaaaattttcaagacagagaattttgataaatcctgacattgacctaattgacataggtaaatatgtttgtatatgtgctaataattttctaatttcggaacacgatgatgttatgactattgatttaaaaatttcaaataataatttttgaaattatagatgaatgctttcatttgagtttcattctgtaattcagcagttctgggtgaaatacagatagcaaaacaaatcatgatgctgttacaaatgtattagttatccaataagtgttttaagtcaatttttttaaaatgatatgagtcttacaggtttcttccatctttaaaatgctcaaacatggattcagggactaaaaggatgaactgattagacattttctattaggagtttggtaaaatattgtaaaaatatcttcacctgtgttaggagtattatcagaaagaatggattctttaataaatatgtaaaacaca

SEQ ID NO: 157419 - DNA, 3614 bp, Homo sapiens
  Payload ID: 10855
  Gene Symbol: NADK2
  Gene Name: NAD kinase 2, mitochondrial
  Uniprot ID: Q4G0N4
  ENST ID: ENST00000397338
  CDS Start-End: 223-1062
agatgccggtcctgcctctctcgcggcccccagcttgcattgaaaggctctagttacagtggacttcttgaacgacatcatattcacaccaaaaatgtagaacatattatagatagtttacggaatgagggaattgaggttcgtctagtaaagaggagagaatatgatgaagagactgttcgatgggcagatgctgtcatagctgcaggaggtgatggcacaatgctgctggcagcgagtaaagtcttggacagacttaaaccagttataggggtaaacactgatccagaacggtctgagggtcatttatgcctgcccgttcgatatacacattcctttccagaagccttacagaagttctatcgtggtgagttcaggtggttgtggaggcagagaatcaggttataccttgaagggactggcataaaccctgtacctgtggaccttcacgagcagcagctaagcttgaatcagcacaatagagcccttaacattgaaagagctcatgatgaaaggtctgaggcttcaggaccccaacttctgccagtgagagcactaaatgaagtcttcattggggagagtctgtcatccagggcttcctactatgagatttcagttgatgatggtccatgggaaaaacagaagagttcagggctcaatttgtgtactggaacaggatcaaaggcctggtcattcaatattaacagggttgcaactcaggctgtagaagatgttttaaatattgcaaaacgacaaggaaatttgagtcttccattgaacagagaattggtagagaaagtaacaaatgaatataatgaatcactgctctacagtccggaagaaccaaaaatacttttcagtattcgagaaccaatagcaaatagagttttctcaagcagtcgtcagcgttgtttctcctcaaaggtttgtgttcgttctcgttgttgggatgcctgtatggttgtggatggaggaacttcttttgagtttaatgatggtgcaattgcttcgatgatgatcaataaagaagatgagcttcgaactgtgcttcttgaacagtgaaggatttcctcatgacaaattttgattactggcgagaatatttttacttcagaaacagactaccagtcgtaaagtgacattttttggttattgttgagactgcttgcccgtgggctcagaagtgagatttgcattattcttctgttggattctgatagaaaaaaagacattcactgtataagaaaatggatggactgaaccaattagaattgataccagtgaaatttttatattgcttacaattggtaaccaagagtgctgatacctttttaaatttagaggggcaggcttaaataaaggactaaatatttaggatttgaaacttaactgtataagtgtgttttccttccctttcctcctaattgtgggattgtcagaactgaacacatatcatttgattagtgcatattttttatagtacctgaaaaccaagattttgaaaaaattttcaagacagagaattttgataaatcctgacattgacctaattgacataggtaaatatgtttgtatatgtgctaataattttctaatttcggaacacgatgatgttatgactattgatttaaaaatttcaaataataatttttgaaattatagatgaatgctttcatttgagtttcattctgtaattcagcagttctgggtgaaatacagatagcaaaacaaatcatgatgctgttacaaatgtattagttatccaataagtgttttaagtcaatttttttaaaatgatatgagtcttacaggtttcttccatctttaaaatgctcaaacatggattcagggactaaaaggatgaactgattagacattttctattaggagtttggtaaaatattgtaaaaatatcttcacctgtgttaggagtattatcagaaagaatggattctttaataaatatgtaaaacacagtagttttggaattgccttccttagtattgtggttttcacctagcttatattccaagatttacagaatagcttttaggataagatgttaggactttttttttttccccatgagaattcctttatttttggaggaaattattatctaattattgatctacttataagtaatcctagaatttttgccaaaagatcctgtcgttgcataatcaaacagttggtattctcgtgccgttgttcaaagtcatgtgtttctttcatttggtgctgaaaatttctgttcaatcattgacaaatatttattgaacacccactctgtgccatgtaaaactatgtcaggtgctggatatgttgatgaatgaaacagactctatccttatacaatttgagtcttgtgggctcagaagtaaattctgtgaaagctggacggatagtcgaattgagtgctcttagttttgccaatatttaacatgttgttcttatcaattttttaaaataaatgttaatgtacaaagttaatctaggttttgatgtatatccagagaatcaatttttcttaaagtatctgcgtagacattcatagcaaagaatttatgacatatcagatagaaatacattaaaatgtagtgttttcccagagattgatctggctttttttttttgatatacataagataccactttataaagaagctccatactatagaacctcccctaacaggcttaaaataccttctttttttttttttttttttttgagaacggagtcttgctttgtcacccaggctggactgcagtggcatgatctcggctctgcaacctccatctcccaggttcaagcgattctcctgcctcagcctcccaagtagctgggattacaggcaggcaccactatgcctggctaattttttgtatttttagtagatatggggattcaccatgttggtcaggctggtctcgaactcctgaccttgtgatctgcctgcctcggcctcccagtattgggattacaggcatgagccaccatgcccggccttaaaatgccttcttaaaggaaaaatgccaactccatccttaatctcaaggaaatctgattgtccaaatagatctgttaatatgtaacatattaataggtaacttgctgtgtaaaattataagccatattttaaaaggttttaaaaatacttattgtgctccatttgtgatataatttctaacatttctgctctgtgatgggggtttatttgtaagaataagaggcaaaggaatgttagcatagcaaaaatgtgtttgaatgagttaaccttttaatcgcaaccctatgtgaataaaattactccactgttacctcttctttttaacatttcttatttccctctcaaggggtcattatttgaaaactagttttcacaaaatgttatgtttcagaagtgtttccccactgctgtgtattattattctgtgccctgttgacttcattcactgttaacatttgacatagaatgattagttattaaatcagggtgaagtgcttacctggtcagtgtaggctcttcagataattttgacttaatatttttgatactccttgtgcatttacattcatggcccctgtacattaaatcatattacatgtttta

SEQ ID NO: 157420 - DNA, 1233 bp, Homo sapiens
  Payload ID: 10855
  Gene Symbol: NADK2
  Gene Name: NAD kinase 2, mitochondrial
  Uniprot ID: Q4G0N4
  ENST ID: ENST00000514504
  CDS Start-End: 1-1233
atgacttgctaccgaggcttcttgctgggcagctgttgtcgcgtggcgggcggccgggcggcggcgctgcggggaccgggtgcgggaggccccgccgcgcggccccggctgggcggtgacggtggcggccggcggcacctggggcaggggcagccgcgcgagctggcgggctgtggcagccgcgcggacggcggcttccgcccctcccgggtggtggtggtggccaaaaccacccggtacgagttcgagcagcagcggtaccgttacgcggagctctcggaggaggacctgaagcagctgcttgcattgaaaggctctagttacagtggacttcttgaacgacatcatattcacaccaaaaatgtagaacatattatagatagtttacggaatgagggaattgaggttcgtctagtaaagaggagagaatatgatgaagagactgttcgatgggcagatgctgtcatagctgcaggaggtgatggcacaatgctgctggcagcgagtaaagtcttggacagacttaaaccagttataggggtaaacactgatccagaacggtctgagggtcatttatgcctgcccgttcgatatacacattcctttccagaagccttacagaagttctatcgtggtgagttcaggtggttgtggaggcagagaatcaggttataccttgaagggactggcataaaccctgtacctgtggaccttcacgagcagcagctaagcttgaatcagcacaatagagcccttaacattgaaagagctcatgatgaaaggtctgaggcttcaggaccccaacttctgccagtgagagcactaaatgaagtcttcattggggagagtctgtcatccaggtcattcaatattaacagggttgcaactcaggctgtagaagatgttttaaatattgcaaaacgacaaggaaatttgagtcttccattgaacagagaattggtagagaaagtaacaaatgaatataatgaatcactgctctacagtccggaagaaccaaaaatacttttcagtattcgagaaccaatagcaaatagagttttctcaagcagtcgtcagcgttgtttctcctcaaaggtttgtgttcgttctcgttgttgggatgcctgtatggttgtggatggaggaacttcttttgagtttaatgatggtgcaattgcttcgatgatgatcaataaagaagatgagcttcgaactgtgcttcttgaacagtga

SEQ ID NO: 157421 - DNA, 1437 bp, Homo sapiens
  Payload ID: 10855
  Gene Symbol: NADK2
  Gene Name: NAD kinase 2, mitochondrial
  ENST ID: ENST00000506945
  CDS Start-End: 374-1279
atcgcctaacagaattctacctctttctcaggccgcagccaatggcgcggcccctcggatccggagccgccgcgggctctgattggccgatagagttagcctgggggcgggagaagagcgacctcggggaagcgtgtggtgcggggaggtcgcccccgggcggcgaagcagccattatgcaggccttgcattgaaaggctctagttacagtggacttcttgaacgacatcatattcacaccaaaaatgtagaacatattatagatagtttacggaatgagggaattgaggttcgtctagtaaagaggagagaatatgatgaagagactgttcgatgggcagatgctgtcatagctgcaggaggtgatggcacaatgctgctggcagcgagtaaagtcttggacagacttaaaccagttataggggtaaacactgatccagaacggtctgagggtcatttatgcctgcccgttcgatatacacattcctttccagaagccttacagaagttctatcgtggtgagttcaggtggttgtggaggcagagaatcaggttataccttgaagggactggcataaaccctgtacctgtggaccttcacgagcagcagctaagcttgaatcagcacaatagagcccttaacattgaaagagctcatgatgaaaggtctgaggcttcaggaccccaacttctgccagtgagagcactaaatgaagtcttcattggggagagtctgtcatccagaatgtcttattcttgggctgtagcagtggacaatttaagaagaagtatacccactctaaagggactggcttcctactatgagatttcagttgatgatggtccatgggaaaaacagaagagttcagggctcaatttgtgtactggaacaggatcaaaggcctggtcattcaatattaacagggttgcaactcaggctgtagaagatgttttaaatattgcaaaacgacaaggaaatttgagtcttccattgaacagagaattggtagagaaagtaacaaatgaatataatgaatcactgctctacagtccggaagaaccaaaaatacttttcagtattcgagaaccaatagcaaatagagttttctcaagcagtcgtcagcgttgtttctcctcaaaggtttgtgttcgttctcgttgttgggatgcctgtatggttgtggatggaggaacttcttttgagtttaatgatggtgcaattgcttcgatgatgatcaataaagaagatgagcttcgaactgtgcttcttgaacagtgaaggatttcctcatgacaaattttgattactggcgagaatatttttacttcagaaacagactaccagtcgtaaagtgacattttttggttattgttgagactgcttgcccgtgggctcagaagtgagatttgcattattcttctgttggattctgatag

SEQ ID NO: 157422 - DNA, 569 bp, Homo sapiens
  Payload ID: 10855
  Gene Symbol: NADK2
  Gene Name: NAD kinase 2, mitochondrial
  ENST ID: ENST00000502355
  CDS Start-End: 1-413
cttcctactatgagatttcagttgatgatggtccatgggaaaaacagaagagttcagggctcaatttgtgtactggaacaggatcaaaggcctggtcattcaatattaacagggttgcaactcaggctgtagaagatgttttaaatattgtaacaaatgaatataatgaatcactgctctacagtccggaagaaccaaaaatacttttcagtattcgagaaccaatagcaaatagagttttctcaagcagtcgtcagcgttgtttctcctcaaaggtttgtgttcgttctcgttgttgggatgcctgtatggttgtggatggaggaacttcttttgagtttaatgatggtgcaattgcttcgatgatgatcaataaagaagatgagcttcgaactgtgcttcttgaacagtgaaggatttcctcatgacaaattttgattactggcgagaatatttttacttcagaaacagactaccagtcgtaaagtgacattttttggttattgttgagactgcttgcccgtgggctcagaagtgagatttgcattattcttctgttggattctgat

SEQ ID NO: 157423 - DNA, 579 bp, Homo sapiens
  Payload ID: 10855
  Gene Symbol: NADK2
  Gene Name: NAD kinase 2, mitochondrial
  ENST ID: ENST00000511088
  CDS Start-End: 334-579
attatgcaggcgtgagtgaaacgaataaacaaacaaacaaaacccactagctggggcctccatttcttccccgcccacctttctcccgcgtggggtctcccgtttcccaatcgccacgctttccccgccttcgtcaacgcctggcttgcattgaaaggctctagttacagtggacttcttgaacgacatcatattcacaccaaaaatgtagaacatattatagatagtttacggaatgagggaattgaggttcgtctagtaaagaggagagaatatgatgaagagactgttcgatgggcagatgctgtcatagctgcaggaggtgatggcacaatgctgctggcagcgagtaaagtcttggacagacttaaaccagttataggggtaaacactgatccagaacggtctgagggtcatttatgcctgcccgttcgatatacacattcctttccagaagccttacagaagttctatcgtggtgagttcaggtggttgtggaggcagagaatcaggttataccttgaagggactggcataaaccctgtacctgtggaccttcacgagcagcagctaagcttg

SEQ ID NO: 157424 - DNA, 744 bp, Homo sapiens
  Payload ID: 10855
  Gene Symbol: NADK2
  Gene Name: NAD kinase 2, mitochondrial
  ENST ID: ENST00000617628
  CDS Start-End: 1-744
atgctgctggcagcgagtaaagtcttggacagacttaaaccagttataggggtaaacactgatccagaacggtctgagggtcatttatgcctgcccgttcgatatacacattcctttccagaagccttacagaagttctatcgtggtgagttcaggtggttgtggaggcagagaatcaggttataccttgaagggactggcataaaccctgtacctgtggaccttcacgagcagcagctaagcttgaatcagcacaatagagcccttaacattgaaagagctcatgatgaaaggtctgaggcttcaggaccccaacttctgccagtgagagcactaaatgaagtcttcattggggagagtctgtcatccaggtcattcaatattaacagggttgcaactcaggctgtagaagatgttttaaatattgcaaaacgacaaggaaatttgagtcttccattgaacagagaattggtagagaaagtaacaaatgaatataatgaatcactgctctacagtccggaagaaccaaaaatacttttcagtattcgagaaccaatagcaaatagagttttctcaagcagtcgtcagcgttgtttctcctcaaaggtttgtgttcgttctcgttgttgggatgcctgtatggttgtggatggaggaacttcttttgagtttaatgatggtgcaattgcttcgatgatgatcaataaagaagatgagcttcgaactgtgcttcttgaacagtga

SEQ ID NO: 157425 - DNA, 2773 bp, Homo sapiens
  Payload ID: 10856
  Gene Symbol: NADSYN1
  Gene Name: NAD synthetase 1
  Uniprot ID: Q6IA69
  ENST ID: ENST00000319023
  CDS Start-End: 189-2309
agacggggcggggcgatccgtaggcagggcctgacgccgcagtcctccttggccggagcctcaacggatgggcggggagggggcggggccgggcaacccggaaggtccggcgtcccagccgcctacctcgctgggaccctggtcttgctgtcccccgctggcctcctgcccaagcgactgcggccaggatgggccggaaggtgaccgtggccacctgcgcactcaaccagtgggccctggacttcgagggcaatttgcaaagaattttaaagagtattgaaattgccaaaaacagaggagcaagatacaggcttggaccagagctggaaatatgcggctacggatgttgggatcattattacgagtcggacaccctcttgcactcgtttcaagtcctagcggcccttgtggagtctcccgtcactcaggacatcatctgcgacgtggggatgcctgtaatgcaccgaaacgtccgctacaactgcagagtgatattcctcaacaggaagatcctgctcatcagacccaagatggccttggccaatgaaggcaactaccgcgagctgcgctggttcaccccgtggtcgaggagtcggcacacagaggagtactttctgcctcggatgatacaggacctgacaaagcaggaaaccgtacccttcggagatgcggtgctggtgacatgggacacctgcattggaagtgagatctgtgaggagctctggacaccccacagcccgcacatcgacatgggcctggatggcgtggagatcatcaccaacgcctcgggcagccaccaagtgctgcgcaaagccaacaccagggtggatctcgtgactatggtcaccagcaagaacggtgggatttacttgctggccaaccagaagggttgtgacggggaccgcctgtactacgacggctgtgccatgattgccatgaacggaagcgtctttgctcaaggatcccagttttctctggatgacgtggaagtcctgacggccacgctggatctggaggacgtccggagctacagggcggagatttcatctcgaaacctggcggccagcagggcgagcccctaccccagagtgaaggtggactttgccctctcgtgccacgaggacttgctggcacccatctctgagcccatcgagtggaaataccacagccctgaggaggagataagccttggacctgcctgctggctctgggattttttaagacgaagtcaacaggcagggtttttgctgcccttgagtggcggggtggacagcgcagccaccgcctgcctcatctactccatgtgctgccaggtctgcgaggccgtgaggagtggaaatgaggaagtgctggctgatgtccgcaccatcgtgaaccagatcagctacaccccccaggatccccgagacctctgtggacgcatactgaccacctgctacatggccagcaagaactcctcccaggagacgtgcacccgggccagagagttggcccagcagattggaagccaccacatcagtctcaacatcgatccagccgtgaaggccgtcatgggcatcttcagcctggtgacggggaagagccctctgtttgcagctcatggaggaagcagcagggaaaacctggcgctgcaaaatgtgcaggctcgaatacggatggtcctcgcctatctgtttgctcagttgagcctctggtctcggggtgtccacggtgggctcctcgtgctgggatccgccaacgtggatgagagtctcctgggctacctgaccaagtacgactgctccagtgcggacatcaaccccataggcgggatcagcaagacggacctcagggccttcgtccagttctgcatccagcgcttccagcttcctgccctgcagagcatcctgttggcgccggccaccgcagagctggagcccttggctgatggacaggtgtcccagaccgacgaggaagatatggggatgacatatgcggagctctcggtctatgggaaactcaggaaggtggccaagatggggccctacagcatgttctgcaaactcctcggcatgtggagacacatctgcaccccgagacaggtcgctgacaaagtgaagcggtttttctccaagtactccatgaacagacacaagatgaccacgctcacacccgcgtaccacgccgagaactacagccctgaggacaacaggtttgatctgcgaccatttctgtacaacacaagctggccttggcagtttcggtgcatagaaaatcaggtgctacagctcgagagggcagagccacagtccctggacggcgtggactgaggccggttccttcctggaggcctcctgtcctcggggaccccagcacctcatcatcagcattgctggagccaagggtaggagccctacactaggagcccaggatgggacggcgcatcagccgagagggagggaacttttcagtcaaattcctcaaaaagaggctggaataaagcctgggcttaaaaagaggctggaatccaatgcacatgattttgacctcccgccagcgtgcgcttccccgcgaagtctggcattctccgaaggaagccgcctgggtaggagggttccaaccgccgccccgtgtggcatctttgctgcaggaacaagaacagtagctcccgggaagggaggggtgtcatgagcagaaaatgaaggagagaagaccttctctcccacccacacacaccttcctgtcctgggttccagaaggttctggggagatggtccctgcagagctttcttcc

SEQ ID NO: 157426 - DNA, 582 bp, Homo sapiens
  Payload ID: 10856
  Gene Symbol: NADSYN1
  Gene Name: NAD synthetase 1
  ENST ID: ENST00000527852
  CDS Start-End: 1-250
tggtggccagggtgctgtcactttgggaagcagccagagaaccacaggatgcgtgaatcggtctccttgtcttcatgggcatctccggccaggaagtcctgacggccacgctggatctggaggacgtccggagctacagggcggagatttcatctcgaaacctggcggccagcagggcgagcccctaccccagagtgaaggtggactttgccctctcgtgccacgaggacttgctggcacccatctctgagcccatcgagtggaaataccacagccctgaggaggagataagccttggacctgcctgctggctctgggattttttaagacgaagtcaacaggcagggtttttgctgcccttgagtggcggggtggacagcgcagccaccgcctgcctcatctactccatgtgctgccaggtctgcgaggccgtgaggagtggaaatgaggaagtgctggctgatgtccgcaccatcgtgaaccagatcagctacaccccccaggatccccgagacctctgtggacgcatactgaccacctgctacatggccagcaagaactcctcccaggagacgtgcaccc

SEQ ID NO: 157427 - DNA, 2416 bp, Homo sapiens
  Payload ID: 10856
  Gene Symbol: NADSYN1
  Gene Name: NAD synthetase 1
  ENST ID: ENST00000530055
  CDS Start-End: 1222-2229
ctatgttgcctaggatggtcttgaactcctgggctaaagcaatcctcttgcctcggcctcccaaagtgttggaattacaggcgtgaactaccgtgcccagcctttttttcatagcagttttattaagttgtatttgccataccacccaatgtatccatttaagcacctgattcagtggtttttcatgtactcatggagttatgcagccacaatcttagcgcattttcattaccccaaaaagaaactgtacccattatgcaccccgttcccctcctccggtcctggcaaccacaagtctactgtctgtcttcatggatttgcctattctcgacgtttcattgggatgaaatcacacagtgtatggcttccacactttactgtgctgttgtcaaggtttatctatgtgttgggtgcagccaccccttggtatccacagggattggacccaggagcctgcaccgatcccctgcagggatgcctgtgtcccacagtgccccctgcaaaactcactgatatgaagagtcggccctctgtatccatgggcttcagatcctgtgattactgtatcttctgtctgtgtgcagttgaatctgcgggtgtagaacccacagacacagggagtggctgtagcttatccctttgtatggtcagagagtgttccgtagcggggatggacacgtgttcattcactcttccactgatgggcatcgggaatgtttccactttctgtctatcattaacaattctgctacaaacatacatgtacttctgttggaggggacacatgttttcatttctcttgggtgtgtctatccaggagtggaattggctgggtcttatggtaactctgttaactgttttttgctttttggttttttgtttgttttttgagacggagtttcacccttgctgtgaactaccataggctggagtacaatggcgcaatcccagctcagcacaacctctgcctcgtagattcaagccagcagggcgagcccctaccccagagtgaaggtggactttgccctctcgtgccacgaggacttgctggcacccatctctgagcccatcgagtggaaataccacagccctgaggaggagataagccttggacctgcctgctggctctgggattttttaagacgaagtcaacaggcagggtttttgctgcccttgagtggcggggtggacagcgcagccaccgcctgcctcatctactccatgtgctgccaggtctgcgaggccgtgaggagtggaaatgaggaagtgctggctgatgtccgcaccatcgtgaaccagatcagctacaccccccaggatccccgagacctctgtggacgcatactgaccacctgctacatggccagcaagaactcctcccaggagacgtgcacccgggccagagagttggcccagcagattggaagccaccacatcagtctcaacatcgatccagccgtgaaggccgtcatgggcatcttcagcctggtgacggggaagagccctctgtttgcagctcatggaggaagcagcagggaaaacctggcgctgcaaaatgtgcaggctcgaatacggatggtcctcgcctatctgtttgctcagttgagcctctggtctcggggtgtccacggtgggctcctcgtgctgggatccgccaacgtggatgagagtctcctgggctacctgaccaagtacgactgctccagtgcggacatcaaccccataggcgggatcagcaagacggacctcagggccttcgtccagttctgcatccagcgcttccagcttcctgccctgcagagcatcctgttggcgccggccaccgcagagctggagcccttggctgatggacaggtgtcccagaccgacgaggaagatatggggatgacatatgcggagctctcggtctatgggaaactcaggaaggtggccaagatggggccctacagcatgttctgcaaactcctcggcatgtggagacacatctgcaccccgagacaggtcgctgacaaagtgaagcggtttttctccaagtactccatgaacagacacaagatgaccacgctcacacccgcgtaccacgccgagaactacagccctgaggacaacaggtttgatctgcgaccatttctgtacaacacaagctggccttggcagtttcggtgcatagaaaatcaggtgctacagctcgagagggcagagccacagtccctggacggcgtggactgaggccggttccttcctggaggcctcctgtcctcggggaccccagcacctcatcatcagcattgctggagccaagggtaggagccctacactaggagcccaggatgggacggcgcatcagccgagagggagggaacttttcagtcaaattcctcaaaaagaggctggaataaagcctgggcttaaaaag

SEQ ID NO: 157428 - DNA, 3616 bp, Homo sapiens
  Payload ID: 10856
  Gene Symbol: NADSYN1
  Gene Name: NAD synthetase 1
  ENST ID: ENST00000525200
  CDS Start-End: 1-779
aaaacagaggagcaagatacaggcttggaccagagctggaaatatgcggctacggatgttgggatcattattacgagtcggacaccctcttgcactcgtttcaagtcctagcggcccttgtggagtctcccgtcactcaggacatcatctgcgacgtggggatgcctgtaatgcaccgaaacgtccgctacaactgcagagtgatattcctcaacaggaagatcctgctcatcagacccaagatggccttggccaatgaaggcaactaccgcgagctgcgctggttcaccccgtggtcgaggagtcggcacacagaggagtactttctgcctcggatgatacaggacctgacaaagcaggaaaccgtacccttcggagatgcggtgctggtgacatgggacacctgcattggaagtgagatctgtgaggagctctggacaccccacagcccgcacatcgacatgggcctggatggcgtggagatcatcaccaacgcctcgggcagccaccaagtgctgcgcaaagccaacaccagggtggatctcgtgactatggtcaccagcaagaacggtgggatttacttgctggccaaccagaagggttgtgacggggaccgcctgtactacgacggctgtgccatgattgccatgaacggaagcgtctttgctcaaggatcccagttttctctggatgacgtgcaaacaagaaaaaatgggctattattgccacaaatggaaacaaatcccaagtgcacaaatacaacaaaaagtaacttttagttctgccccaagccggcgtgggtgggagcgtctccactctcgggctcagaccacacgcgggtccacagcactgcctcccacacacagcattgcctgactcgtctttggacccgacggccttccactctgctcttgttgggaatgggcattaaagcagcggattcaccgaggcaggcggtagcaccggaggcgagttctgcagctggctttgcaggagcagggcgagcttgtgtcctggcgtcgccgactctgcgaggctgtctgagcagttcattgctttgctcccgctgcgttcccatcctcatgattctgtctggtgctttctgcacagcataggtgtggtcagcacggaggcggttacaaaaccaaaccagtttcatagtggaccaagtgaacttcaccctgaacaagaattccacggtcttttcaggggtttcttgcacgggggcaggcaagggtgtggccgtctcgactccaggccctgctttccacatgacagtgtccccagaggcctccttgcgcttcatcattaaccgcgacagagctggaagggctttgaagagaaggattaagttcctgctgatgggaagtgtggtcctctccccgttcacgtcagagccacaggcacattggtggtcgtgttgattggcaggtgtgttggcaatcaatcacctgccccaggacccccgcaggttcccggccccacatcaagccaccaaatcggagtcctcgggggtctgtatatttagtgagcaccaggcagttgtttcgtgcattagaatccgggagccgttgccttacacgtctctagagttcctgatgttgcctgagagctccgtcgtaggctgtggccacaggcctgctgtattcagagtggccgcgctgtcctcaggctcgggccactgccctccaccaggtcctccgtggtgcacctgaaatggtcaacagaagtcttgtgacacgtggaatcatttcagagtcaccccttctgcctcctgctcaagcaacagacctgccgatcacccccgtcgggcccgcgtttctcagggtcttcctaatcccctgggctttccggcttgtcgtgtgcctggagtcaggccgccgtgcggcaggctgttaacctagcctcggggagagtgggatggagccaccttctcatggaacgatcctcgccttccctcatctccattgttttatggcttcacacggaccgtggctttctgcatggaagcttggtggccagggtgctgtcactttgggaagcagccagagaaccacaggatgcgtgaatcggtctccttgtcttcatgggcatctccggccaggaagtcctgacggccacgctggatctggaggacgtccggagctacagggcggagatttcatctcgaaacctggcggccagcagggcgagcccctaccccagagtgaaggtggactttgccctctcgtgccacgaggacttgctggcacccatctctgagcccatcgagtggaaataccacagccctgaggaggagataagccttggacctgcctgctggctctgggattttttaagacgaagtcaacaggcagggtttttgctgcccttgagtggcggggtggacagcgcagccaccgcctgcctcatctactccatgtgctgccaggtctgcgaggccgtgaggagtggaaatgaggaagtgctggctgatgtccgcaccatcgtgaaccagatcagctacaccccccaggatccccgagacctctgtggacgcatactgaccacctgctacatggccagcaagaactcctcccaggagacgtgcacccgggccagagagttggcccagcagattggaagccaccacatcagtctcaacatcgatccagccgtgaaggccgtcatgggcatcttcagcctggtgacggggaagagccctctgtttgcagctcatggaggaagcagcagggaaaacctggcgctgcaaaatgtgcaggctcgaatacggatggtcctcgcctatctgtttgctcagttgagcctctggtctcggggtgtccacggtgggctcctcgtgctgggatccgccaacgtggatgagagtctcctgggctacctgaccaagtacgactgctccagtgcggacatcaaccccataggcgggatcagcaagacggacctcagggccttcgtccagttctgcatccagcgcttccagcttcctgccctgcagagcatcctgttggcgccggccaccgcagagctggagcccttggctgatggacaggtgtcccagaccgacgaggaagatatggggatgacatatgcggagctctcggtctatgggaaactcaggaaggtggccaagatggggccctacagcatgttctgcaaactcctcggcatgtggagacacatctgcaccccgagacaggtcgctgacaaagtgaagcggtttttctccaagtactccatgaacagacacaagatgaccacgctcacacccgcgtaccacgccgagaactacagccctgaggacaacaggtttgatctgcgaccatttctgtacaacacaagctggccttggcagtttcggtgcatagaaaatcaggtgctacagctcgagagggcagagccacagtccctggacggcgtggactgaggccggttccttcctggaggcctcctgtcctcggggaccccagcacctcatcatcagcattgctggagccaagggtaggagccctacactaggagcccaggatgggacggcgcatcagccgagagggagggaacttttcagtcaaattcctcaaaaagaggctggaataaagcctgggcttaaaaagag

SEQ ID NO: 157429 - DNA, 2999 bp, Homo sapiens
  Payload ID: 10856
  Gene Symbol: NADSYN1
  Gene Name: NAD synthetase 1
  ENST ID: ENST00000528509
  CDS Start-End: 81-965
ggcgtcccagccgcctacctcgctgggaccctggtcttgctgtcccccgctggcctcctgcccaagcgactgcggccaggatgggccggaaggtgaccgtggccacctgcgcactcaaccagtgggccctggacttcgagggcaatttgcaaagaattttaaagagtattgaaattgccaaaaacagaggagcaagatacaggcttggaccagagctggaaatatgcggctacggatgttgggatcattattacgagtcggacaccctcttgcactcgtttcaagtcctagcggcccttgtggagtctcccgtcactcaggacatcatctgcgacgtggggatgcctgtaatgcaccgaaacgtccgctacaactgcagagtgatattcctcaacaggaagatcctgctcatcagacccaagatggccttggccaatgaaggcaactaccgcgagctgcgctggttcaccccgtggtcgaggagtcggcacacagaggagtactttctgcctcggatgatacaggacctgacaaagcaggaaaccgtacccttcggagatgcggtgctggtgacatgggacacctgcattggaagtgagatctgtgaggagctctggacaccccacagcccgcacatcgacatgggcctggatggcgtggagatcatcaccaacgcctcgggcagccaccaagtgctgcgcaaagccaacaccagggtggatctcgtgactatggtcaccagcaagaacggtgggatttacttgctggccaaccagaagggttgtgacggggaccgcctgtactacgacggctgtgccatgattgccatgaacggaagcgtctttgctcaaggatcccagttttctctggatgacgtggtaatgagcgggcctggacatgcctgggggagggttctctgtgcagagaccgagctcctggctctcccctgtaagccgggtgcttagtgagggcccctgtggagaagcccccgggggtcccgcctgctcctggctctcccctgtaagccgggcgcttagtgagggcccctgtggagaagcccccgggggtcccgcctgctcctggctctcccctgtaagccgggtgcttagtgagggcccctgtggagaagcccccaggggtcccgcctgctctgatggcctcaaatttacctggttggtgaggggggacctcccgccctcgggtctggagacagctgaaccccgacacacagcacatagtagtggacggatgaggttgagggcagcttacgagtcctgcgttcccacagtgcgggaggagggctccgtgccacgcagggccaggtgggagtgtgctcaggaacagaggggacggcccccgctgtgggaggcgggctctgtggtgatgagaggatgggtgccgcctggcccctgcgggtgggtgtcgttggtttgtttgaattccgagggctggcagggaaccaaagccactcctttgaaattagcaggctccatggcccctgagacaggtccagggatcccatgtatggtgaggccgttcaaggccctgtctgtcttccttgggtgttgaggccacatatactcatctgaggccttatgccacgctgcccctgagtcctgggaagcagaagtggagaccccaggacactctggtcagggaggctttgttctgtggggatctctgagcacacagcggccagctgcgtgagggagggccctgggggagctgtgagttacaggtcggaagcgccattgctatcccgaagcgacacagatatgtgggtgctccgaggaaggagatgacagagaacaaagctaagaaccctgcttggcacattcctcaccagcaactgagctgccgcttggaatggggttcaggaccttgttggggccccagattcctttgggaagctgatgaaagctctgcacattctgcggctaaagatgcgcattagcacagggcaaggcttcccagcattgcctgactcgtctttggacccgacggccttccactctgctcttgttgggaatgggcattaaagcagcggattcaccgaggcaggcggtagcaccggaggcgagttctgcagctggctttgcaggagcagggcgagcttgtgtcctggcgtcgccgactctgcgaggctgtctgagcagttcattgctttgctcccgctgcgttcccatcctcatgattctgtctggtgctttctgcacagcataggtgtggtcagcacggaggcggttacaaaaccaaaccagtttcatagtggaccaagtgaacttcaccctgaacaagaattccacggtcttttcaggggtttcttgcacgggggcaggcaagggtgtggccgtctcgactccaggccctgctttccacatgacagtgtccccagaggcctccttgcgcttcatcattaaccgcgacagagctggaagggctttgaagagaaggattaagttcctgctgatgggaagtgtggtcctctccccgttcacgtcagagccacaggcacattggtggtcgtgttgattggcaggtgtgttggcaatcaatcacctgccccaggacccccgcaggttcccggccccacatcaagccaccaaatcggagtcctcgggggtctgtatatttagtgagcaccaggcagttgtttcgtgcattagaatccgggagccgttgccttacacgtctctagagttcctgatgttgcctgagagctccgtcgtaggctgtggccacaggcctgctgtattcagagtggccgcgctgtcctcaggctcgggccactgccctccaccaggtcctccgtggtgcacctgaaatggtcaacagaagtcttgtgacacgtggaatcatttcagagtcaccccttctgcctcctgctcaagcaacagacctgccgatcacccccgtcgggcccgcgtttctcagggtcttcctaatcccctgggctttccggcttgtcgtgtgcctggagtcaggccgccgtgcggcag

SEQ ID NO: 157430 - DNA, 928 bp, Homo sapiens
  Payload ID: 10856
  Gene Symbol: NADSYN1
  Gene Name: NAD synthetase 1
  ENST ID: ENST00000525593
  CDS Start-End: 1-335
cggagctctcggtctatgggaaactcaggaaggtggccaagatggggccctacagcatgttctgcaaactcctcggcatgtggagacacatctgcaccccgagacaggtcgctgacaaagtgaagcggtttttctccaagtactccatgaacagacacaagatgaccacgctcacacccgcgtaccacgccgagaactacagccctgaggacaacaggtttgatctgcgaccatttctgtacaacacaagctggccttggcagtttcggtgcatagaaaatcaggtgctacagctcgagagggcagagccacagtccctggacggcgtggactgaggccggttccttcctggaggcctcctgtcctcggggaccccagcacctcatcatcagcattgctggagccaaggagtctgttacccacgtcacatcgtggatgccccctgcccggataggtctgagtgcactggggtggccggcaccccacaccttctcagggagcacccagcaggatacctgagattctccttaggccttggatgggagctggaggcttctggctgcctcctgcaccccagatgtgtggcaacggggtggggagtgtgtcacccgaaagatgatcagatggccggttcctgccttaactgatgacattccaccacaaaagaagtgaaaatggcctgttcctgccttaactgatgacactatcttgtgaaattccttctcctggctcatcctggctcaaaagctcccctactgagcaccttgtgacctccactcctgtctgccagagaacaacccccctttgactgtaattttcctttacctacccaaatcttataaaacggccccacccctatctcctttcgctgactcttttcagactcagcccgcctgcacccaggtgaaataaacagccttgttgctca

SEQ ID NO: 157431 - DNA, 479 bp, Homo sapiens
  Payload ID: 10856
  Gene Symbol: NADSYN1
  Gene Name: NAD synthetase 1
  ENST ID: ENST00000527963
  CDS Start-End: 1-178
caagatgaccacgctcacacccgcgtaccacgccgagaactacagccctgaggacaacaggtttgatctgcgaccatttctgtacaacacaagctggccttggcagtttcggtgcatagaaaatcaggtgctacagctcgagagggcagagccacagtccctggacggcgtggactgaggccggttccttcctggaggcctcctgtcctcggggaccccagcacctcatcatcagcattgctggagccaagggtgaattacttggaaactgcacaacacacccgctgttttcaacagagttcagtcacctcttgagggctcttctgattcttatcttggtagagcatctcctcaaggatttctgcagctacctaggaggccaaggcgggaagattccttaagcccagaagtttgaaggtgcagtaagctgtggtcacgtcactgcaatccagcccaggtgacagaggaagacttcatct

SEQ ID NO: 157432 - DNA, 820 bp, Homo sapiens
  Payload ID: 10856
  Gene Symbol: NADSYN1
  Gene Name: NAD synthetase 1
  ENST ID: ENST00000529840
  CDS Start-End: 372-820
gaagtcctgacggccacgctggatctggaggacgtccggagctacagggcggagatttcatctcgaaacctggcggctggagtacaatggcgcaatcccagctcagcacaacctctgcctcgtagattcaagccagcagggcgagcccctaccccagagtgaaggtggactttgccctctcgtgccacgaggacttgctggcacccatctctgagcccatcgagtggaaataccacagccctgaggaggagataagccttggacctgcctgctggctctgggattttttaagacgaagtcaacaggcagggtttttgctgcccttgagtggcggggtggacagcgcagccaccgcctgcctcatctactccatgtgctgccaggtctgcgaggccgtgaggagtggaaatgaggaagtgctggctgatgtccgcaccatcgtgaaccagatcagctacaccccccaggatccccgagacctctgtggacgcatactgaccacctgctacatggccagcaagaactcctcccaggagacgtgcacccgggccagagagttggcccagcagattggaagccaccacatcagtctcaacatcgatccagccgtgaaggccgtcatgggcatcttcagcctggtgacggggaagagccctctgtttgcagctcatggaggaagcagcagggaaaacctggcgctgcaaaatgtgcaggctcgaatacggatggtcctcgcctatctgtttgctcagttgagcctctggtctcggggtgtccacggtgggctcctcgtgctgggatccgccaacgtggatgagag

SEQ ID NO: 157433 - DNA, 574 bp, Homo sapiens
  Payload ID: 10856
  Gene Symbol: NADSYN1
  Gene Name: NAD synthetase 1
  ENST ID: ENST00000529120
  CDS Start-End: 87-353
aggtccggcgtcccagccgcctacctcgctgggaccctggtcttgctgtcccccgctggcctcctgcccaagcgactgcggccaggatgggccggaaggtgaccgtggccacctgcgcactcaaccagtgggccctggacttcgagggcaatttgcaaagaattttaaagagtattgaaattgccaaaaacagaggagcaagatacaggcttggaccagagctggaaatatgcggctacggatgttgggatcattattacgagtcggacaccctcttgcactcgtttcaagtcctagcggcccttgtggagtctcccgtcactcaggacatcatctgcgacgtggggatgtaagtgccagtgcctgtaatgcaccgaaacgtccgctacaactgcagagtgatattcctcaacaggaagatcctgctcatcagacccaagatggccttggccaatgaaggcaactaccgcgagctgcgctggttcaccccgtggtcgaggagtcggcacacagaggagtactttctgcctcggatgatacaggacctgacaaagcaggaaaccgtacccttcgg

SEQ ID NO: 157434 - DNA, 1929 bp, Homo sapiens
  Payload ID: 10857
  Gene Symbol: NSDHL
  Gene Name: NAD(P) dependent steroid dehydrogenase-like
  Uniprot ID: Q15738
  ENST ID: ENST00000370274
  CDS Start-End: 195-1316
cgccgagctgggccaatcctcttggtggaggaagctcggctgattctcggctcacgcgggaggggagtaaagggtggcggtccgggcctggagttcagtgggtgcagcctgcttgcgagctgaggccagacaggggggcgcctacggacggaaaagaaaagttgattacaaacgggaccatattttgcttcgaaatggaaccagcagttagcgagccaatgagagaccaagtcgcacggactcatttgacagaggacactcccaaagtgaatgctgacatagaaaaggttaaccagaatcaggccaagagatgcacagtgatcggtggctctggattcctggggcagcacatggtggagcagttgctggcaagaggatatgctgtcaatgtatttgatatccagcaagggtttgataatccccaggtgcggttctttctgggtgacctctgcagccgacaggatctgtacccagctctgaaaggtgtaaacacagttttccactgtgcgtcacccccaccatccagtaacaacaaggagctcttttatagagtgaattacattggcaccaagaatgtcattgaaacttgcaaagaggctggggttcagaaactcattttaaccagcagtgccagtgtcatctttgagggcgtcgatatcaagaatggaactgaagaccttccctatgccatgaaacccattgactactacacagagactaagatcttacaggagagggcagttctgggcgccaacgatcctgagaagaatttcttaaccacagccatccgccctcatggcattttcggcccaagggacccgcagttggtacccatcctcatcgaggcagccaggaacggcaagatgaagttcgtgattggaaatgggaagaacttggtggacttcacctttgtggagaacgtggtccatggacacatcctggcggcagagcagctctcccgagactcgacactgggtgggaaggcatttcacatcaccaatgatgagcccatccctttctggacattcctgtctcgcatcctgacaggcctcaattatgaggcccccaagtaccacatcccctactgggtggcctactacctggccctcctgctatccctgctggtgatggtgatcagtcctgtcatccagctgcagcccaccttcacacccatgcgggtcgcactggctggcacattccactactacagctgcgagagagccaaaaaggccatgggctaccagccactagtgaccatggatgatgctatggagaggaccgtgcagagctttcgccacctgcggagggtcaagtgagggacactggaggctgggctctctcgacacgttgctcagccagtcactccttcccctgtggattgatgaaataacatcctttgaatgagtttgctctgagcctgtgactccttctgctaggcagagagcgcaccctactctttccgtgacgatgagggcggcaaaaacagacatttcttccttcatggaactggatttggatttcttgaagcaggcagcttcatattataccgatttgttctctgtctttttgtgtctctctgtttaccccctcccttgccccctcttctggtttatacatttcattccagtgtccttgtacataatcaaggaagctgtaggaagctacaacccatttgttagttctgatggagaaccatttccatgcagaccaatactagagtgaagcctctagactttgttcaagatactctatcttcaaaatatcccagaagaaaaacagaagctgttaacacacaggtgagactttacatatacatttcatactgacagtgagcttagagcaaaagctgaaagctgaaatgactgtaattcctccccagtctctgttgcttgttcaactccttacatgttccacattctctttcaggta

SEQ ID NO: 157435 - DNA, 1630 bp, Homo sapiens
  Payload ID: 10857
  Gene Symbol: NSDHL
  Gene Name: NAD(P) dependent steroid dehydrogenase-like
  Uniprot ID: Q15738
  ENST ID: ENST00000440023
  CDS Start-End: 262-1383
cgccgagctgggccaatcctcttggtggaggaagctcggctgattctcggctcacgcgggaggggagtaaagggtggcggtccgggcctggagttcagtgggtgcagcctgcttgcgagctgaggccagacaggggggcgcctacggacggataaggaggagcattccaggccgagacgccctcatcagcagagtcacaggagttttggaagtgagagaaaagaaaagttgattacaaacgggaccatattttgcttcgaaatggaaccagcagttagcgagccaatgagagaccaagtcgcacggactcatttgacagaggacactcccaaagtgaatgctgacatagaaaaggttaaccagaatcaggccaagagatgcacagtgatcggtggctctggattcctggggcagcacatggtggagcagttgctggcaagaggatatgctgtcaatgtatttgatatccagcaagggtttgataatccccaggtgcggttctttctgggtgacctctgcagccgacaggatctgtacccagctctgaaaggtgtaaacacagttttccactgtgcgtcacccccaccatccagtaacaacaaggagctcttttatagagtgaattacattggcaccaagaatgtcattgaaacttgcaaagaggctggggttcagaaactcattttaaccagcagtgccagtgtcatctttgagggcgtcgatatcaagaatggaactgaagaccttccctatgccatgaaacccattgactactacacagagactaagatcttacaggagagggcagttctgggcgccaacgatcctgagaagaatttcttaaccacagccatccgccctcatggcattttcggcccaagggacccgcagttggtacccatcctcatcgaggcagccaggaacggcaagatgaagttcgtgattggaaatgggaagaacttggtggacttcacctttgtggagaacgtggtccatggacacatcctggcggcagagcagctctcccgagactcgacactgggtgggaaggcatttcacatcaccaatgatgagcccatccctttctggacattcctgtctcgcatcctgacaggcctcaattatgaggcccccaagtaccacatcccctactgggtggcctactacctggccctcctgctatccctgctggtgatggtgatcagtcctgtcatccagctgcagcccaccttcacacccatgcgggtcgcactggctggcacattccactactacagctgcgagagagccaaaaaggccatgggctaccagccactagtgaccatggatgatgctatggagaggaccgtgcagagctttcgccacctgcggagggtcaagtgagggacactggaggctgggctctctcgacacgttgctcagccagtcactccttcccctgtggattgatgaaataacatcctttgaatgagtttgctctgagcctgtgactccttctgctaggcagagagcgcaccctactctttccgtgacgatgagggcggcaaaaacagacatttcttccttcatggaactggatttggatttcttgaagcaggcagcttcatattataccgatttgttctctgtc

SEQ ID NO: 157436 - DNA, 994 bp, Homo sapiens
  Payload ID: 10857
  Gene Symbol: NSDHL
  Gene Name: NAD(P) dependent steroid dehydrogenase-like
  ENST ID: ENST00000432467
  CDS Start-End: 232-994
gaagctcggctgattctcggctcacgcgggaggggagtaaagggtggcggtccgggcctggagttcagtgggtgcagcctgcttgcgagctgaggccagacaggggggcgcctacggacggataaggaggagcattccaggccgagacgccctcatcagcagagtcacaggagttttggaagtgagagaaaagaaaagttgattacaaacgggaccatattttgcttcgaaatggaaccagcagttagcgagccaatgagagaccaagtcgcacggactcatttgacagaggacactcccaaagtgaatgctgacatagaaaaggttaaccagaatcaggccaagagatgcacagtgatcggtggctctggattcctggggcagcacatggtggagcagttgctggcaagaggatatgctgtcaatgtatttgatatccagcaagggtttgataatccccaggtgcggttctttctgggtgacctctgcagccgacaggatctgtacccagctctgaaaggtgtaaacacagttttccactgtgcgtcacccccaccatccagtaacaacaaggagctcttttatagagtgaattacattggcaccaagaatgtcattgaaacttgcaaagaggctggggttcagaaactcattttaaccagcagtgccagtgtcatctttgagggcgtcgatatcaagaatggaactgaagaccttccctatgccatgaaacccattgactactacacagagactaagatcttacaggagagggcagttctgggcgccaacgatcctgagaagaatttcttaaccacagccatccgccctcatggcattttcggcccaagggacccgcagttggtacccatcctcatcgaggcagccaggaacggcaagatgaagttcgtgattggaaatgggaagaacttggtggacttcacctttgtggagaacgtggtccatggacacatcctggcggcagagcagctct

SEQ ID NO: 157437 - DNA, 2912 bp, Homo sapiens
  Payload ID: 10858
  Gene Symbol: NQO1
  Gene Name: NAD(P)H dehydrogenase, quinone 1
  Uniprot ID: P15559
  ENST ID: ENST00000320623
  CDS Start-End: 513-1337
tttcgtgccaaggctaaaagggcatgcccacttgatccctggactctcttgggacgacttccaccctgcatcctcttgcacctcagggcacagtgcgcagatgggcttgccttagcacccccagccagatttttgaggcctctgtcacacacacccctacaatcccctcccccagccccgagagacttttcttgacttccaccagttgctccggcgggtgagagtggagaggcccctccttcatcccccaggctccctcccttcctggagctgcagcctcagcatcctccgcccagcaccccaggattcaggcgttgggtcccgcccttgtaggctgtccacctcaaacgggccggacaggatatataagagagaatgcaccgtgcactacacacgcgactcccacaaggttgcagccggagccgcccagctcaccgagagcctagttccggccagggtcgccccggcaaccacgagcccagccaatcagcgccccggactgcaccagagccatggtcggcagaagagcactgatcgtactggctcactcagagaggacgtccttcaactatgccatgaaggaggctgctgcagcggctttgaagaagaaaggatgggaggtggtggagtcggacctctatgccatgaacttcaatcccatcatttccagaaaggacatcacaggtaaactgaaggaccctgcgaactttcagtatcctgccgagtctgttctggcttataaagaaggccatctgagcccagatattgtggctgaacaaaagaagctggaagccgcagaccttgtgatattccagttccccctgcagtggtttggagtccctgccattctgaaaggctggtttgagcgagtgttcataggagagtttgcttacacttacgctgccatgtatgacaaaggacccttccggagtaagaaggcagtgctttccatcaccactggtggcagtggctccatgtactctctgcaagggatccacggggacatgaatgtcattctctggccaattcagagtggcattctgcatttctgtggcttccaagtcttagaacctcaactgacatatagcattgggcacactccagcagacgcccgaattcaaatcctggaaggatggaagaaacgcctggagaatatttgggatgagacaccactgtattttgctccaagcagcctctttgacctaaacttccaggcaggattcttaatgaaaaaagaggtacaggatgaggagaaaaacaagaaatttggcctttctgtgggccatcacttgggcaagtccatcccaactgacaaccagatcaaagctagaaaatgagattccttagcctggatttccttctaacatgttatcaaatctgggtatctttccaggcttccctgacttgctttagtttttaagatttgtgtttttctttttccacaaggaataaatgagagggaatcgactgtattcgtgcatttttggatcatttttaactgattcttatgattactatcatggcatataaccaaaatccgactgggctcaagaggccacttagggaaagatgtagaaagatgctagaaaaatgttctttaaaggcatctacacaatttaattcctctttttagggctaaagttttagggtacagtttggctaggtatcattcaactctccaatgttctattaatcacctctctgtagtttatggcagaagggaattgctcagagaaggaaaagactgaatctacctgccctaagggacttaacttgtttggtagttagccatctaatgcttgtttatgatatttcttgctttcaattacaaagcagttactaatatgcctagcacaagtaccactcttggtcagcttttgttgtttatatacagtacacagataccttgaaaggaagagctaataaatctcttctttgctgcagtcatctactttttttttaattaaaaaaaatttttttttgaagcagtcttgctctgttacccaggctggagtgcagtggtgtgatctcggctcactgcaacctctgcctcccaggttccagcaattctcctgcctcagcctccctagtagctgggatgacaggcgcctgccatcatgcctgactaatttttgtatttttagtagagacggcgtttcaccatgttggccaggctggtctcaaactcctgacctcaggtgatccgcctacctcagcctcccaaagtgctgggattacaggcgtgatccaccacacctggcccttgcaatcttctactttaaggtttgcagagataaaccaataaatccacaccgtacatctgcaatatgaattcaagaaaggaaatagtaccttcaatacttaaaaatagtcttccacaaaaaatactttatttctgatctatacaaattttcagaaggttattttctttatcattgctaaactgatgacttactatgggatggggtccagtcccatgaccttggggtacaattgtaaacctagagttttatcaactttggtgaacagttttggcataatagtcaatttctacttctggaagtcatctcattccactgttggtattatataattcaaggagaatatgataaaacactgccctcttgtggtgcattgaaagaagagatgagaaatgatgaaaaggttgcctgaaaaatgggagacagcctcttacttgccaagaaaatgaagggattggaccgagctggaaaacctcctttaccagatgctgactggcactggtggtttttgctctcgacagtatccacaatagctgacggctgggtgtttcagtttgaaaatattttgttgccttcatcttcactgcaattttgtgtaaatttctcaaagatctgaattaaataaataaaattcatttctacagacccaca

SEQ ID NO: 157438 - DNA, 1105 bp, Homo sapiens
  Payload ID: 10858
  Gene Symbol: NQO1
  Gene Name: NAD(P)H dehydrogenase, quinone 1
  Uniprot ID: P15559
  ENST ID: ENST00000379046
  CDS Start-End: 146-856
aagagagaatgcaccgtgcactacacacgcgactcccacaaggttgcagccggagccgcccagctcaccgagagcctagttccggccagggtcgccccggcaaccacgagcccagccaatcagcgccccggactgcaccagagccatggtcggcagaagagcactgatcgtactggctcactcagagaggacgtccttcaactatgccatgaaggaggctgctgcagcggctttgaagaagaaaggatgggaggtggtggagtcggacctctatgccatgaacttcaatcccatcatttccagaaaggacatcacaggtaaactgaaggaccctgcgaactttcagtatcctgccgagtctgttctggcttataaagaaggccatctgagcccagatattgtggctgaacaaaagaagctggaagccgcagaccttgtgatattccagagtaagaaggcagtgctttccatcaccactggtggcagtggctccatgtactctctgcaagggatccacggggacatgaatgtcattctctggccaattcagagtggcattctgcatttctgtggcttccaagtcttagaacctcaactgacatatagcattgggcacactccagcagacgcccgaattcaaatcctggaaggatggaagaaacgcctggagaatatttgggatgagacaccactgtattttgctccaagcagcctctttgacctaaacttccaggcaggattcttaatgaaaaaagaggtacaggatgaggagaaaaacaagaaatttggcctttctgtgggccatcacttgggcaagtccatcccaactgacaaccagatcaaagctagaaaatgagattccttagcctggatttccttctaacatgttatcaaatctgggtatctttccaggcttccctgacttgctttagtttttaagatttgtgtttttctttttccacaaggaataaatgagagggaatcgactgtattcgtgcatttttggatcatttttaactgattcttatgattactatcatggcatataaccaaaatccgactgggctcaagaggccacttagggaaagatgtagaaagatgctag

SEQ ID NO: 157439 - DNA, 2527 bp, Homo sapiens
  Payload ID: 10858
  Gene Symbol: NQO1
  Gene Name: NAD(P)H dehydrogenase, quinone 1
  Uniprot ID: P15559
  ENST ID: ENST00000379047
  CDS Start-End: 230-952
atcctccgcccagcaccccaggattcaggcgttgggtcccgcccttgtaggctgtccacctcaaacgggccggacaggatatataagagagaatgcaccgtgcactacacacgcgactcccacaaggttgcagccggagccgcccagctcaccgagagcctagttccggccagggtcgccccggcaaccacgagcccagccaatcagcgccccggactgcaccagagccatggtcggcagaagagcactgatcgtactggctcactcagagaggacgtccttcaactatgccatgaaggaggctgctgcagcggctttgaagaagaaaggatgggaggtggtggagtcggacctctatgccatgaacttcaatcccatcatttccagaaaggacatcacaggtaaactgaaggaccctgcgaactttcagtatcctgccgagtctgttctggcttataaagaaggccatctgagcccagatattgtggctgaacaaaagaagctggaagccgcagaccttgtgatattccagttccccctgcagtggtttggagtccctgccattctgaaaggctggtttgagcgagtgttcataggagagtttgcttacacttacgctgccatgtatgacaaaggacccttccggagtggcattctgcatttctgtggcttccaagtcttagaacctcaactgacatatagcattgggcacactccagcagacgcccgaattcaaatcctggaaggatggaagaaacgcctggagaatatttgggatgagacaccactgtattttgctccaagcagcctctttgacctaaacttccaggcaggattcttaatgaaaaaagaggtacaggatgaggagaaaaacaagaaatttggcctttctgtgggccatcacttgggcaagtccatcccaactgacaaccagatcaaagctagaaaatgagattccttagcctggatttccttctaacatgttatcaaatctgggtatctttccaggcttccctgacttgctttagtttttaagatttgtgtttttctttttccacaaggaataaatgagagggaatcgactgtattcgtgcatttttggatcatttttaactgattcttatgattactatcatggcatataaccaaaatccgactgggctcaagaggccacttagggaaagatgtagaaagatgctagaaaaatgttctttaaaggcatctacacaatttaattcctctttttagggctaaagttttagggtacagtttggctaggtatcattcaactctccaatgttctattaatcacctctctgtagtttatggcagaagggaattgctcagagaaggaaaagactgaatctacctgccctaagggacttaacttgtttggtagttagccatctaatgcttgtttatgatatttcttgctttcaattacaaagcagttactaatatgcctagcacaagtaccactcttggtcagcttttgttgtttatatacagtacacagataccttgaaaggaagagctaataaatctcttctttgctgcagtcatctactttttttttaattaaaaaaaatttttttttgaagcagtcttgctctgttacccaggctggagtgcagtggtgtgatctcggctcactgcaacctctgcctcccaggttccagcaattctcctgcctcagcctccctagtagctgggatgacaggcgcctgccatcatgcctgactaatttttgtatttttagtagagacggcgtttcaccatgttggccaggctggtctcaaactcctgacctcaggtgatccgcctacctcagcctcccaaagtgctgggattacaggcgtgatccaccacacctggcccttgcaatcttctactttaaggtttgcagagataaaccaataaatccacaccgtacatctgcaatatgaattcaagaaaggaaatagtaccttcaatacttaaaaatagtcttccacaaaaaatactttatttctgatctatacaaattttcagaaggttattttctttatcattgctaaactgatgacttactatgggatggggtccagtcccatgaccttggggtacaattgtaaacctagagttttatcaactttggtgaacagttttggcataatagtcaatttctacttctggaagtcatctcattccactgttggtattatataattcaaggagaatatgataaaacactgccctcttgtggtgcattgaaagaagagatgagaaatgatgaaaaggttgcctgaaaaatgggagacagcctcttacttgccaagaaaatgaagggattggaccgagctggaaaacctcctttaccagatgctgactggcactggtggtttttgctctcgacagtatccacaatagctgacggctgggtgtttcagtttgaaaatattttgttgccttcatcttcactgcaattttgtgtaaatttctcaaagatctgaattaaataaataaaattcatttctacagacccaca

SEQ ID NO: 157440 - DNA, 924 bp, Homo sapiens
  Payload ID: 10858
  Gene Symbol: NQO1
  Gene Name: NAD(P)H dehydrogenase, quinone 1
  ENST ID: ENST00000439109
  CDS Start-End: 122-730
acacgcgactcccacaaggttgcagccggagccgcccagctcaccgagagcctagttccggccagggtcgccccggcaaccacgagcccagccaatcagcgccccggactgcaccagagccatggtcggcagaagagcactgatcgtactggctcactcagagaggacgtccttcaactatgccatgaaggaggctgctgcagcggctttgaagaagaaaggatgggaggtggtggagtcggacctctatgccatgaacttcaatcccatcatttccagaaaggacatcacaggtaaactgaaggaccctgcgaactttcagtatcctgccgagtctgttctggcttataaagaaggccatctgagcccagatattgtggctgaacaaaagaagctggaagccgcagaccttgtgatattccagagtggcattctgcatttctgtggcttccaagtcttagaacctcaactgacatatagcattgggcacactccagcagacgcccgaattcaaatcctggaaggatggaagaaacgcctggagaatatttgggatgagacaccactgtattttgctccaagcagcctctttgacctaaacttccaggcaggattcttaatgaaaaaagaggtacaggatgaggagaaaaacaagaaatttggcctttctgtgggccatcacttgggcaagtccatcccaactgacaaccagatcaaagctagaaaatgagattccttagcctggatttccttctaacatgttatcaaatctgggtatctttccaggcttccctgacttgctttagtttttaagatttgtgtttttctttttccacaaggaataaatgagagggaatcgactgtattcgtgcatttttggatcatttttaactgattcttatgattactatcatggcatataac

SEQ ID NO: 157441 - DNA, 892 bp, Homo sapiens
  Payload ID: 10858
  Gene Symbol: NQO1
  Gene Name: NAD(P)H dehydrogenase, quinone 1
  ENST ID: ENST00000564043
  CDS Start-End: 117-878
acacgcgactcccacaaggttgcagccggagccgcccagctcaccgagagcctagttccggcagaagagcactgatcgtactggctcactcagagaggacgtccttcaactatgccatgaaggaggctgctgcagcggctttgaagaagaaaggatgggaggtggtggagtcggacctctatgccatgaacttcaatcccatcatttccagaaaggacatcacaggtaaactgaaggaccctgcgaactttcagtatcctgccgagtctgttctggcttataaagaaggccatctgagcccagatattgtggctgaacaaaagaagctggaagccgcagaccttgtgatattccagttccccctgcagtggtttggagtccctgccattctgaaaggctggtttgagcgagtgttcataggagagtttgcttacacttacgctgccatgtatgacaaaggacccttccggagtaagaaggcagtgctttccatcaccactggtggcagtggctccatgtactctctgcaagggatccacggggacatgaatgtcattctctggccaattcagagtggcattctgcatttctgtggcttccaagtcttagaacctcaactgacatatagcattgggcacactccagcagacgcccgaattcaaatcctggaaggatggaagaaacgcctggagaatatttgggatgagacaccactgtattttgctccaagcagcctctttgacctaaacttccaggcaggattcttaatgaaaaaagaggtacaggatgaggagaaaaacaagaaatttggcctttctgtgggccatcacttgggcaagtccatcccaactgacaaccagatcaaagctagaaaatgagattccttagcctg

SEQ ID NO: 157442 - DNA, 891 bp, Homo sapiens
  Payload ID: 10858
  Gene Symbol: NQO1
  Gene Name: NAD(P)H dehydrogenase, quinone 1
  ENST ID: ENST00000561500
  CDS Start-End: 68-877
gttccggccagggtcgccccggcaaccacgagcccagccaatcagcgccccggactgcaccagagccatggtcggcagaagagcactgatcgtactggctcactcagagaggacgtccttcaactatgccatgaaggaggctgctgcagcggctttgaagaagaaaggatgggaggtggtggagtcggacctctatgccatgaacttcaatcccatcatttccagaaaggacatcacaggtaaactgaaggaccctgcgaactttcagtatcctgccgagtctgttctggcttataaagaaggccatctgagcccagatattgtggctgaacaaaagaagctggaagccgcagaccttgtgatattccagagtaagaaggcagtgctttccatcaccactggtggcagtggctccatgtactctctgcaagggatccacggggacatgaatgtcattctctggccaattcagagtggcattctgcatttctgtggcttccaagtcttagaacctcaactgacatatagcattgggcacactccagcagacgcccgaattcaaatcctggaaggatggaagaaacgcctggagaatatttgggatgagacaccactgtattttgctccaagcagcctctttgacctaaacttccaggcaggattcttaatgaaaaaagagtttcactccgtcacccaggttggagtgcatgctcagcccccttgccgtgatagcttgcaacaccttgggattcttgggagtcctcaccagcaagaaggctctcaccagacacagcccctccacctggacttctcagcctccatggctgtaagaaattctttttctttatacattgcccagcttcaggtattctgttaaaatcaagagaaaac

SEQ ID NO: 157443 - DNA, 1515 bp, Homo sapiens
  Payload ID: 10859
  Gene Symbol: NQO2
  Gene Name: NAD(P)H dehydrogenase, quinone 2
  Uniprot ID: P16083
  ENST ID: ENST00000338130
  CDS Start-End: 713-1408
agcgagtgcgcggtccagtgcggccggaacctggcgcaactcctagagcggtccttggggagacgcgggtcccagtcctgcggctcctactggggagtgcgctggtcggaagggggatggagacagaagtcacaaactcacatgccaccagccatatgatgtaaacatgtaaactgggccaaggaatacaaaagggagtggtgagctggggacactgaagaatggatgccctgtctagaggagtgaaaatgaagcatttcatacaaacaacatgatttcgggcaatcactttgggaatcaggataaggtgttcccccagtctgcagaaacactggcaacatttacaaagctttaggttcattcttgtaagtgttgctggtgtcagaataggaacctccctgcgctttgaagggatgaatgtgacctctcccacattctccggtgctgtgatgtaccttaaacacagcaagggcacctggcctgggtggagcccactcctcagcacccacctcacttcttgcagtattctgcagaccccagccctgtgcctgtgctcctggacagctggagataaggagtgggccctggaagatgctcattcaggccctgctcaagattccagtcctgattgctggactcgctgaagagagactacgcaggaaagccccagccacccatcaaatcagagagaaggaatccaccttcttacgctatggcaggtaagaaagtactcattgtctatgcacaccaggaacccaagtctttcaacggatccttgaagaatgtggctgtagatgaactgagcaggcagggctgcaccgtcacagtgtctgatttgtatgccatgaaccttgagccgagggccacagacaaagatatcactggtactctttctaatcctgaggttttcaattatggagtggaaacccacgaagcctacaagcaaaggtctctggctagcgacatcactgatgagcagaaaaaggttcgggaggctgacctagtgatatttcagttcccgctgtactggttcagcgtgccagccatcctgaagggctggatggatagggtgctgtgccagggctttgcctttgacatcccaggattctacgattccggtttgctccagggtaaactagcgctcctttccgtaaccacgggaggcacggccgagatgtacacgaagacaggagtcaatggagattctcgatacttcctgtggccactccagcatggcacattacacttctgtggatttaaagtccttgcccctcagatcagctttgctcctgaaattgcatccgaagaagaaagaaaggggatggtggctgcgtggtcccagaggctgcagaccatctggaaggaagagcccatcccctgcacagcccactggcacttcgggcaataactctgtggcacgtgggcatcacgtaagcagcacactaggaggcccaggcgcaggcaaagagaagatggtgctgtcatgaaataaaattacaacatagctacctgggg

SEQ ID NO: 157444 - DNA, 1098 bp, Homo sapiens
  Payload ID: 10859
  Gene Symbol: NQO2
  Gene Name: NAD(P)H dehydrogenase, quinone 2
  Uniprot ID: P16083
  ENST ID: ENST00000380430
  CDS Start-End: 296-991
cagggatttcagctggccggccatatggccctgtgggtcgtcgcgcccgggccagggaccattctgtacataggatcgtgcttggctctcacggaacgcgcccacacgcagggtcccggtgtcgaatcgtctggtggaatctgccctcaaccctatggagcgggtgctggtatcatagtcatattacaagtaggaatcagcgggcccaagattgctggactcgctgaagagagactacgcaggaaagccccagccacccatcaaatcagagagaaggaatccaccttcttacgctatggcaggtaagaaagtactcattgtctatgcacaccaggaacccaagtctttcaacggatccttgaagaatgtggctgtagatgaactgagcaggcagggctgcaccgtcacagtgtctgatttgtatgccatgaaccttgagccgagggccacagacaaagatatcactggtactctttctaatcctgaggttttcaattatggagtggaaacccacgaagcctacaagcaaaggtctctggctagcgacatcactgatgagcagaaaaaggttcgggaggctgacctagtgatatttcagttcccgctgtactggttcagcgtgccagccatcctgaagggctggatggatagggtgctgtgccagggctttgcctttgacatcccaggattctacgattccggtttgctccagggtaaactagcgctcctttccgtaaccacgggaggcacggccgagatgtacacgaagacaggagtcaatggagattctcgatacttcctgtggccactccagcatggcacattacacttctgtggatttaaagtccttgcccctcagatcagctttgctcctgaaattgcatccgaagaagaaagaaaggggatggtggctgcgtggtcccagaggctgcagaccatctggaaggaagagcccatcccctgcacagcccactggcacttcgggcaataactctgtggcacgtgggcatcacgtaagcagcacactaggaggcccaggcgcaggcaaagagaagatggtgctgtcatgaaataaaattacaacatagctacctgggg

SEQ ID NO: 157445 - DNA, 1021 bp, Homo sapiens
  Payload ID: 10859
  Gene Symbol: NQO2
  Gene Name: NAD(P)H dehydrogenase, quinone 2
  ENST ID: ENST00000380441
  CDS Start-End: 340-921
cagtgcggccggaacctggcgcaactcctagagcggtccttggggagacgcgggtcccagtcctgcggctcctactggggagtgcgctggtcggaagggcacctggcctgggtggagcccactcctcagcacccacctcacttcttgcagtattctgcagaccccagccctgtgcctgtgctcctggacagctggagataaggagtgggccctggaagatgctcattcaggccctgctcaagattccagtcctgattgctggactcgctgaagagagactacgcaggaaagccccagccacccatcaaatcagagagaaggaatccaccttcttacgctatggcaggtaagaaagtactcattgtctatgcacaccaggaacccaagtctttcaacggatccttgaagaatgtggctgtagatgaactgagcaggcagggctgcaccgtcacagtgtctgatttgtatgccatgaaccttgagccgagggccacagacaaagatatcactggtactctttctaatcctgaggttttcaattatggagtggaaacccacgaagcctacaagcaaaggtctctggctagcgacatcactgatgagcagaaaaaggttcgggaggctgacctagtgatatttcagggtaaactagcgctcctttccgtaaccacgggaggcacggccgagatgtacacgaagacaggagtcaatggagattctcgatacttcctgtggccactccagcatggcacattacacttctgtggatttaaagtccttgcccctcagatcagctttgctcctgaaattgcatccgaagaagaaagaaaggggatggtggctgcgtggtcccagaggctgcagaccatctggaaggaagagcccatcccctgcacagcccactggcacttcgggcaataactctgtggcacgtgggcatcacgtaagcagcacactaggaggcccaggcgcaggcaaagagaagatggtgctgtcatgaaataaaattacaacatagcta

SEQ ID NO: 157446 - DNA, 851 bp, Homo sapiens
  Payload ID: 10859
  Gene Symbol: NQO2
  Gene Name: NAD(P)H dehydrogenase, quinone 2
  ENST ID: ENST00000380454
  CDS Start-End: 170-751
acctggcgcaactcctagagcggtccttggggagacgcgggtcccagtcctgcggctcctactggggagtgcgctggtcggaagattgctggactcgctgaagagagactacgcaggaaagccccagccacccatcaaatcagagagaaggaatccaccttcttacgctatggcaggtaagaaagtactcattgtctatgcacaccaggaacccaagtctttcaacggatccttgaagaatgtggctgtagatgaactgagcaggcagggctgcaccgtcacagtgtctgatttgtatgccatgaaccttgagccgagggccacagacaaagatatcactggtactctttctaatcctgaggttttcaattatggagtggaaacccacgaagcctacaagcaaaggtctctggctagcgacatcactgatgagcagaaaaaggttcgggaggctgacctagtgatatttcagggtaaactagcgctcctttccgtaaccacgggaggcacggccgagatgtacacgaagacaggagtcaatggagattctcgatacttcctgtggccactccagcatggcacattacacttctgtggatttaaagtccttgcccctcagatcagctttgctcctgaaattgcatccgaagaagaaagaaaggggatggtggctgcgtggtcccagaggctgcagaccatctggaaggaagagcccatcccctgcacagcccactggcacttcgggcaataactctgtggcacgtgggcatcacgtaagcagcacactaggaggcccaggcgcaggcaaagagaagatggtgctgtcatgaaataaaattacaacatagcta

SEQ ID NO: 157447 - DNA, 10084 bp, Homo sapiens
  Payload ID: 10859
  Gene Symbol: NQO2
  Gene Name: NAD(P)H dehydrogenase, quinone 2
  Uniprot ID: P16083
  ENST ID: ENST00000380455
  CDS Start-End: 175-870
ccggaacctggcgcaactcctagagcggtccttggggagacgcgggtcccagtcctgcggctcctactggggagtgcgctggtcggaagattgctggactcgctgaagagagactacgcaggaaagccccagccacccatcaaatcagagagaaggaatccaccttcttacgctatggcaggtaagaaagtactcattgtctatgcacaccaggaacccaagtctttcaacggatccttgaagaatgtggctgtagatgaactgagcaggcagggctgcaccgtcacagtgtctgatttgtatgccatgaaccttgagccgagggccacagacaaagatatcactggtactctttctaatcctgaggttttcaattatggagtggaaacccacgaagcctacaagcaaaggtctctggctagcgacatcactgatgagcagaaaaaggttcgggaggctgacctagtgatatttcagttcccgctgtactggttcagcgtgccagccatcctgaagggctggatggatagggtgctgtgccagggctttgcctttgacatcccaggattctacgattccggtttgctccagggtaaactagcgctcctttccgtaaccacgggaggcacggccgagatgtacacgaagacaggagtcaatggagattctcgatacttcctgtggccactccagcatggcacattacacttctgtggatttaaagtccttgcccctcagatcagctttgctcctgaaattgcatccgaagaagaaagaaaggggatggtggctgcgtggtcccagaggctgcagaccatctggaaggaagagcccatcccctgcacagcccactggcacttcgggcaataactctgtggcacgtgggcatcacgtaagcagcacactaggaggcccaggcgcaggcaaagagaagatggtgctgtcatgaaataaaattacaacatagctacctggggatacttttttctttctgttttttgtttgtttttaattttagctttaaggagcacatggccagtactgtttcaggggaatattgggtggcgctggggtttgggcttctattgatcccatcacccaaacagtgagcatagttcccaatagatagtttttcaacacttcctttcctcccttccttcccgcttttggattcccagcatctattgatcccgtcttttcacccctgtgtacccaatgtttagttcccacttataagttagaacatggggaatttggttttgtttctgtgttgattcacttaggataatgacctccagctgcatccacgttactgcaaaggacaggatttcatgtttttttatggctgcatagtattccatggcgtccgtgtaccacactttctttatccagtccactgttgatgggcacctgggttgattccatgtctttgctactgtaaatagttctgtgatgaacatacaagtgcaggcatcttttcatagaatgattttttttttccttttggtagatacccagtaatgggattgctgggttgaagggtaattctatttttagcaaactagaaatatttaatgaagtacatgaatgagtgtcttcagaattgtacacagtgagatcaaatattttaataatgagcttgttatgttgaattctattctgaccatcactcactgagattttcttttctttctttcttttcttttctttcttttttaaagagacagagtttcactatgttgcccgggctggtctcaaaccccttgcctcaagtaatcttcccaccttgggcctcccaaagtgctgggattgcaggtgtgagccaccacacctggcccagattttctttaatatttgtctaatatctttccatctccctatattcaagcttcatgtaattttattttctggtaattctctgagcatagagctggatttgctagtttttttattttatgactcaacatgacagtttctatttttcatagaaaagttgaatctgggcctgttgcttaattttcttctttgtctttttaaatttacattaggactatgaagttttaattgaacagccattaacatatatggttatatgttgcatgatgtttcaatcagtgatggactgcatgtacgatggtggtcccctaagattataatgccatgttttgtttattaaaatttatttaagatttattttattatttttatagatgaggtctcactctgttgccccagctgggtgcagtggcatgatcatacctcactaggctcaagtgatcctcctgcctcagcatccctagtaactaggactacaggcacatgctaccacgcctggctaattattttaatttttggtagagacaggatctcattatgttgcccaagctggtcttgaactcctggtctcaagcagtccacccacctcagcttccccaagtgctgagattacaggcatgagctgcctgcacctggactaatacagtaattttactgtaccttttccatgtttagatacagagatacctattattgtgttacagttgcctacagtattcagtacagtaacatctctacaggtttatagccaagggcaataggctctaccataaagcctgggtgtgtagtaggctgtaccatctaggtttgtgtaagtgcattctatgatgtttgcgtgacaatgaaatcaactaattatgaaatcacttaatgatacatttctcagaatgtatctcttttgttaagtgaaacattacaaaatttatttttttgggcacagtggctcactcctgtaatcccagcactttgggaggccaaggcgggcatgccgatcacgaggtcatctcctacaggcagtgcacattgactaagttcattccttgcttttgctgttgtttgctattataaataggattttgtcttcaattatatcttctaaaagttcttttgattggtaaaagctattgattgctgaatattggtttttgaccccgaccgtttgctgttttctcctcctaatcataattttttcttagttggtttccagtaataaagtcatgttgtctgaggccgggtgcggtggctcacgcctgtaatcccagcactctgggaggctgaggtggcggatcgagaccaccctggctaacacagtgaagccctgtctctactaaaaatacaaatatttagccgggtctggtggcgggcgcctgtagtcccagctacccgggaggctgaggcaggagaatggcgtgaagctgggaagcagagcttgcagtgagccgagattgtgccactgcactccagcctgggtgacagagcgagactccgtcaaaaaaaaaaaaaaaaaattaatggctgggcactgtgggtcatgcctgtaatcccagcaatttgggaggctgagatgggataactgcttgaggccaggagttcaagaccagcttgggcaacataatgagacccatctctacaaaaaatttaaaaatatacattagttaggcatggtggcacgcacctgtaattccagctactcaggaggctgaagcaagagggtcacgtgagtccaggagttcaaggctgcaatgagccatgactgtgtcactgcactccagcctggatgacagagcaagactctttttaaaaatagccaggcgtgatggctctcacctggaatcccagcatttttggaggctaagatgggcagattgcttgagttcagcagtttgaggccagcctgggcaacatggcgaaaccccaaccctataaaaaaaaaaaaaaattagccaggtgtggtggcacacatctgcagtcccaggtacttgggaggctgaggtgagagaatcgctcgagctgggaggcagaggttgcagtgagctgagatcacaccactgcactccagccttgggtgacggaatgagacctgtctcaaaaaacaaataaataaataaaaataatttaaaaatcattaattgccagttacaatgaaaatttaaaacttttaaaaaatttagtctgatggcattgtaccactgtgccgtgttcacgtaaccctactaataatcaccctgacacacagccacatgcagatggaggaacttccctaaaagcaagtttgagggattaaatatcatctttgtcatcatatcctcctcttttcccttttcctcctcctccttgtcatcactactgaggacagcactgctggctgtgcccaggggcccttcttcctcaacgcccccagcaccacccaaagtccccctctgtggaatcggagcactgagtgtgttggcctcagggacactgaaggaagccgcccgcccgtcctctcagccttggagtctgttcaaccattatcattcaaaccaccttccatcaaaggtttgaatacaatgagcagctgctcctgcattcctccaggacacaggttcaccagctgggtgtctgtcaaagacaatgagcctccgagttggtccaaacttgactctccttgaaggtcttctctggccatcctcaaaatccacaggatgaaatgtgttcgatgaggacaactcactcgtgtcgcggcgtttggatgggctgcggcgtggccgcttctgccgtagagacggagccttcctgtggttcgcgcacttccttcctgaagcctcatatttcccattccgttgatacttggccacctcaacctgcaacgtgcagtttccagtgtcatcttcatccaaatgcatgaatgcaagatccacagcttccctcttccaatgatcgcacagcctgtctcctttaagatgtccttggttatctctgtaaaacttgaccttaagttcttctgtctggggatcgctcataataatgccaaatggacaggcgtgtgaatgcctccacggtaacgaccagaggcaaaccggcacatacacgtttgtatttctccttcttcagcatgaagccttcctttttctcccctctttgtgggatcagtgggtttggggtttttcttggtggcagagcagcgccgtcaccgagcagccgtcgctggcctgatatgcagcggtgaagtcttcactggtttctcttctgctcctgtgtgcttgcagaaaccgggctggctcttgattgggattgtaggctgcagaggctggggaagggcagacagcctcgggagacacgccggaaagggcggctccctcgtgctcctcagtgactcagggttttggccacatagctcccctcctccaccctcgctcagcaggctgcatccggggcggggctggcaggcaaagaggctgtgtcacagcccttcagagcctcaagctggggtccctagggtttctggacctcagatcactgtgaggcaggaggtcctccaccctccctccggcaactctgaagtatgggaaggtgcgttctcgaactgccgaggggcctgttcctgtgtgggttgagaggatgggaagttgctgaaatccaacctctctgagagccggtgctgtcaccttggcctgagtatgctgaagacattaattccggttcccaagcaaaactgttagcaattcgagggctgggctcttgcctatgtctcatctcctgttagtaccgggcaccctgatacattttctgccggtttttaagaatttttttttgagacggagtttcactcttgttgcccaggctggagtgcaatggcgcgatctcggctcacctcgacttccacctccctggttcaagcgattctcctgcctcagcctcccgagtagctggaattacaggcatgcgccaccatgcccggctaattttgtatttttagtagagacagggtttctccatgttggtcaggctgaactcacccgacctcaggtgatctgcctgccttggcttcccaaagtgctgggattacaggcatgagccaccgcgcccggccggtttttaagatcttattgctgaaaaacttaaaataaaaaataaattcagtatcagcagggcagcaggaattgccattaaaaaaaaaaaaagaaaattggaaatgactgcagccaggtgtgtgtgattgggccccgcgacctttttcttaggcaaacagggctttgtggatgcagaaagacttctttggttgtgtagtttgtctcagagcctctcgtgggtggagcctggtaaaaagaggaaagagactcatgttgctcaatgtgaggaagcaccaggaattttggagaagttcccagcagctcaggagagtggctggtgccttgtcccaggggagagggaaataagcacaggcctatttctttctcaagacggaaaaaccgagccccagaaaatggcgataagatggggatgcaggaaaaagctagctaatgaacagttcagcagtgggcaccgtgtgggaacctctcctaagccgccctccctctgatggatgcatgctcaagtgatttcgttggcccttaaaggaaagtgttattccatcctgtaatcctagcactttaaaaggaggccgaggtgggaggatcacctgaggtcaggagttcacgaccagcctggccaacatggtgaaaccccgtctctactaaaaaatacaaaaattggccgggtgtggtggcatatgcctatagtcccagctacttgggaggctgaggcaggagaatcacttgaacccgggaggtggaggttgcagtgaggtgagatcgtgccattgcactccagcctggccacagagcgagactccatctcaaaaaaaaaaaaaaaaaaagacatctgcccaagggtcatagctgtagaggggcagatgtggtttgaacccagggcgtctggttcctctctggaagcaaccaaagtgcctgtgattggggtagtgacaaagcactctgagccgctgcatggcagatgctgtgaagagtcatctttgcctgtcccatatctattcccattttttctgattgtaacaccttgtttttttgtgtgtggtgggggaaccatgccctttcaaccaagctatgtggtgttcataagggtagcccctcctccgaccccaggagtggcagttcacagccctgactgatcacagtgttccgtggcctagctgtaaccaccccagggagtgagactgaactcaggggttcattggacctatcaggaaagagagacctttcttgtttctggacttggagctgtgatgaagtaagtgggtcaggggccaacacatagacagcgttggcctacaaatgcagcccaggcagaggacggtgcagccaagccacacagagagacaacttcctagtgacacgctgtgaactcctgcatccacccctgcctgaactggagcttttcctcttcagctcttcagttatgtgaggcaagatgttgccttttttgcttaatgctgtgagttgagtgtacagcagttacaatcaaagaatcctaaataatgctgcaagcatggtgactatctacatgggaatatgcagtactccagtgaagacaaaacataaattaattttggaatctgatgaccataatctaaaaacattcatagaggtatataaaaattataacaaaatttaaagtagcatatctcctcatgaagcaggttaagtgtatacacaaagaaggaggaggaaaaggtgagaaagaatctgcccttgtggggaagtgacagaggcagaagaggctgatgcagtcctgcatccaggcccagctctgccagcagctgagtacccctgaacaagctcccccacctcttcgggcctcactttccccatctatgaaagaaagggagtctagcttccatagctgccccagctgatacgcaaggtgccagtgtgtcctcagtcctgtcaggagaaaccttccccactagaatcccaggaggagcttgaaatcctgtctgggatcctgacggcccaggtgctgaccctgcctcgggttgtgtctgctaagaagtctgatttctgctcatctctccccatttctttcttcccataaagtgggctgatgcgctggaacgtcgatgcagccagtgatgtgtttgatgagaatgtattgagagtaaagctgcccagaatccaagtgtgtgtcatctgaactcttgaatcatggatggaaggtatgtcctctgttgatgtctcgcagcctgagctgacaatctgtaagaaggttttgttatcttcatgttacagatggtgaaccgaaacttacagagctcaagtcacttgaccaggctccacccctacaagaggcagcacgcaaactaaaaaccaggcggccttttccaaagcttgtgctctgctccactgctggaaggaacccttcggggaattgaagcagcactgaacaaaggccatttttaagaagcgacaccagaaacctaaggcggggtccccggctcaacaaggatctcatgttttgtgggtcagagattcttgtgtcgtgtctgggtgaggtcaaaaaccatgcagagactttcacttcctgttctgtggcagacaagacatctgaaaagctctcctgcagcaacacttctagatgccaagtaaatcacagcaagtgcacttttaaatgtgttactaagatcataaaaatgaaggaaaatgcccaagcatatccccaacccctcaccccacaaccaccaccaccacaataaacaagttgctgacagtggattggcaagcgagagtggaaccttaggctgcgttggcatcaaatactaataaccaagcaaaagggagcaagaccaggcctgggggctgtgccattgagaggtgaccgcgtgctggcagtcctcacagccctcgttcgctctcggcgcctgctctgcctgggctcccacttcggcggcacttgaggagcccttcagcccgccgctgcactgtgggagcccctttctgggctggccaaggccggagccggctccctcagcttgcagggaggtgtgcagagagaggcgcgagcgggaaccggggctgcgcgcgacgcttgcggggcagctggagttccgggtgggcgtgggcttggcgggccccgcactcagagcagccgggcggccctgtcggccccgggcaataagggcttagcacccgggccagcggctgcggaggatgtactgggtcccccagcagtgccagcccacgggcgctgcgctcgatttctcgccgggctttagctgccttcccgcggggcagggctcgggacctgcagcccgccatgcctgagcctcccccactctccgtgagctactgggcagcccaagcctcccccaagagcgccgcctcctgctccaggcgcccagtcccatcaaccacccaagggctgagaagtgcaggcacagggcgcgggactggcaggcagctccacctgggtgaagccagctgggctcctgagtgtggtggggacgtggagaacctttatgtctagctcagggattgtaaacacaccaattggcactctgtatctacctcaaagtttgtaaacacaccaatcagcaccctgtgtctagctcagggtttgtgaatgcaccaatccacactctgtatctagctattctggtggggccttggagaacctttatgtctagctcagggattgtaaacgcaccaatcagcaccctgtcaaaacagaccacttggctctaccaatcagcaggatgtgggtggggccagataagagtataaaagcaggctgccctagccagcaatagcaacgaagtcggatttgtttccatgctgtgacggttttgtttttttgcttattgtaatagcttttgctgttgtactcttttctggtctacactgcgtttatgagttgtaacagtcgtcacaaaggcctgcagctttcactttctgcctcagccagcgagactgcaaacccaccaaaaaaaaaacttaactgtcacacccaccctaagggtctgcagctgggtttttgaaatcagaccaagaacccaccaattcagaacccaccaattcgggacacaccatgtgggcagctgaatcaagactttgtggaggagctccaaagtgggtagaaaagtacgttcacccttacagggagactggcaggcagcctttttccttctcggtagaaaaataaactcctgttccataga

SEQ ID NO: 157448 - DNA, 689 bp, Homo sapiens
  Payload ID: 10859
  Gene Symbol: NQO2
  Gene Name: NAD(P)H dehydrogenase, quinone 2
  ENST ID: ENST00000380472
  CDS Start-End: 273-689
gtaggggaggcggggctggagggagatggcgccgcgctcccggatgaacagagaaagcgacaggataagggcctcgctctgttacccaggctggagtgctgtggtgtgtttgtgactcaccgtagccttgaactcctgggctcaagcaatcctcccacctaagcctctggagtagctgggactacagattgctggactcgctgaagagagactacgcaggaaagccccagccacccatcaaatcagagagaaggaatccaccttcttacgctatggcaggtaagaaagtactcattgtctatgcacaccaggaacccaagtctttcaacggatccttgaagaatgtggctgtagatgaactgagcaggcagggctgcaccgtcacagtgtctgatttgtatgccatgaaccttgagccgagggccacagacaaagatatcactggtactctttctaatcctgaggttttcaattatggagtggaaacccacgaagcctacaagcaaaggtctctggctagcgacatcactgatgagcagaaaaaggttcgggaggctgacctagtgatatttcagttcccgctgtactggttcagcgtgccagccatcctgaagggctggatggatagggtgctgtgccagggctttgcctttgacatcccaggattctacgattccggtttgctccag

SEQ ID NO: 157449 - DNA, 833 bp, Homo sapiens
  Payload ID: 10859
  Gene Symbol: NQO2
  Gene Name: NAD(P)H dehydrogenase, quinone 2
  ENST ID: ENST00000397717
  CDS Start-End: 417-833
gcagtcccgcggcgcggggcaggttccgggctgcttaggttggcaccggtccgtggtccccgggggcgcagtcgcagcgctcccgccctccaggcgtcagcgagtgcgcggtccagtgcggccggaacctggcgcaactcctagagcggtccttggggagacgcgggtcccagtcctgcggctcctactggggagtgcgctggtcggaagctttaggttcattcttgtaagtgttgctggtgtcagaataggaacctccctgcgctttgaagggatgaatgtgacctctcccacattctccggtgctgtgatgtaccttaaacacagcaagattgctggactcgctgaagagagactacgcaggaaagccccagccacccatcaaatcagagagaaggaatccaccttcttacgctatggcaggtaagaaagtactcattgtctatgcacaccaggaacccaagtctttcaacggatccttgaagaatgtggctgtagatgaactgagcaggcagggctgcaccgtcacagtgtctgatttgtatgccatgaaccttgagccgagggccacagacaaagatatcactggtactctttctaatcctgaggttttcaattatggagtggaaacccacgaagcctacaagcaaaggtctctggctagcgacatcactgatgagcagaaaaaggttcgggaggctgacctagtgatatttcagttcccgctgtactggttcagcgtgccagccatcctgaagggctggatggatagggtgctgtgccagggctttgcctttgacatcccaggattctacgattccggtttgctccag

SEQ ID NO: 157450 - DNA, 626 bp, Homo sapiens
  Payload ID: 10859
  Gene Symbol: NQO2
  Gene Name: NAD(P)H dehydrogenase, quinone 2
  ENST ID: ENST00000426637
  CDS Start-End: 437-626
caggggaatggctgtgacaataaataagattgggaaaacaagaagacgcccttgcatacattaagatatgtatatatggaaatgttaccgggagtcccggttatcccaaaaagggttgtttcctgttgcgtggtgaggccaatgcacgaaaccgaaagggagtgtgtcaagcagtgcaggctgtattcaatggctatggaattggaagatctgaaatcaacttagcttataagggcctcgctctgttacccaggctggagtgctgtggtgtgtttgtgactcaccgtagccttgaactcctgggctcaagcaatcctcccacctaagcctctggagtagctgggactacagattgctggactcgctgaagagagactacgcaggaaagccccagccacccatcaaatcagagagaaggaatccaccttcttacgctatggcaggtaagaaagtactcattgtctatgcacaccaggaacccaagtctttcaacggatccttgaagaatgtggctgtagatgaactgagcaggcagggctgcaccgtcacagtgtctgatttgtatgccatgaaccttgagccgagggccacagacaaagatatcactggtactctttctaatcctg

SEQ ID NO: 157451 - DNA, 470 bp, Homo sapiens
  Payload ID: 10859
  Gene Symbol: NQO2
  Gene Name: NAD(P)H dehydrogenase, quinone 2
  ENST ID: ENST00000606474
  CDS Start-End: 179-286
ttctgctgacacctcactggccatctcaactgcaaggcagcctaggaaatgtagtgcttacctgtacacgtggattcctggaatcaattcaggattgctggactcgctgaagagagactacgcaggaaagccccagccacccatcaaatcagagagaaggaatccaccttcttacgctatggcagaatttaggttcctcaaaagtggggccctgcctatcctgtctttgctgtgcctccaggccctgaaattctccctgggctgtagcaggggctcaagtgaatgaaccccaggaggcatcttgggtaagaaagtactcattgtctatgcacaccaggaacccaagtctttcaacggatccttgaagaatgtggctgtagatgaactgagcaggcagggctgcaccgtcacagtgtctgatttgtatgccatgaaccttgagccgagggccacagacaaagatatcactg

SEQ ID NO: 157452 - DNA, 766 bp, Homo sapiens
  Payload ID: 10860
  Gene Symbol: NDUFA1
  Gene Name: NADH dehydrogenase (ubiquinone) 1 alpha subcomplex, 1, 7.5kDa
  Uniprot ID: O15239
  ENST ID: ENST00000371437
  CDS Start-End: 426-638
tttctccgggctctgggtcgcaggccgggcgctttctgcgtccagcagcccctttccgcccaggctttttgaaaaggaaggtgcacacctgatccaccgcctttcctggagaaagctgctctgccattttagagtcctgagctccgaaacagccgtggctgcctgggttgcacttggcccctgcacgtcactccacgttgcgcgctccgccgggagtcgaagcaaaagacactgacggaagaggactgcgagagcccgagcgcccgtctctcttgtgccctagcagattccgtcgcttcttccggagccgtacgtggcaccgccccgctcgcgggcggccgcggggcttgctgggaagagaggcgaagccaggtcacctttcaaggacccagaagtagggttttggcctaggtaacggggcagagatgtggttcgagattctccccggactctccgtcatgggcgtgtgcttgttgattccaggactggctactgcgtacatccacaggttcactaacgggggcaaggaaaaaagggttgctcattttgggtatcactggagtctgatggaaagagataggcgcatctctggagttgatcgttactatgtgtcaaagggtttggagaacattgattaaggaagcattttcctgattgatgaaaaaaataactcagttatggccatctacccctgctagaaggttacagtgtattatgtagcatgcaatgtgttatgtagtgcttaataaaaataaaatgaaaaaaa

SEQ ID NO: 157453 - DNA, 4915 bp, Homo sapiens
  Payload ID: 10861
  Gene Symbol: NDUFA10
  Gene Name: NADH dehydrogenase (ubiquinone) 1 alpha subcomplex, 10, 42kDa
  Uniprot ID: O95299
  ENST ID: ENST00000252711
  CDS Start-End: 102-1169
gcaccccggccgtgacgtcacggcagcgcgccggccgcgagagagggccccgtcgcgaccgcgtccccttgggtccttgatcctgagctgaccgggtagccatggccttgcggctcctgaagctggcagcgacgtccgcgtccgcccgggtcgtggcggcgggcgcccagcgcgtgagaggaattcatagcagtgtgcagtgcaaactgcgctatggaatgtggcatttcctacttggggataaagcaagcaaaagactgacagaacgcagcagagtgataactgtagatggcaatatatgtactggaaaaggcaaacttgcaaaagaaatagcagagaaactaggcttcaagcactttcctgaagcggggattcattatccagacagtaccacaggagatgggaagcccctcgccaccgactataatggcaactgtagtttggagaaattttacgatgatccgagaagcaatgatggcaacagttaccgcctgcagtcctggttgtacagcagtcgcctgctgcagtactcagatgccttggagcacttgctgaccacaggacaaggtgttgtgttggagcgctccatcttcagtgactttgtgttcctggaggcgatgtacaaccagggattcatccgaaagcagtgtgtggaccactacaacgaggtgaagagcgtcaccatctgcgattacctgcccccccacctggtgatttacatcgatgtgcccgttccagaggtccagaggcggattcagaagaaaggagatccacatgaaatgaagatcacctctgcctatctacaggacattgagaatgcctataagaaaacctttctccctgagatgagtgaaaaatgtgaggttttacaatattctgcaagggaagctcaagattcaaaaaaggtggtagaggacattgaatacctgaagttcgataaagggccgtggctcaagcaggacaatcgcactttataccacctgcgattactggttcaggataagtttgaggtgctgaattacacaagcattcctatctttctcccggaagtcaccattggagctcatcagactgaccgtgtcttacatcagttcagagagctgccgggccgcaagtacagccctgggtacaacaccgaggtgggagacaagtggatctggctgaagtgaacgggccgccttctgctccagctgcatcacagtgatggccaagctgcatcagccgcactctcctggacgccatatagctttaagatcgggggagggtaaataatgcaaaaattgcacagtggaagaaggggtctcacaaaaagcaatccatcctgtagtataggtaatggagttgggggaagcagcttccattctggatgtttggaaccctttagctttgttttggaatggcccaccattctcactggaaaacagtggtctgctgtgaaaggccagctctcggcagcccctgtggtttcagcgctgccgctctgtgtcattcaggttgtgcacattgtttttcttctgacttccagaaataaaagtgtttccatgggaatttccccatcgtacgtctatgtgcgtgcgggcacgtcgaaactgcacacgtgcacacacgctgctctgggccctgtttggtgtggtgtggtttaattgaggcttacattatgctgaagagtttttctaaaggcctactgtatttattttagtaatgtgctacattagagtagaaaaaataagaacgtgaagaagaaatagcaaaaggagaaaattaccacagatttacagaacaatatgttttaagagagacgttgagaaagattcacgtggccgtcctcagcgtctcaaactcctttgaagggagatttgagcttaggctgttgatgacataagatgcaaaagcaaaataatatactctctttattacccagaaaatcaagttgccagtcaaaactgagaaatgagaaagaaaatcagatttctttattcatctctgttgaagcctagaaaaccaaaacaagctggttgtggttcagcatcatggtttaggaatcaagctgtcagttgtgagtcctactgaactgtgggttttccactgtaaagctccactgtgtccattaggaatcaggctgccagttgtgagtcctactgaactgtgggttttccactgtaaagctccactgtgtccaatatggtagctcctagccacatgtgggtattgaaatttaaatgagctaaaatgtaatagagtttaaaattgggttccttggttgcactggccatagttcaggcactccacagccgcctgtgggcagtagttccagtgctggtgcagaggacgatgctctgctccccgcggaagctctaccaggcctcgctgctgcggagcatgcgaagaagatgcacactccttccctccttgcgtccgcctgcctttttccctctccccttccttccctccttctttcctcctccttccctcccttcctttcttccttccatctgtccttgttttcctcccttcccttcctccctgcctctttccttccctccttctcttccttccttccgtctgtccttgttttcctccctgcctctttccttccctccttctcttccttccttccttccgtctgtccttgttttcctcccttcccttcctccctgcctccttccttgttttaagaatttgaaaataaagtttcccaggagttttgaattggagtcgagatttaagtggctgaagttttgcatttcactaggaaaccaacagctttaatcatgaaatgaaagcacagctgggcattgggccagtcacagagtgtcttttgctctgagcacttcacaaacccattgtggaggggaggaaagaaaaagaaagccatctttaattatcttagctgttcctaatgtctttggctgcaaagagctagctgtttccttcaaccttggtggttgcacgggtagtgtcctcagcagtgagagggcaggtctgccctgtggtcaggattgcccttgtgaggggcagagctctccaaccatgcagggctccgtgtcggcatggtgtggactcgggtgctctgatcatcccctgtgtttgcgtctgaccctgtgtggttgcattcccttgatggagtgggaagtatgtaatttgtagtgctgaggacattcgtctgtttgattttctggtgttttcaatgacatgcatgttcagcagagaaagatgaataaacactgtccaattcttctctccacatagaagcctcaagaagaggtgaggagatgccccgatttccttatttcagagcagtacatgcgttcgtctcacgaaagctcttacaactaaaacaacagcaccaacaaaccaggatcaaaataatcgtgcattttccaggattccatgttggacttctcagtgctttggagatcaggaaataatcatgctgttgcagcagtatggttttgtgtctggattttattcatacaggcatgtgtttacaggcatgagaattctgtattgaaaagaaagtccttgtttttttctaacgtatctttctgttccatcaactgttaaaaccaaattgttaagaacattgagcttcttaggagagattacatgcagctacttaggaccacctcagcaaaatggagttgcctgggtagatagcagcagcagctcaccagccccacgctgccaggctgctggctgctgtccaccaggcagctgtggaacctccatgttctgcctaggtgttgtggcaagaacagcagggaaacaggcggccgcctccaggccacaggtggacccagggaccttcagttacgccgcttcaattgaattcgtggtggtttctctgctacagcagaagtggaagaagctcttgtcttgtttggcatttgtcccattttttggctaataattggctttgaatttctctgtgccctgcttaccaattatagctttctggattggctgttcttagcagtgcaaatgtcaatgcaaagaagcaagcaggcggctactttctgggaagaagcatagtccgtgctcacactggatataaatctgcaagatttgggggtttggcaaaataggggtggagggaaagctgccatggctgtcagaaattggggctttttgaagaaaagcttgtgtaggcatcagccactggctggccagaattccatgaatggaagcaggtgcccgagtgatctggggctttacatgtggatataaatagaagccgggagcctgaggctttgctttaggaaaatcatgagccagaaaacagaggaggtgattgtcagtagtcacctcacgccgctagtgttttctaatactctctcgaattgtcaaagcaaaggaccttataacagcaacacgtgtgtgactcgaagcagcgagcttcccttgggaaaaggagcctcttctcagcagagggtcccagcctttctgtccttccccatcggaatgccaggctctgtgagtttggatgttggacattgccacctgaattccaggaggccggggagctccagtgatggacttgtccccaaaagagtggtgctgttctcagagccataaatgttccactgaaagtgtctgtcccctggctcacgctggctgcgcttgcttgaaggaggctgatttaagggttctaataggaagacaaatgaaactgtcaaattttatctttaagcatgtgagtaagtttgctcattcgcttttactattgatgtatagttttaaaattcttaatttaaaaattattttaatagtaaatttttcacaagtgaacactttttatctttaaattaaaattctgaagctccctagttagttagatccaattgctggttacattttgggaagctctcattttagtgctatgtagtttcattgaataaacatgtttttaatgaga

SEQ ID NO: 157454 - DNA, 1313 bp, Homo sapiens
  Payload ID: 10861
  Gene Symbol: NDUFA10
  Gene Name: NADH dehydrogenase (ubiquinone) 1 alpha subcomplex, 10, 42kDa
  Uniprot ID: O95299
  ENST ID: ENST00000307300
  CDS Start-End: 24-1313
gatcctgagctgaccgggtagccatggccttgcggctcctgaagctggcagcgacgtccgcgtccgcccgggtcgtggcggcgggcgcccagcgcgtgagaggaattcatagcagtgtgcagtgcaaactgcgctatggaatgtggcatttcctacttggggataaagcaagcaaaagactgacagaacgcagcagagtgataactgtagatggcaatatatgtactggaaaaggcaaacttgcaaaagaaatagcagagaaactaggcttcaagcactttcctgaagcggggattcattatccagacagtaccacaggagatgggaagcccctcgccaccgactataatggcaactgtagtttggagaaattttacgatgatccgagaagcaatgatggcaacagttaccgcctgcagtcctggttgtacagcagtcgcctgctgcagtactcagatgccttggagcacttgctgaccacaggacaaggtgttgtgttggagcgctccatcttcagtgactttgtgttcctggaggcgatgtacaaccagggattcatccgaaagcagtgtgagtcagcattgcagacccacttctggactggggtggctggagccagtggaaagctggaatctgggagctcagaggaagtactgttgattaatgaaagaggaggccgaagcaagccaggtgtggaccactacaacgaggtgaagagcgtcaccatctgcgattacctgcccccccacctggtgatttacatcgatgtgcccgttccagagccacatgaaatgaagatcacctctgcctatctacaggacattgagaatgcctataagaaaacctttctccctgagatgagtgaaaaatgtgaggttttacaatattctgcaagggaagctcaagattcaaaaaaggtggtagaggacattgaatacctgaagttcgataaagggccgtggctcaagcaggacaatcgcactttataccacctgcgattactggttcaggataagtttgaggtgctgaattacacaagcattcctatctttctcccggaagtcaccattggagctcatcagactgaccgtgtcttacatcagttcagagagcgattagattggactgtgtgttttggggaggaatccacagaggtgaagcatcaggggcacttgctgtcagtgcagcctggcaccgtggccctgaccgtgggctcctggctgaggtcgtgcttgctgggtctccactggaagctgctcttcctctttccagaaagccccatgcacaccacagcctttatgttcctttgttga

SEQ ID NO: 157455 - DNA, 699 bp, Homo sapiens
  Payload ID: 10861
  Gene Symbol: NDUFA10
  Gene Name: NADH dehydrogenase (ubiquinone) 1 alpha subcomplex, 10, 42kDa
  ENST ID: ENST00000407129
  CDS Start-End: 7-612
gtagccatggccttgcggctcctgaagctggcagcgacgtccgcgtccgcccgggtcgtggcggcgggcgcccagcgcgtgagaggaattcatagcagtgtgcagtgcaaactgcgctatggaatgtggcatttcctacttggggataaagcaagcaaaagactgacagaacgcagcagagtgataactgtagatggcaatatatgtactggaaaaggcaaacttgcaaaagaaatagcagagaaactaggcttcaagcactttcctgaagcggggattcattatccagacagtaccacaggagatgggaagcccctcgccaccgactataatggcaactgtagtttggagaaattttacgatgatccgagaagcaatgatggcaacagttaccgcctgcagtcctggttgtacagcagtcgcctgctgcagtactcagatgccttggagcacttgctgaccacaggacaaggtgttgtgttggagcgctccatcttcagtgactttgtgttcctggaggcgatgtacaaccagggattcatccgaaagcagtgtgagtcagcattgcagacccacttctgggtgtgtggtgcgactttgcaagggctgtgatagactcaccttgcacttactgtgtttatgaatgtctgttagatagatgaataaatgccattacttaatcggtctccgctggaaaaa

SEQ ID NO: 157456 - DNA, 1557 bp, Homo sapiens
  Payload ID: 10861
  Gene Symbol: NDUFA10
  Gene Name: NADH dehydrogenase (ubiquinone) 1 alpha subcomplex, 10, 42kDa
  ENST ID: ENST00000404554
  CDS Start-End: 6-1178
tagccatggccttgcggctcctgaagctggcagcgacgtccgcgtccgcccgggtcgtggcggcgggcgcccagcgcgtgagaggaattcatagcagtgtgcagtgcaaactgcgctatggaatgtggcatttcctacttggggataaagcaagcaaaagactgacagaacgcagcagagtgataactgtagatggcaatatatgtactggaaaaggcaaacttgcaaaagaaatagcagagaaactaggcttcaagcactttcctgaagcggggattcattatccagacagtaccacaggagatgggaagcccctcgccaccgactataatggcaactgtagtttggagaaattttacgatgatccgagaagcaatgatggcaacagttaccgcctgcagtcctggttgtacagcagtcgcctgctgcagtactcagatgccttggagcacttgctgaccacaggacaaggtgttgtgttggagcgctccatcttcagtgactttgtgttcctggaggcgatgtacaaccagggattcatccgaaagcagtgtgtggaccactacaacgaggtgaagagcgtcaccatctgcgattacctgcccccccacctggtgatttacatcgatgtgcccgttccagaggtccagaggcggattcagaagaaaggagatccacatgaaatgaagatcacctctgcctatctacaggacattgagaatgcctataagaaaacctttctccctgagatgagtgaaaaatgtgaggttttacaatattctgcaagggaagctcaagattcaaaaaaggtggtagaggacattgaatacctgaagttcgataaagggccgtggctcaagcaggacaatcgcactttataccacctgcgattactggttcaggataagtttgaggtgctgaattacacaagcattcctatctttctcccggaagtcaccattggagctcatcagactgaccgtgtcttacatcagttcagagagctggggatcccctacccgcagcgggctgtgcagagtacaagagagggtcctgaagtgcttctcactggtctttggaggtgggaagaccttctcatcggtcttcagctgccgggccgcaagtacagccctgggtacaacaccgaggtgggagacaagtggatctggctgaagtgaacgggccgccttctgctccagctgcatcacagtgatggccaagctgcatcagccgcactctcctggacgccatatagctttaagatcgggggagggtaaataatgcaaaaattgcacagtggaagaaggggtctcacaaaaagcaatccatcctgtagtataggtaatggagttgggggaagcagcttccattctggatgtttggaaccctttagctttgttttggaatggcccaccattctcactggaaaacagtggtctgctgtgaaaggccagctctcggcagcccctgtggtttcagcgctgccgctctgtgtcattcaggttgtgcacattgtttttcttctgacttccagaaataaaagtgtttccatgggaa

SEQ ID NO: 157457 - DNA, 562 bp, Homo sapiens
  Payload ID: 10861
  Gene Symbol: NDUFA10
  Gene Name: NADH dehydrogenase (ubiquinone) 1 alpha subcomplex, 10, 42kDa
  ENST ID: ENST00000414580
  CDS Start-End: 13-297
gaccgggtagccatggccttgcggctcctgaagctggcagcgacgtccgcgtccgcccgggtcgtggcggcgggcgcccagcgcgtggcttcaagcactttcctgaagcggggattcattatccagacagtaccacaggagatgggaagcccctcgccaccgactataatggcaactgtagtttggagaaattttacgatgatccgagaagcaatgatggcaacagttaccgcctgcagtcctggttgtacagcagtcgcctgctgcagtactcagatgccttggagcacttgctgaccacaggtgcagtatttctgggcagttagatctgttctgtacttgaacactattctagaattcaaccacgttaaattgccactgagtcgagctttcctttaagggtgtttgatgaggacaaggtgttgtgttggagcgctccatcttcagtgactttgtgttcctggaggcgatgtacaaccagggattcatccgaaagcagtgtgtggaccactacaacgaggtgaagagcgtcaccatctgcgattacctgcccccccacctg

SEQ ID NO: 157458 - DNA, 621 bp, Homo sapiens
  Payload ID: 10861
  Gene Symbol: NDUFA10
  Gene Name: NADH dehydrogenase (ubiquinone) 1 alpha subcomplex, 10, 42kDa
  ENST ID: ENST00000444548
  CDS Start-End: 1-400
ctctgcctatctacaggacattgagaatgcctataagaaaacctttctccctgagatgagtgaaaaatgtgaggttttacaatattctgcaagggaagctcaagattcaaaaaaggtggtagaggacattgaatacctgaagttcgataaagggccgtggctcaagcaggacaatcgcactttataccacctgcgattactggttcaggataagtttgaggtgctgaattacacaagcattcctatctttctcccggaagtcaccattggagctcatcagactgaccgtgtcttacatcagttcagagaggtcttccaagaatcagaagccaagagattagatgtcgaagaggtctgttggaagaaaacacctttgaaggatcggggagaggaagtctgagatggcaggagagcctttgctcttccttgcgggactgtgacaagagacaggaagaaagaatccaggaaagatttggccaggctgatgagtgtcctagagccaaagatgcctgtcagggagtcccatgtccacaggaacagctggcaccagaagctcttctgtgctccatcactgaccaggcacattctgtaacgtgcgtggccgtggcatgaacaggcagc

SEQ ID NO: 157459 - DNA, 662 bp, Homo sapiens
  Payload ID: 10861
  Gene Symbol: NDUFA10
  Gene Name: NADH dehydrogenase (ubiquinone) 1 alpha subcomplex, 10, 42kDa
  ENST ID: ENST00000419408
  CDS Start-End: 1-390
gacattgagaatgcctataagaaaacctttctccctgagatgagtgaaaaatgtgaggttttacaatattctgcaagggaagctcaagattcaaaaaaggtggtagaggacattgaatacctgaagttcgataaagggccgtggctcaagcaggacaatcgcactttataccacctgcgattactggttcaggataagtttgaggtgctgaattacacaagcattcctatctttctcccggaagtcaccattggagctcatcagactgaccgtgtcttacatcagttcagagaggtcccagcagaccaggagcacagatgggtcagcctactcagttctccactgggctccctgttctcagaatggtctgtgtgtggagaagactcctaagtgcctgggaataggtgggctgtgggtgaagcggatgaaggcgatacagagcgaggacgtggcctgaaaccgagagcagcattctcccttccctgcttccatccgttcctggtctgcgtcccagccctggtacgtaaggctgtcccagaatccctgtaaattcacttttctgttaaatgattccagatcattcggttatgtgcaaccaaaagtcctcacccatacgtcatcttacagcattaaagcttcaggcgacttgggtatgttttaaa

SEQ ID NO: 157460 - DNA, 434 bp, Homo sapiens
  Payload ID: 10861
  Gene Symbol: NDUFA10
  Gene Name: NADH dehydrogenase (ubiquinone) 1 alpha subcomplex, 10, 42kDa
  ENST ID: ENST00000448880
  CDS Start-End: 1-417
gagaatgcctataagaaaacctttctccctgagatgagtgaaaaatgtgaggttttacaatattctgcaagggaagctcaagattcaaaaaaggtggtagaggacattgaatacctgaagttcgataaagggccgtggctcaagcaggacaatcgcactttataccacctgcgattactggttcaggataagtttgaggtgctgaattacacaagcattcctatctttctcccggaagtcaccattggagctcatcagactgaccgtgtcttacatcagttcagagagttcagtctcttcaatggaaggaagccagatgctgttaagatactgtgctccctccttgaagctgatcgttccctccttgaagctgatcgttccctccttgaagctgatcgtgtccaagatagttgctaggacaacagaatcttctg

SEQ ID NO: 157461 - DNA, 776 bp, Homo sapiens
  Payload ID: 10861
  Gene Symbol: NDUFA10
  Gene Name: NADH dehydrogenase (ubiquinone) 1 alpha subcomplex, 10, 42kDa
  ENST ID: ENST00000443626
  CDS Start-End: 43-776
cgcgtccccttgggtccttgatcctgagctgaccgggtagccatggccttgcggctcctgaagctggcagcgacgtccgcgtccgcccgggtcgtggcggcgggcgcccagcgcgtgagaggaattcatagcagtgtgcagtgcaaactgcgctatggaatgtggcatttcctacttggggataaagcaagcaaaagactgacagaacgcagcagagtgataactgtagatggcaatatatgtactggaaaaggcaaacttgcaaaagaaatagcagagaaactaggcttcaagcactttcctgaagcggggattcattatccagacagtaccacaggagatgggaagcccctcgccaccgactataatggcaactgtagtttggagaaattttacgatgatccgagaagcaatgatggcaacagttaccgcctgcagtcctggttgtacagcagtcgcctgctgcagtactcagatgccttggagcacttgctgaccacaggacaaggtgttgtgttggagcgctccatcttcagtgactttgtgttcctggaggcgatgtacaaccagggattcatccgaaagcagttgaaaaatgtgaggttttacaatattctgcaagggaagctcaagattcaaaaaagggttcaggataagtttgaggtgctgaattacacaagcattcctatctttctcccggaagtcaccattggagctcatcagactgaccgtgtcttacatcagttcagagagctgccgggccgcaagtacagccc

SEQ ID NO: 157462 - DNA, 1489 bp, Homo sapiens
  Payload ID: 10861
  Gene Symbol: NDUFA10
  Gene Name: NADH dehydrogenase (ubiquinone) 1 alpha subcomplex, 10, 42kDa
  ENST ID: ENST00000620965
  CDS Start-End: 45-1112
accgcgtccccttgggtccttgatcctgagctgaccgggtagccatggccttgcggctcctgaagctggcagcgacgtccgcgtccgcccgggtcgtggcgcgggcgcccagcgcgtggagaggaattcatagcagtgtgcagtgcaaactgcgctatggaatgtggcatttcctacttggggataaagcaagcaaaagactgacagaacgcagcagagtgataactgtagatggcaatatatgtactggaaaaggcaaacttgcaaaagaaatagcagagaaactaggcttcaagcactttcctgaagcggggattcattatccagacagtaccacaggagatgggaagcccctcgccaccgactataatggcaactgtagtttggagaaattttacgatgatccgagaagcaatgatggcaacagttaccgcctgcagtcctggttgtacagcagtcgcctgctgcagtactcagatgccttggagcacttgctgaccacaggacaaggtgttgtgttggagcgctccatcttcagtgactttgtgttcctggaggcgatgtacaaccagggattcatccgaaagcagtgtgtggaccactacaacgaggtgaagagcgtcaccatctgcgattacctgcccccccacctggtgatttacatcgatgtgcccgttccagaggtccagaggcggattcagaagaaaggagatccacatgaaatgaagatcacctctgcctatctacaggacattgagaatgcctataagaaaacctttctccctgagatgagtgaaaaatgtgaggttttacaatattctgcaagggaagctcaagattcaaaaaaggtggtagaggacattgaatacctgaagttcgataaagggccgtggctcaagcaggacaatcgcactttataccacctgcgattactggttcaggataagtttgaggtgctgaattacacaagcattcctatctttctcccggaagtcaccattggagctcatcagactgaccgtgtcttacatcagttcagagagctgccgggccgcaagtacagccctgggtacaacaccgaggtgggagacaagtggatctggctgaagtgaacgggccgccttctgctccagctgcatcacagtgatggccaagctgcatcagccgcactctcctggacgccatatagctttaagatcgggggagggtaaataatgcaaaaattgcacagtggaagaaggggtctcacaaaaagcaatccatcctgtagtataggtaatggagttgggggaagcagcttccattctggatgtttggaaccctttagctttgttttggaatggcccaccattctcactggaaaacagtggtctgctgtgaaaggccagctctcggcagcccctgtggtttcagcgctgccgctctgtgtcattcaggttgtgcacattgtttttcttctgacttccagaaataaaagtgtttccatggg

SEQ ID NO: 157463 - DNA, 539 bp, Homo sapiens
  Payload ID: 10862
  Gene Symbol: NDUFA11
  Gene Name: NADH dehydrogenase (ubiquinone) 1 alpha subcomplex, 11, 14.7kDa
  Uniprot ID: Q86Y39
  ENST ID: ENST00000308961
  CDS Start-End: 49-474
gcttcccgagctggcggggtccgtggtgcgggatcgagattgcgggctatggcgccgaaggtttttcgtcagtactgggatatccccgatggcaccgattgccaccgcaaagcctacagcaccaccagtattgccagcgtcgctggcctgaccgccgctgcctacagagtcacactcaatcctccgggcaccttccttgaaggagtggctaaggttggacaatacacgttcactgcagctgctgtcggggccgtgtttggcctcaccacctgcatcagcgcccatgtccgcgagaagcccgacgaccccctgaactacttcctcggtggctgcgccggaggcctgactctgggagcacgcacgcacaactacgggattggcgccgccgcctgcgtgtactttggcatagcggcctccctggtcaagatgggccggctggagggctgggaggtgtttgcaaaacccaaggtgtgagccctgtgcctgccgggacctccagcctgcagaatgcgtccagaaataaattctgtgtctgtgtg

SEQ ID NO: 157464 - DNA, 2406 bp, Homo sapiens
  Payload ID: 10862
  Gene Symbol: NDUFA11
  Gene Name: NADH dehydrogenase (ubiquinone) 1 alpha subcomplex, 11, 14.7kDa
  Uniprot ID: Q86Y39
  ENST ID: ENST00000418389
  CDS Start-End: 79-765
ctcgcgatagccagccgcggctgcccttgcgcttcccgagctggcggggtccgtggtgcgggatcgagattgcgggctatggcgccgaaggtttttcgtcagtactgggatatccccgatggcaccgattgccaccgcaaagcctacagcaccaccagtattgccagcgtcgctggcctgaccgccgctgcctacagagtcacactcaatcctccgggcaccttccttgaaggagtggctaaggttggacaatacacgttcactgcagctgctgtcggggccgtgtttggcctcaccacctgcatcagcgcccatgtccgcgagaagcccgacgaccccctgaactacttcctcggtggctgcgccggaggcctgactctgggagcacgcaagacaggatctcactgtgttgtgcaggctggtctcaaactcctggcctcgagcagtcctcacacctcagcctcccagagtgctgggattataggcatgagccactgtgtacagagattctgggtcccttcttccagcgcctgcctcgaagtcctctctggagagagcacagatgtccacgcgtgttccagcacaaggggggcatgcaacagctcagggtcacgtccacttccggagctgggtgcccgggcctcgggctccctgagaaagggcggacacacccaccccgcacccagaggggcaggggccctgacacctgtccaagccctaatagagtcattgttaaacactctgggttcgaaccccagaacttgattctttccttgttctgtcctcagaggacggcagcacccaggcctcagctttcccacctggtaaatgggaataagggcccctcagagatgccccacaaagaaagacgattccacctccctgcaggcatcccatccactcacgggcatcgcatccactcgagggcaccggcctctgtctctactgcggccggcagggggcagcgcccaccacagcacggcctgctgggcagtgtggacccgggcggtcatccccaggcccccagccccgcggtgaccacaggcgtcagattccatcccttcctccgcactccaggccttgtctgtccctcatcccccttccttcccatgcatcctgcccaccgcagccgggaagtgatggcttctaggaatgggcaatacagccccaaacctccagccaaggacaccgaaggctggacaggaggaaagactagtccacgtccccacgacggtcaccctcagccctgcaccatggccgcttctgggactggttccacgcaggcctccgccccctgcaagcccttccccggccctccaggcccgtgtgcggcccaaaccctgtaccagatctcttagccctcttccacggatgcgcgcgctgaggcccaccctgggtagtggagcttgaaatttaaaggccgcacgccccttcgcacctcccagccccaggtgcctccctgtgttcaagggagccgacggctcagaccaggagctgtgctcgccgcccacccagcccattccgggctagccgccagggttggcgcaggcctgccaggcgcccccacctcgcctgcaggacgggccccccagaatggaacacgagggggtggtctcttgctgggctccagggaaccccaaagccgaggccccccggcccataaacatttactaggttgtggagggctgacgtcactcccaccccacacacaagagggcccccgtctggaacatcggtcccagcaggctccctgaggggctgtgggggacccttcctgagtttaccttgaacttcatggagcccttcccagccccaggcagtcagggctggaactgaggaggggcagagcctccctggggagctaggagggcttcctagaggaggaggcggcacagcagagagggcccaaggatgaagaggcttttccatgtgtacccagcgggaggctggtccaggcagagcacacagcaacagcagaggcctgctgtgagggagagcagtgggcgatcaggggcctcctggtccaggagaggtgcctgggggctgcagggcacacacttgcttcccgagaatccatccctggagacacatccccagcagagacaaggctccaagaacaccggcctggccctgcgccgtggctcaggcctgtaatcccagtactttgggaggccgaggctgggggatcacttgaggtcaggagtttcagaccaccctggccaacacagtgaaaccctgtctctactatacaaaaataagccaggtgtggtggcaggcacctgtaatcccagctacttgggaggctgaggcatgagaatcccttgaacctgggaggtggaggttgcagtgagccgagatcatgtcactgtactccagcctgggagacagtgagcgagactttgtatc

SEQ ID NO: 157465 - DNA, 657 bp, Homo sapiens
  Payload ID: 10862
  Gene Symbol: NDUFA11
  Gene Name: NADH dehydrogenase (ubiquinone) 1 alpha subcomplex, 11, 14.7kDa
  ENST ID: ENST00000593233
  CDS Start-End: 47-154
ttcccgagctggcggggtccgtggtgcgggatcgagattgcgggctatggcgccgaaggtttttcgtcagtactgggatatccccgatggcaccgattgccaccgcaaagcctacagcaccaccagtattgccagcgtcgctggtagggactgaaggttggagaagcatattaactgctccagggtcatttgaagctgggctgcaagtccaggtcggctgacctgctcctaggggtctctgaagcaaggaatgttcccatcaggcctgaccgccgctgcctacagagtcacactcaatcctccgggcaccttccttgaaggagtggctaaggttggacaatacacgttcactgcagctgctgtcggggccgtgtttggcctcaccacctgcatcagcgcccatgtccgcgagaagcccgacgaccccctgaactacttcctcggtggctgcgccggaggcctgactctgggagcacgcacgcacaactacgggattggcgccgccgcctgcgtgtactttggcatagcggcctccctggtcaagatgggccggctggagggctgggaggtgtttgcaaaacccaaggtgtgagccctgtgcctgccgggacctccagcctgcagaatgcgtccagaaataaattctgtgtctgtgtg

SEQ ID NO: 157466 - DNA, 2154 bp, Homo sapiens
  Payload ID: 10862
  Gene Symbol: NDUFA11
  Gene Name: NADH dehydrogenase (ubiquinone) 1 alpha subcomplex, 11, 14.7kDa
  ENST ID: ENST00000592634
  CDS Start-End: 64-426
cgcggctgcccttgcgcttcccgagctggcggggtccgtggtgcgggatcgagattgcgggctatggcgccgaaggtttttcgtcagtactgggatatccccgatggcaccgattgccaccgcaaagcctacagcaccaccagtattgccagcgtcgctggcctgaccgccgctgcctacagagtcacactcaatcctccgggcaccttccttgaaggagtggctaaggttggacaatacacgttcactgcagctgctgtcggggccgtgtttggcctcaccacctgcatcagcgcccatgtccgcgagaagcccgacgaccccctgaactacttcctcggtggctgcgccggaggcctgactctgggagcacgcagtgagtggccccctccccacccccaccctcctcccagcctggcagaatgacccctgacctctgctcatcctccaccctctctgttccatcccggacaagaagtaaagcagccttcttgaacaccagccatttcagtcatagcgacagctgctgctgctgcttaagcacctactgtggccctccctgacctgccctgtcccctccccaccctcccctcctcactctgctccagccacacgggcctcctcactgctcctcccacatgccaggtacagtcctgccccagggcctttgcatgggcagtgcactgcgtggaatgctgttcccctcactgtcctgaccaccctgtgtacaagccagcatccccgccgccctcgctctgtgccgccttccttctgtgtgccttgtcagaggacacaggtcaccaaggtcaccccctgtctctgccactggcctgtgagtcagagaggaggatggatggagtctcgccctgccatctctctccctgcacctggagccctgcaggggagctgcccccgcaaccttcactttacagaaaagggtattagggctcagggagggaattaagtggcccgaggtcacctggaggagcaagtggccttctttgcagccatcagagggtgcagccctggtggagaaggccacgcttggcacaggggagcccgtctggagcatgagccagacatcactcctgccctcccatgggcccgggctcagcgtcagtgcccgcctgtgcccctggcctacccccagcccgccaaggctcgggccctcagggccagcgggaggagtgaacgagccctcttgcagctcagccgctctggcctggcatgttgggagtgatgaatggcaggttccaggcaggcagagagggagggtgcgagggcagggcgtacgccgtcactgctgtctctgcgtcaagaccttggggaggccttgtccctccccagctcccactggaactggtcagaggttgcaggtgggttgaggtcttgactgtagcccagctcaggctggaactgctccctgtccccaagccagcctccctgtctctcttcaaagagtgtgagtccctttaggtcctggtgtgtggggacacacctccttcctcctctggcccggaggcttcggagcaggagagcctggagaagtgggggcactgtcggggctcctcggtacacagaccacgggacagatgcgtggcctggccctggcatccatgggcaaaggagagactgagacacaccgatgtgtcaccatggcccggtgcccagccttgccccagccccagctgggggcagcacggtgtcctcgcagggggaagtcagtgtggggcgggatgaggacccacagcctgggttcctgctgggaagcaacctggactccggcctccctctgtgcatcagtttccacatctccagagtctagggccctcttcctgagtgacttaatccctgaagagagtgtcctgtcaggggtctcagtctggctcccagggtgggcaccggccagggcgtggagcgtcttggtccggccgagccccacccgggcctgacatcacctccccactcccacagcgcacaactacgggattggcgccgccgcctgcgtgtactttggcatagcggcctccctggtcaagatgggccggctggagggctgggaggtgtttgcaaaacccaaggtgtgagccctgtgcctgccgggacctccagcctgcagaatgcgtccagaaataaattctgtgtctgtgtgtg

SEQ ID NO: 157467 - DNA, 635 bp, Homo sapiens
  Payload ID: 10863
  Gene Symbol: NDUFA12
  Gene Name: NADH dehydrogenase (ubiquinone) 1 alpha subcomplex, 12
  Uniprot ID: Q9UI09
  ENST ID: ENST00000327772
  CDS Start-End: 91-528
ttctgggcgtgggcttcctgcggctgagtggcagcttccatccggtgggttttgctcggcgcacccgggaggcggggccagcgaggcaagatggagttagtgcaggtcctgaaacgcgggctgcagcagatcaccggccacggcggtctccgaggctatctacgggtttttttcaggacaaatgatgcgaaggttggtacattagtgggggaagacaaatatggaaacaaatactatgaagacaacaagcaattttttggccgtcaccgatgggttgtatatactactgaaatgaatggcaaaaacacattctgggatgtggatggaagcatggtgcctcctgaatggcatcgttggcttcacagtatgactgatgatcctccaacaacaaaaccacttactgctcgtaaattcatttggacgaaccataaattcaacgtgactggcaccccagaacaatatgtaccttattctaccactagaaagaagattcaggagtggatcccaccttcaacaccttacaagtaaagacaatgaagaacagttgaaacatgcaaaatatggagcttttcatgtaattactcttttactgtttaccattcactataattcacaattaaaattgtgtgactaaa

SEQ ID NO: 157468 - DNA, 563 bp, Homo sapiens
  Payload ID: 10863
  Gene Symbol: NDUFA12
  Gene Name: NADH dehydrogenase (ubiquinone) 1 alpha subcomplex, 12
  ENST ID: ENST00000546788
  CDS Start-End: 69-368
gctgagtggcagcttccatccggtgggttttgctcggcgcacccgggaggcggggccagcgaggcaagatggagttagtgcaggtcctgaaacgcgggctgcagcagatcaccggccacggcggtctccgaggctatctacgggtttttttcaggacaaatgatgcgaaggttggtacattagtgggggaagacaaatatggaaacaaatactatgaagacaacaagcaattttttggccgtcaccgatgggttgtatatactactgaaatgaatggcaaaaacacattctgggatgtggatggaagcatggtgcctcctgaatggagcctcatgggttttaaactaaaccttcatgagccagagtaacctgagcatactgaaaatccagaatcggcctctagcacctaatagtaatactgcatcgttggcttcacagtatgactgatgatcctccaacaacaaaaccacttactgctcgtaaattcatttggacgaaccataaattcaacgtgactggcaccccagaacaatatgtaccttattctaccactagaaagaaga

SEQ ID NO: 157469 - DNA, 276 bp, Homo sapiens
  Payload ID: 10863
  Gene Symbol: NDUFA12
  Gene Name: NADH dehydrogenase (ubiquinone) 1 alpha subcomplex, 12
  ENST ID: ENST00000547157
  CDS Start-End: 21-188
ggcggggccagcgaggcaagatggagttagtgcaggtcctgaaacgcgggctgcagcagatcaccggccacggcggtctccgaggctatctacgggtttttttcaggacaaatgatgcgaagaaagaagattcaggagtggatcccaccttcaacaccttacaagtaaagacaatgaagaacagttgaaacatgcaaaatatggagcttttcatgtaattactcttttactgtttaccattcactataattcacaattaaaattgtgtgactaaac

SEQ ID NO: 157470 - DNA, 813 bp, Homo sapiens
  Payload ID: 10863
  Gene Symbol: NDUFA12
  Gene Name: NADH dehydrogenase (ubiquinone) 1 alpha subcomplex, 12
  ENST ID: ENST00000552205
  CDS Start-End: 1-163
gaaacgcgggctgcagcagatcaccggccacggcggtctccgaggctatctacgggtttttttcaggacaaatgatgcgaaggttggtacattagtgggggaagacaaatatggaaacaaatactatgaagacaacaagcaattttttggtgccctgctctgagctgctctatggagtggcctatgtggcaggaactgaagataatcttcaatgccagccagcaaaaaacggaggtcctcagtccaacatcccacaaggaaatgaattctgccaacaaccgtgtgaatgagactgcagtcttggtcagaaatgcgattgcagctttcagaagagactctggaatagaggacccaacaaacggatgcctggactcctgacccaaacccacagtaatggaatcaggacgtgcttgcccctgaaggttaaagctgatgtttgccccccaaggaaacctctttccatcaaagcatctctcaccatcatccctggcctacagagggcatccgcttttcaagaatgccaactcctctctcaccaatgtgtgttttttctgaaggttttgcttcccaaggaatggccttactgttcaaattcagatgcactaggcaagttcagaagacaagagtgaagatgagacgccaacagcctcacactgaggacgattctttctccagctccccactgcacaagcaagcttggtattcatcaatatgacatggtctggaagttttcctgtatattcatcagcttgggttactaaacaaagtacaaaatacttagtggctttagcaacataaatttactttctcaga

SEQ ID NO: 157471 - DNA, 546 bp, Homo sapiens
  Payload ID: 10863
  Gene Symbol: NDUFA12
  Gene Name: NADH dehydrogenase (ubiquinone) 1 alpha subcomplex, 12
  ENST ID: ENST00000551991
  CDS Start-End: 1-144
cgggtttttttcaggacaaatgatgcgaaggttggtacattagtgggggaagacaaatatggaaacaaatactatgaagacaacaagcaattttttgatgaagaaactgaggcccaaggaagtatctttaccaaagagacttaatcatgtaattaatggcagaacctggggccgtcaccgatgggttgtatatactactgaaatgaatggcaaaaacacattctgggatgtggatggaagcatggtgcctcctgaatggcatcgttggcttcacagtatgactgatgatcctccaacaacaaaaccacttactgctcgtaaattcatttggacgaaccataaattcaacgtgactggcaccccagaacaatatgtaccttattctaccactagaaagaagattcaggagtggatcccaccttcaacaccttacaagtaaagacaatgaagaacagttgaaacatgcaaaatatggagcttttcatgtaattactcttttactgtttaccattcactataattcacaattaaaattgtgtgactaaa

SEQ ID NO: 157472 - DNA, 487 bp, Homo sapiens
  Payload ID: 10863
  Gene Symbol: NDUFA12
  Gene Name: NADH dehydrogenase (ubiquinone) 1 alpha subcomplex, 12
  Uniprot ID: Q9UI09
  ENST ID: ENST00000547986
  CDS Start-End: 34-225
ggcgcacccgggaggcggggccagcgaggcaagatggagttagtgcaggtcctgaaacgcgggctgcagcagatcaccggccacggcggtctccgaggctatctacgggtttttttcaggacaaatgatgcgaaggttggtacattagtgggggaagacaaatatggaaacaaatactatgaagacaacaagcaattttttggcatcgttggcttcacagtatgactgatgatcctccaacaacaaaaccacttactgctcgtaaattcatttggacgaaccataaattcaacgtgactggcaccccagaacaatatgtaccttattctaccactagaaagaagattcaggagtggatcccaccttcaacaccttacaagtaaagacaatgaagaacagttgaaacatgcaaaatatggagcttttcatgtaattactcttttactgtttaccattcactataattcacaattaaaattgtgtgact

SEQ ID NO: 157473 - DNA, 991 bp, Homo sapiens
  Payload ID: 10864
  Gene Symbol: NDUFA13
  Gene Name: NADH dehydrogenase (ubiquinone) 1 alpha subcomplex, 13
  Uniprot ID: Q9P0J0
  ENST ID: ENST00000507754
  CDS Start-End: 485-919
gggagcagaatccgttccagggattggggtgagtccgacttcgagcagcagctgccccccaacatcatgtacccagcccgtgactacgtggagccctgggcttcgcgtagagtccctagacggggcgaaaacgggaaaaggggccttaactggggcacctggctcctttgagagctcggagtttctgactggcctgcgcaacaccccagaggcaaggtgaacgcgagggcctataatgcaagaaccaaggcgagtcacgccctgtctgggcaaaagaggagtaaagacccctcagctgcagcccggcagcgcattcctacccagggtccgccgccagagctttcccgcgcggtcggatagttacactactgtccgggacttcctagccgtgccgcggaccatctcaagtgcttccgccacactcatcatggcggtggcagtaagtcacttccgcccgggaccggaagtgtgggatactgcgagtatggcggcgtcaaaggtgaagcaggacatgcctccgccggggggctatgggcccatcgactacaaacggaacttgccgcgtcgaggactgtcgggctacagcatgctggccatagggattggaaccctgatctacgggcactggagcataatgaagtggaaccgtgagcgcaggcgcctacaaatcgaggacttcgaggctcgcatcgcgctgttgccactgttacaggcagaaaccgaccggaggaccttgcagatgcttcgggagaacctggaggaggaggccatcatcatgaaggacgtgcccgactggaaggtgggggagtctgtgttccacacaacccgctgggtgccccccttgatcggggagctgtacgggctgcgcaccacagaggaggctctccatgccagccacggcttcatgtggtacacgtaggccctgtgccctccggccacctggatccctgcccctccccactgggacggaataaatgctctgcagacctgg

SEQ ID NO: 157474 - DNA, 576 bp, Homo sapiens
  Payload ID: 10864
  Gene Symbol: NDUFA13
  Gene Name: NADH dehydrogenase (ubiquinone) 1 alpha subcomplex, 13
  ENST ID: ENST00000428459
  CDS Start-End: 10-462
actgcgagtatggcggcgtcaaaggtgaagcaggacatgcctccgccggggggctatgggcccatcgactacaaacggaacttgccgcgtcgaggactgtcgggctacagcatgctggccatagggattggaaccctgatctacgggcactggagcataatgaagtggaaccgtgagcgcaggcgcctacaaatcgaggacttcgaggctcgcatcgcgctgttgccactgttacaggcagaaaccgaccggaggaccttgcagatgcttcgggagaacctggaggaggaggccatcatcatgaaggacgtgcccgactggaaggtgggtcccggctgggagggcagaggtgccagccacggcagagacagggcctggggttggggagctcccacagctttctatagaaaccccaggaccaagggggtggtgggtgccaggtcccacaagggaaggctgtagcgcctgccacgcacaggggccactgatcctgggggatgggtcctagcaggctgtatatgggtggctgtgcctctacccataccccactgtccccacaggtgggggagtctgtgt

SEQ ID NO: 157475 - DNA, 1166 bp, Homo sapiens
  Payload ID: 10864
  Gene Symbol: NDUFA13
  Gene Name: NADH dehydrogenase (ubiquinone) 1 alpha subcomplex, 13
  ENST ID: ENST00000502506
  CDS Start-End: 504-827
gggatacccatcaccaccagggagcagaatccgttccagggattggggtgagtccgacttcgagcagcagctgccccccaacatcatgtacccagcccgtgactacgtggagccctgggcttcgcgtagagtccctagacggggcgaaaacgggaaaaggggccttaactggggcacctggctcctttgagagctcggagtttctgactggcctgcgcaacaccccagaggcaaggtgaacgcgagggcctataatgcaagaaccaaggcgagtcacgccctgtctgggcaaaagaggagtaaagacccctcagctgcagcccggcagcgcattcctacccagggtccgccgccagagctttcccgcgcggtcggatagttacactactgtccgggacttcctagccgtgccgcggaccatctcaagtgcttccgccacactcatcatggcggtggcagtaagtcacttccgcccgggaccggaagtgtgggatactgcgagtatggcggcgtcaaaggtgaagcaggacatgcctccgccggggggctatgggcccatcgactacaaacggaacttgccgcgtcgaggactgtcggaaaacccctggcatgggggcagaggtgtcacagtccaagcagcctcactcctgagaagccgccagtgtcccctgattgcagagtgggcagcgcctggagctgtggaggagggtgtctgggggcgggctggcccgctgagcagcgcctctcttcacaggctacagcatgctggccatagggattggaaccctgatctacgggcactggagcataatgaagtggaaccgtgagcgcaggcgcctacaaatcgaggacttcgaggctcgcatcgcgctgttgccactgttacaggcagaaaccgaccggaggaccttgcagatgcttcgggagaacctggaggaggaggccatcatcatgaaggacgtgcccgactggaaggtgggggagtctgtgttccacacaacccgctgggtgccccccttgatcggggagctgtacgggctgcgcaccacagaggaggctctccatgccagccacggcttcatgtggtacacgtaggccctgtgccctccggccacctggatccctgcccctccccactgggacggaataaatgctctgcagacctg

SEQ ID NO: 157476 - DNA, 825 bp, Homo sapiens
  Payload ID: 10864
  Gene Symbol: NDUFA13
  Gene Name: NADH dehydrogenase (ubiquinone) 1 alpha subcomplex, 13
  ENST ID: ENST00000503283
  CDS Start-End: 12-374
atactgcgagtatggcggcgtcaaaggtgaagcaggacatgcctccgccggggggctatgggcccatcgactacaaacggaacttgccgcgtcgaggactgtcgggctacagcatgctggccatagggattggaaccctgatctacgggcactggagcataatgaagtggaaccgtgagcgcaggcgcctacaaatcgaggacttcgaggctcgcatcgcgctgttgccactgttacaggcagaaaccgaccggaggaccttgcagatgcttcgggagaacctggaggaggaggccatcatcatgaaggacgtgcccgactggaaggattacaggcgtgagccaccataccttgtgcagccctgccaattgtaggcatggcgagggtatttgtctgcggaggggctcctcgctccctgagagggaagctcagagacacggggatatctgcagggaaagtaagtcgggggaagcaaccaagattggccaggtgcctctgctgtgggctcctggcacgaaagggtgaagtccgtctgagtccaccgaccaatggtgacgcgcagcgccttcgcggcgcttcctgattggcgggcatgcagggtgggcgggagggaggagaagagggggcgtcccctccctccacggatgcgcttaaaaggcggtggcggtggcggcagcgcccggcgcccgggctcacctcggccatgagcagcgcagccggcccagacccgtcggaggcgcccgaagagcggcatttcctcaggtcagctggggagagggaagctggagacgggcatggttcccatggggccaggagcagcccgta

SEQ ID NO: 157477 - DNA, 502 bp, Homo sapiens
  Payload ID: 10864
  Gene Symbol: NDUFA13
  Gene Name: NADH dehydrogenase (ubiquinone) 1 alpha subcomplex, 13
  ENST ID: ENST00000606722
  CDS Start-End: 1-227
aggacatgcctccgccggggggctatgggcccatcgactacaaacggaacttgccgcgtcgaggactgtcgggctacagcatgctggccatagggattggaaccctgatctacgggcactggagcataatgaagtggaaccgtgagcgcaggcgcctacaaatcgaggacttcgaggctcgcatcgcgctgttgccactgttacaggcagaaaccgaccggaggtagcaccgcaggggccaaggaccttgcagatgcttcgggagaacctggaggaggaggccatcatcatgaaggacgtgcccgactggaaggtgggggagtctgtgttccacacaacccgctgggtgccccccttgatcggggagctgtacgggctgcgcaccacagaggaggctctccatgccagccacggcttcatgtggtacacgtaggccctgtgccctccggccacctggatccctgcccctccccactgggacggaataaatgctctgcagacc

SEQ ID NO: 157478 - DNA, 804 bp, Homo sapiens
  Payload ID: 10865
  Gene Symbol: NDUFA2
  Gene Name: NADH dehydrogenase (ubiquinone) 1 alpha subcomplex, 2, 8kDa
  Uniprot ID: O43678
  ENST ID: ENST00000252102
  CDS Start-End: 203-502
gcttcctgtttttccctccgaccaaccccgagcgcaaagaaattgacctcgcagcggtcctacaatacttttatatcattggccaagctttaccccgcccctgcctcatgcagcctatgggctaggctttagggtccgcggttggtcagaccggagcacttggcctgaagacctggaattggcgacttcgatattaacaaggatggcggcggccgcagcaagtcgaggagtcggggcaaagctgggcctgcgtgagattcgcatccacttatgtcagcgctcgcccggcagccagggcgtcagggacttcattgagaaacgctacgtggagctgaagaaggcgaatcccgacctacccatcctaatccgcgaatgctccgatgtgcagcccaagctctgggcccgctacgcatttggccaagagacgaatgtccctttgaacaacttcagtgctgatcaggtaaccagagccctggagaacgttctaagtggtaaagcctgaagcctccactgaggattaagagcaacagccccagagcctgggctctgctggacttagtataatgtgaaaaaaatgtgttctcctattcctcataaagcttgtgctgtaaaatactttctcagggtgttcttgtcctcatctaccctctaccccttactgtgcaaccactgaggcaaagtagcttaatataaaaataaaactttattctgtctcatcaaaagctaccagctgctgaagcaaacatgaagggtggcgggggggcagggattctagggccccagagtaagtagaccacactgagt

SEQ ID NO: 157479 - DNA, 627 bp, Homo sapiens
  Payload ID: 10865
  Gene Symbol: NDUFA2
  Gene Name: NADH dehydrogenase (ubiquinone) 1 alpha subcomplex, 2, 8kDa
  Uniprot ID: O43678
  ENST ID: ENST00000512088
  CDS Start-End: 63-293
gttggtcagaccggagcacttggcctgaagacctggaattggcgacttcgatattaacaaggatggcggcggccgcagcaagtcgaggagtcggggcaaagctgggcctgcgtgagattcgcatccacttatgtcagcgctcgcccggcagccagggcgtcagggacttcattgagaaacgctacgtggagctgaagaaggcgaatcccgacctacccatcctaatccgcgaatgctccgatgtgcagcccaagctctgggcccgctacgcctccagggtgcagaatagttaaagacacctccctctctctcttcagcatttggccaagagacgaatgtccctttgaacaacttcagtgctgatcaggtaaccagagccctggagaacgttctaagtggtaaagcctgaagcctccactgaggattaagagcaacagccccagagcctgggctctgctggacttagtataatgtgaaaaaaatgtgttctcctattcctcataaagcttgtgctgtaaaatactttctcagggtgttcttgtcctcatctaccctctaccccttactgtgcaaccactgaggcaaagtagcttaatataaaaataaaactttattctgtctcatcaa

SEQ ID NO: 157480 - DNA, 435 bp, Homo sapiens
  Payload ID: 10866
  Gene Symbol: NDUFA3
  Gene Name: NADH dehydrogenase (ubiquinone) 1 alpha subcomplex, 3, 9kDa
  ENST ID: ENST00000391762
  CDS Start-End: 28-246
gccgctgtcgccgccgcggagacaaagatggctgcgagagtcggcgccttcctcaagaatgcctgggacaaggagccagtgctggtcgtgtccttcgtcgtcgggggcctcgctgtaattctgcccccattgagcccctacttcaagtactccgtcatgatcaacaaggccacgccctacaactacccagtagaggcggggtttcaccgtgttagccaggattgtctcgatctcctgaccttgtgatccactcacctcggcctcccaaagtgctgggattacagtgcccgtccgtgatgatgggaacatgcccgacgtgcccagccacccccaggaccctcagggccccagcctggagtggctgaagaaactgtgagcacctccactgacagaggcggcccctcccacggctcccaataaaaatgtgaaaaccaa

SEQ ID NO: 157481 - DNA, 338 bp, Homo sapiens
  Payload ID: 10866
  Gene Symbol: NDUFA3
  Gene Name: NADH dehydrogenase (ubiquinone) 1 alpha subcomplex, 3, 9kDa
  ENST ID: ENST00000391763
  CDS Start-End: 11-196
ggagacaaagatggctgcgagtaagtgcaggagtcggcgccttcctcaagaatgcctgggacaaggagccagtgctggtcgtgtccttcgtcgtcgggggcctcgctgtaattctgcccccattgagcccctacttcaagtactccgtcatgatcaacaaggccacgccctacaactacccagtgcccgtccgtgatgatgggaacatgcccgacgtgcccagccacccccaggaccctcagggccccagcctggagtggctgaagaaactgtgagcacctccactgacagaggcggcccctcccacggctcccaataaaaatgtgaaaaccaacccc

SEQ ID NO: 157482 - DNA, 267 bp, Homo sapiens
  Payload ID: 10866
  Gene Symbol: NDUFA3
  Gene Name: NADH dehydrogenase (ubiquinone) 1 alpha subcomplex, 3, 9kDa
  ENST ID: ENST00000391764
  CDS Start-End: 11-256
ggagacaaagatggctgcgagagtcggcgccttcctcaagaatgcctgggacaaggagccagtgctggtcgtgtccttcgtcgtcgggggcctcgctgtaattctgcccccattgagcccctacttcaagtactccgtcatgatcaacaaggccacgccctacaactacccagcggctggggaaaagggccacaggatagagctcagctcccactccactcaacgccaaagctgtcctggagccagacggtcctgagctctggcact

SEQ ID NO: 157483 - DNA, 339 bp, Homo sapiens
  Payload ID: 10866
  Gene Symbol: NDUFA3
  Gene Name: NADH dehydrogenase (ubiquinone) 1 alpha subcomplex, 3, 9kDa
  ENST ID: ENST00000420296
  CDS Start-End: 1-103
caagtactccgtcatgatcaacaaggccacgccctacaactacccagtagaggcggggtttcaccgtgttagccaggattgtctcgatctcctgaccttgtgatccactcacctcggcctcccaaagtgctgggattacagggccctggagacgtgctggtctcagtggcccacctcctgccccacagtgcccgtccgtgatgatgggaacatgcccgacgtgcccagccacccccaggaccctcagggccccagcctggagtggctgaagaaactgtgagcacctccactgacagaggcggcccctcccacggctcccaataaaaatgtgaaaaccaa

SEQ ID NO: 157484 - DNA, 654 bp, Homo sapiens
  Payload ID: 10866
  Gene Symbol: NDUFA3
  Gene Name: NADH dehydrogenase (ubiquinone) 1 alpha subcomplex, 3, 9kDa
  Uniprot ID: O95167
  ENST ID: ENST00000419113
  CDS Start-End: 59-313
gaccacaactcccagggtgctccgcgtcctcgccgctgtcgccgccgcggagacaaagatggctgcgagagtcggcgccttcctcaagaatgcctgggacaaggagccagtgctggtcgtgtccttcgtcgtcgggggcctcgctgtaattctgcccccattgagcccctacttcaagtactccgtcatgatcaacaaggccacgccctacaactacccagtgcccgtccgtgatgatgggaacatgcccgacgtgcccagccacccccaggaccctcagggccccagcctggagtggctgaagaaactgtgagcacctccactgacagaggcggcccctcccacggctcccaataaaaatgtgaaaaccaacccccgaacgtgagcatcggctggggaaaagggccacaggatagagctcagctcccactccactcaacgccaaagctgtcctggagccagacggtcctgagctctggcactggaggcctgggagccatgcccttgaccagccttgagacctcgagcaagacaaggcaaccattctgaggctgagtttcctgctctgcaaacgacatgacaccctcggctggatgttgcagcggtgacactgaagtagtgacaccagacgatttctgtacttaatgtgatgtc

SEQ ID NO: 157485 - DNA, 694 bp, Homo sapiens
  Payload ID: 10866
  Gene Symbol: NDUFA3
  Gene Name: NADH dehydrogenase (ubiquinone) 1 alpha subcomplex, 3, 9kDa
  ENST ID: ENST00000422029
  CDS Start-End: 1-209
gagtcggcgccttcctcaagaatgcctgggacaaggagccagtgctggtcgtgtccttcgtcgtcgggggcctcgctgtaattctgcccccattgagcccctacttcaagtactccgtcatgatcaacaaggccacgccctacaactacccagtagaggcggggtttcaccgtgttagccaggattgtctcgatctcctgaccttgtgatccactcacctcggcctcccaaagtgctgggattacagtgcccgtccgtgatgatgggaacatgcccgacgtgcccagccacccccaggaccctcagggccccagcctggagtggctgaagaaactgtgagcacctccactgacagaggcggcccctcccacggctcccaataaaaatgtgaaaaccaacccccgaaccggctggggaaaagggccacaggatagagctcagctcccactccactcaacgccaaagctgtcctggagccagacggtcctgagctctggcactggaggcctgggagccatgcccttgaccagccttgagacctcgagcaagacaaggcaaccattctgaggctgagtttcctgctctgcaaacgacatgacaccctcggctggatgttgcagcggtgacactgaagtagtgacaccagacgatttctgtacttaatgtgatgtcagcacttagtaaacattcatat

SEQ ID NO: 157486 - DNA, 445 bp, Homo sapiens
  Payload ID: 10866
  Gene Symbol: NDUFA3
  Gene Name: NADH dehydrogenase (ubiquinone) 1 alpha subcomplex, 3, 9kDa
  ENST ID: ENST00000451517
  CDS Start-End: 25-222
gctgtcgccgccgcggagacaaagatggctgcgagagtcggcgccttcctcaagaatgcctgggacaaggagccagtgctggtcgtgtccttcgtcgtcgggggcctcgaacagtcccatgacactacccccaggatgctccatgatgaccctacactcaaacgtgctcattccatgaccaaccccactgctgcctcctccaggccccacgtatctctgtaattctgcccccattgagcccctacttcaagtactccgtcatgatcaacaaggccacgccctacaactacccagtgcccgtccgtgatgatgggaacatgcccgacgtgcccagccacccccaggaccctcagggccccagcctggagtggctgaagaaactgtgagcacctccactgacagaggcggcccctcccacggctcccaataaaaatgtgaaaaccaa

SEQ ID NO: 157487 - DNA, 666 bp, Homo sapiens
  Payload ID: 10866
  Gene Symbol: NDUFA3
  Gene Name: NADH dehydrogenase (ubiquinone) 1 alpha subcomplex, 3, 9kDa
  ENST ID: ENST00000417903
  CDS Start-End: 152-349
cacaactcccagagtgctccgcgtccttgctttcgcctctacttgtgctccagggcgcacgcgcagccctgggagcgggttctcgcgcatagggaccacaactcccagggtgctccgcgtcctcgccgctgtcgccgccgcggagacaaagatggctgcgagagtcggcgccttcctcaagaatgcctgggacaaggagccagtgctggtcgtgtccttcgtcgtcgggggcctcgaacagtcccatgacactacccccaggatgctccatgatgaccctacactcaaacgtgctcattccatgaccaaccccactgctgcctcctccaggccccacgtatctctgtaattctgcccccattgagcccctacttcaagtactccgtcatgatcaacaaggccacgccctacaactacccagtagaggcggggtttcaccgtgttagccaggattgtctcgatctcctgaccttgtgatccactcacctcggcctcccaaagtgctgggattacagtgcccgtccgtgatgatgggaacatgcccgacgtgcccagccacccccaggaccctcagggccccagcctggagtggctgaagaaactgtgagcacctccactgacagaggcggcccctcccacggctcccaataaaaatgtgaaaaccaa

SEQ ID NO: 157488 - DNA, 963 bp, Homo sapiens
  Payload ID: 10866
  Gene Symbol: NDUFA3
  Gene Name: NADH dehydrogenase (ubiquinone) 1 alpha subcomplex, 3, 9kDa
  Uniprot ID: O95167
  ENST ID: ENST00000485876
  CDS Start-End: 43-297
gtgctccgcgtcctcgccgctgtcgccgccgcggagacaaagatggctgcgagagtcggcgccttcctcaagaatgcctgggacaaggagccagtgctggtcgtgtccttcgtcgtcgggggcctcgctgtaattctgcccccattgagcccctacttcaagtactccgtcatgatcaacaaggccacgccctacaactacccagtgcccgtccgtgatgatgggaacatgcccgacgtgcccagccacccccaggaccctcagggccccagcctggagtggctgaagaaactgtgagcacctccactgacagaggcggcccctcccacggctcccaataaaaatgtgaaaaccaacccccgaacgtgagcatgtgtgtgatcagaggtgggaacaagtagacggtggccggggtgagtgtggggtcagtttattgggcatgcgtcagtcagaggctgggctggccagggtcgggtagggcagcagtttgtctggaccccgagaaacccaactggaatccagggcctcatctgcttcaaagccaaagtcttcctcaaccttaatctgcaggagataaggaacaaggtgttaacaggcctgggaatctagaaaatcccatcagcttcaccatttttgttttcattttgttttgctttttaaagagacagggtctcactctgttgcccaggctggagtgcagtggtgccatcatagttcactgcagcctctgcctcccaggctcaagtgatcctcccacctcagcttcccaagtagctgggactacaggcacttgccaaccaagcctaacatgttttttctttttggtagagatggggtctcagtatgttgctcaggcaggtctcagactcctggcctcaagtgatcctcccacctaggcctcccaaagtgccgggattacaggcatgagccactgcacctggccagcctcacagttcttgtctg

SEQ ID NO: 157489 - DNA, 379 bp, Homo sapiens
  Payload ID: 10866
  Gene Symbol: NDUFA3
  Gene Name: NADH dehydrogenase (ubiquinone) 1 alpha subcomplex, 3, 9kDa
  ENST ID: ENST00000303553
  CDS Start-End: 195-320
gcgagtaagtgcaggtgccggtggcgcacggggctcgggtagttctgggaacctctgggcggtcctgggactgaggagtcggcgccttcctcaagaatgcctgggacaaggagccagtgctggtcgtgtccttcgtcgtcgggggcctcgctgtaattctgcccccattgagcccctacttcaagtactccgtcatgatcaacaaggccacgccctacaactacccagtgcccgtccgtgatgatgggaacatgcccgacgtgcccagccacccccaggaccctcagggccccagcctggagtggctgaagaaactgtgagcacctccactgacagaggcggcccctcccacggctcccaataaaaatgtgaaaaccaa

SEQ ID NO: 157490 - DNA, 646 bp, Homo sapiens
  Payload ID: 10866
  Gene Symbol: NDUFA3
  Gene Name: NADH dehydrogenase (ubiquinone) 1 alpha subcomplex, 3, 9kDa
  ENST ID: ENST00000471292
  CDS Start-End: 25-246
gctgtcgccgccgcggagacaaagatggctgcgagagtcggcgccttcctcaagaatgcctgggacaaggagccagtgctggtcgtgtccttcgtcgtcgggggcctcgctgtaattctgcccccattgagcccctacttcaagtactccgtcatgatcaacaaggccacgccctacaactacccaggtgagtgggggccaggcagggatccccggaataggcccagcctccctgtgctggcgtaagggcagttatgggcaggtctttcctaagcagttatcagagattctgcagtggtgcccggaccccccgttccattttttaagaattgagatataattcgtatactattctgtgtttgtgcttcgtttttgttttttggggtttttttgagacagagtctcgctctgtcgccaaggctggagtgcagtggcgcgatctcagctcactgcaagctcagcctcccgagtagctgggactacaggtgcccgccaccacgacacgcaaactttttcgtatttttttagtagaggcggggtttcaccgtgttagccaggattgtctcgatctcctgaccttgtgatccactcacctcggcctcccaaagtgctgggattacaggtgtgagccaccgcgcctggcctg

SEQ ID NO: 157491 - DNA, 435 bp, Homo sapiens; identical to SEQ ID NO: 157480
  Payload ID: 10866
  Gene Symbol: NDUFA3
  Gene Name: NADH dehydrogenase (ubiquinone) 1 alpha subcomplex, 3, 9kDa
  ENST ID: ENST00000610975
  CDS Start-End: 28-246

SEQ ID NO: 157492 - DNA, 654 bp, Homo sapiens; identical to SEQ ID NO: 157484
  Payload ID: 10866
  Gene Symbol: NDUFA3
  Gene Name: NADH dehydrogenase (ubiquinone) 1 alpha subcomplex, 3, 9kDa
  Uniprot ID: O95167
  ENST ID: ENST00000620289
  CDS Start-End: 59-313

SEQ ID NO: 157493 - DNA, 339 bp, Homo sapiens; identical to SEQ ID NO: 157483
  Payload ID: 10866
  Gene Symbol: NDUFA3
  Gene Name: NADH dehydrogenase (ubiquinone) 1 alpha subcomplex, 3, 9kDa
  ENST ID: ENST00000620109
  CDS Start-End: 1-103

SEQ ID NO: 157494 - DNA, 646 bp, Homo sapiens
  Payload ID: 10866
  Gene Symbol: NDUFA3
  Gene Name: NADH dehydrogenase (ubiquinone) 1 alpha subcomplex, 3, 9kDa
  ENST ID: ENST00000622065
  CDS Start-End: 25-246
gctgtcgccgccgcggagacaaagatggctgcgagagtcggcgccttcctcaagaatgcctgggacaaggagccagtgctggtcgtgtccttcgtcgtcgggggcctcgctgtaattctgcccccattgagcccctacttcaagtactccgtcatgatcaacaaggccacgccctacaactacccaggtgagtgggggccaggcagggatccccggaataggcccagcctccctgtgctggcgtaagggcagttatgggcaggtctttcctaagcagttatcagagattctgcagtggtgcccggaccccccgttccattttttaagaattgagatataattcgtatactattctgtgtttgtgcttcgtttttgtttttttgggtttttttgagacagagtctcgctctgtcgccaaggctggagtgcagtggcgcgatctcagctcactgcaagctcagcctcccgagtagctgggactacaggtgcccgccaccacgacacgcaaactttttcgtatttttttagtagaggcggggtttcaccgtgttagccaggattgtctcgatctcctgaccttgtgatccactcacctcggcctcccaaagtgctgggattacaggtgtgagccaccgcgcctggcctg

SEQ ID NO: 157495 - DNA, 267 bp, Homo sapiens; identical to SEQ ID NO: 157482
  Payload ID: 10866
  Gene Symbol: NDUFA3
  Gene Name: NADH dehydrogenase (ubiquinone) 1 alpha subcomplex, 3, 9kDa
  ENST ID: ENST00000619763
  CDS Start-End: 11-256

SEQ ID NO: 157496 - DNA, 694 bp, Homo sapiens; identical to SEQ ID NO: 157485
  Payload ID: 10866
  Gene Symbol: NDUFA3
  Gene Name: NADH dehydrogenase (ubiquinone) 1 alpha subcomplex, 3, 9kDa
  ENST ID: ENST00000615238
  CDS Start-End: 1-209

SEQ ID NO: 157497 - DNA, 666 bp, Homo sapiens; identical to SEQ ID NO: 157487
  Payload ID: 10866
  Gene Symbol: NDUFA3
  Gene Name: NADH dehydrogenase (ubiquinone) 1 alpha subcomplex, 3, 9kDa
  ENST ID: ENST00000610357
  CDS Start-End: 152-349

SEQ ID NO: 157498 - DNA, 445 bp, Homo sapiens; identical to SEQ ID NO: 157486
  Payload ID: 10866
  Gene Symbol: NDUFA3
  Gene Name: NADH dehydrogenase (ubiquinone) 1 alpha subcomplex, 3, 9kDa
  ENST ID: ENST00000615590
  CDS Start-End: 25-222

SEQ ID NO: 157499 - DNA, 379 bp, Homo sapiens
  Payload ID: 10866
  Gene Symbol: NDUFA3
  Gene Name: NADH dehydrogenase (ubiquinone) 1 alpha subcomplex, 3, 9kDa
  ENST ID: ENST00000611200
  CDS Start-End: 195-320
gcgagtaagtgcaggttccggtggcgcacggggctcgggtagttctgggaacctctgggcggtcctgggactgaggagtcggcgccttcctcaagaatgcctgggacaaggagccagtgctggtcgtgtccttcgtcgtcgggggcctcgctgtaattctgcccccattgagcccctacttcaagtactccgtcatgatcaacaaggccacgccctacaactacccagtgcccgtccgtgatgatgggaacatgcccgacgtgcccagccacccccaggaccctcagggccccagcctggagtggctgaagaaactgtgagcacctccactgacagaggcggcccctcccacggctcccaataaaaatgtgaaaaccaa

SEQ ID NO: 157500 - DNA, 963 bp, Homo sapiens; identical to SEQ ID NO: 157488
  Payload ID: 10866
  Gene Symbol: NDUFA3
  Gene Name: NADH dehydrogenase (ubiquinone) 1 alpha subcomplex, 3, 9kDa
  Uniprot ID: O95167
  ENST ID: ENST00000622523
  CDS Start-End: 43-297

SEQ ID NO: 157501 - DNA, 338 bp, Homo sapiens; identical to SEQ ID NO: 157481
  Payload ID: 10866
  Gene Symbol: NDUFA3
  Gene Name: NADH dehydrogenase (ubiquinone) 1 alpha subcomplex, 3, 9kDa
  ENST ID: ENST00000618420
  CDS Start-End: 11-196

SEQ ID NO: 157502 - DNA, 353 bp, Homo sapiens
  Payload ID: 10867
  Gene Symbol:
  Gene Name: NADH dehydrogenase (ubiquinone) 1 alpha subcomplex, 3, 9kDa [Source:EntrezGene
  Acc:4696]
  ENST ID: ENST00000613276
  CDS Start-End: 28-282
gccgctgtcgccgccgcggagacaaagatggctgcgagagtcggcgccttcctcaagaatgcctgggacaaggagccagtgctggtcgtgtccttcgtcgtcgggggcctcgctgtaattctgcccccattgagcccctacttcaagtactccgtcatgatcaacaaggccacgccctacaactacccagtgcccgtccgtgatgatgggaacatgcccgacgtgcccagccacccccaggaccctcagggccccagcctggagtggctgaagaaactgtgagcacctccactgacagaggcggcccctcccacggctcccaataaaaatgtgaaaaccaacccccgaacgtg

SEQ ID NO: 157503 - DNA, 353 bp, Homo sapiens; identical to SEQ ID NO: 157502
  Payload ID: 10867
  Gene Symbol:
  Gene Name: NADH dehydrogenase (ubiquinone) 1 alpha subcomplex, 3, 9kDa [Source:EntrezGene
  Acc:4696]
  ENST ID: ENST00000610406
  CDS Start-End: 28-282

SEQ ID NO: 157504 - DNA, 353 bp, Homo sapiens; identical to SEQ ID NO: 157502
  Payload ID: 10867
  Gene Symbol:
  Gene Name: NADH dehydrogenase (ubiquinone) 1 alpha subcomplex, 3, 9kDa [Source:EntrezGene
  Acc:4696]
  ENST ID: ENST00000612327
  CDS Start-End: 28-282

SEQ ID NO: 157505 - DNA, 353 bp, Homo sapiens; identical to SEQ ID NO: 157502
  Payload ID: 10867
  Gene Symbol:
  Gene Name: NADH dehydrogenase (ubiquinone) 1 alpha subcomplex, 3, 9kDa [Source:EntrezGene
  Acc:4696]
  Uniprot ID: O95167
  ENST ID: ENST00000618338
  CDS Start-End: 28-282

SEQ ID NO: 157506 - DNA, 353 bp, Homo sapiens; identical to SEQ ID NO: 157502
  Payload ID: 10867
  Gene Symbol:
  Gene Name: NADH dehydrogenase (ubiquinone) 1 alpha subcomplex, 3, 9kDa [Source:EntrezGene
  Acc:4696]
  ENST ID: ENST00000617282
  CDS Start-End: 28-282

SEQ ID NO: 157507 - DNA, 353 bp, Homo sapiens; identical to SEQ ID NO: 157502
  Payload ID: 10867
  Gene Symbol:
  Gene Name: NADH dehydrogenase (ubiquinone) 1 alpha subcomplex, 3, 9kDa [Source:EntrezGene
  Acc:4696]
  ENST ID: ENST00000621307
  CDS Start-End: 28-282

SEQ ID NO: 157508 - DNA, 353 bp, Homo sapiens; identical to SEQ ID NO: 157502
  Payload ID: 10867
  Gene Symbol:
  Gene Name: NADH dehydrogenase (ubiquinone) 1 alpha subcomplex, 3, 9kDa [Source:EntrezGene
  Acc:4696]
  ENST ID: ENST00000619253
  CDS Start-End: 28-282

SEQ ID NO: 157509 - DNA, 353 bp, Homo sapiens; identical to SEQ ID NO: 157502
  Payload ID: 10867
  Gene Symbol:
  Gene Name: NADH dehydrogenase (ubiquinone) 1 alpha subcomplex, 3, 9kDa [Source:EntrezGene
  Acc:4696]
  ENST ID: ENST00000619966
  CDS Start-End: 28-282

SEQ ID NO: 157510 - DNA, 1186 bp, Homo sapiens
  Payload ID: 10868
  Gene Symbol: NDUFA4L2
  Gene Name: NADH dehydrogenase (ubiquinone) 1 alpha subcomplex, 4-like 2
  Uniprot ID: Q9NRX3
  ENST ID: ENST00000393825
  CDS Start-End: 265-528
gtctccgcctgcaggtgcagacatctggaggagagagtcggagagcagaaaccacttggctcccagacaattcccctacaggctttgggcctggaattgaggagaaagtgagctaagttggggtggggtgagtccaaagaagcacgggctgggccaagctaagctgctctgggctgggctgatccctccccactcaggggcgggaccccaggaggagggagaggacagagccactgcagaggaccagactgggaaaacaacgatatggcaggagccagtcttggggcccgcttctaccggcagatcaaaagacatccggggatcatcccgatgatcggcttaatctgcctgggcatgggcagcgctgcgctttacttgctgcgactcgcccttcgcagccccgacgtctgctgggacagaaagaacaacccggagccctggaaccgcctgagccccaatgaccaatacaagttccttgcagtttccactgactataagaagctgaagaaggaccggccagacttctaagccaggctgggctgccagtgccatgcaagccacagccagccagcccatccacttcttccactcctccccgcaggccccaaggcatcactccggccaccctgtcccgctactgcttacacaggccgggttcccacgcagaggggaggctgctccacccctactctcctcccttgctcccagcagcggaagcgcctctgacccttggcttgagtcccacgtgggggaggaggaggcaggcagcaccagcaggggtccaccaagagcccagaccagcccctctgccctcctacccgggcctcgaagggtgtggcacaggctacgtgttgagcgtggcctacgtgagccaacaagaagcaggggcctctgagtgccaagcgacgtggcgggctccacgttagcccaggctctgagagccagcccaggggcggcgctgctcagcttgggctggtccagggcctgcccaggctggggcacctttgcctcctgaggcgcagcgcactcctcccctgcccaagcctactgcctcccgctgccgccagtaccccctccagccccacacctgggcctccccctgccactcccctcccttgctcccctctgtccccagggatcaaacagaagcagccgtgggcaaaatacaatttcatttaacaaattg

SEQ ID NO: 157511 - DNA, 1177 bp, Homo sapiens
  Payload ID: 10868
  Gene Symbol: NDUFA4L2
  Gene Name: NADH dehydrogenase (ubiquinone) 1 alpha subcomplex, 4-like 2
  Uniprot ID: Q9NRX3
  ENST ID: ENST00000554503
  CDS Start-End: 254-517
caggtgcagacatctggaggagagagtcggagagcagaaaccacttggctcccagacaattcccctacaggctttgggcctggaattgaggagaaagtgagctaagttggggtggggtgagtccaaagaagcacgggctgggccaagctaagctgctctgggctgggctgatccctccccactcaggggcgggaccccaggaggagggagaggacagagccactgcagaggaccagactgggaaaacaacgatatggcaggagccagtcttggggcccgcttctaccggcagatcaaaagacatccggggatcatcccgatgatcggcttaatctgcctgggcatgggcagcgctgcgctttacttgctgcgactcgcccttcgcagccccgacgtctgctgggacagaaagaacaacccggagccctggaaccgcctgagccccaatgaccaatacaagttccttgcagtttccactgactataagaagctgaagaaggaccggccagacttctaagccaggctgggctgccagtgccatgcaagccacagccagccagcccatccacttcttccactcctccccgcaggccccaaggcatcactccggccaccctgtcccgctactgcttacacaggccgggttcccacgcagaggggaggctgctccacccctactctcctcccttgctcccagcagcggaagcgcctctgacccttggcttgagtcccacgtgggggaggaggaggcaggcagcaccagcaggggtccaccaagagcccagaccagcccctctgccctcctacccgggcctcgaagggtgtggcacaggctacgtgttgagcgtggcctacgtgagccaacaagaagcaggggcctctgagtgccaagcgacgtggcgggctccacgttagcccaggctctgagagccagcccaggggcggcgctgctcagcttgggctggtccagggcctgcccaggctggggcacctttgcctcctgaggcgcagcgcactcctcccctgcccaagcctactgcctcccgctgccgccagtaccccctccagccccacacctgggcctccccctgccactcccctcccttgctcccctctgtccccagggatcaaacagaagcagccgtgggcaaaatacaatttcatttaacaaattgaa

SEQ ID NO: 157512 - DNA, 883 bp, Homo sapiens
  Payload ID: 10868
  Gene Symbol: NDUFA4L2
  Gene Name: NADH dehydrogenase (ubiquinone) 1 alpha subcomplex, 4-like 2
  ENST ID: ENST00000556732
  CDS Start-End: 8-289
caacgatatggcaggagccagtcttggggcccgcttctaccggcagatcaaaagacatccggggatcatcccgatgatcggcttaatctgcctgggcatgggcagcgctgcgctttacttgctgcgactcgcccttcgcagccccgacgtctgctgggacagaaagaacaacccggagccctggaaccgcctgagccccaatgaccaatacaaggtacctctcgatggctctagggttgccccccatcctcttatctcctggtcctggcacccacaactcccgtactagaagcaaagggaggcttggggtactcagcgcaaccccctttccctctcctcttagttccttgcagtttccactgactataagaagctgaagaaggaccggccagacttctaagccaggctgggctgccagtgccatgcaagccacagccagccagcccatccacttcttccactcctccccgcaggccccaaggcatcactccggccaccctgtcccgctactgcttacacaggccgggttcccacgcagaggggaggctgctccacccctactctcctcccttgctcccagcagcggaagcgcctctgacccttggcttgagtcccacgtgggggaggaggaggcaggcagcaccagcaggggtccaccaagagcccagaccagcccctctgccctcctacccgggcctcgaagggtgtggcacaggctacgtgttgagcgtggcctacgtgagccaacaagaagcaggggcctctgagtgccaagcgacgtggcgggctccacgttagcccaggctctgagagccagcccaggggcggcgctgctcagcttgggctggtccagggcctgcccaggctggggcacctttgcctc

SEQ ID NO: 157513 - DNA, 1901 bp, Homo sapiens
  Payload ID: 10869
  Gene Symbol: NDUFA5
  Gene Name: NADH dehydrogenase (ubiquinone) 1 alpha subcomplex, 5
  Uniprot ID: Q16718
  ENST ID: ENST00000355749
  CDS Start-End: 461-811
gtgcgaagaactaacttgctgttgagagatcaattcagaggatgctcaagctccgttatcactttcattttactaaactgagaaaggaaggttgaggaatgcatcaacggttaagcacagtgcaggttcctacagcgactggagttttttggtagttgggagtgtttccctcaatctttgggcaagccgtcagcagtggcaggaacaggaacagacagctgggaaaccctttctttccccaatcgtcttctagcttagctttaggcttgtatgcccatcgcgcatgcgtcaatttttctcttttaagatgggcggggcagagtctttgctcctttggcgatcctgaaggggtggagctaagctgtttccagggtgacagagtggcgacctcggtggtcgattgagcaggtctgagaattgttcccaaagggttgtgcgtcaccgagtcgttggcgctgtcatggcgggtgtgctgaagaagaccactggccttgtgggattggctgtgtgcaatactcctcacgagaggctaagaatattgtacacaaagattcttgatgttcttgaggaaatccctaaaaatgcagcatatagaaagtatacagaacagattacaaatgagaagctggctatggttaaagcggaaccagatgttaaaaaattagaagaccaacttcaaggcggtcaattagaagaggtgattcttcaggctgaacatgaactaaatctggcaagaaaaatgagggaatggaaactatgggagccattagtggaagagcctcctgccgatcagtggaaatggccaatataattattaagtgactttggtgtgttcatgggaaactgatgtaattaaatattctgttatattaagagcgtgttcttattactgacattttgtaatcaagaaaagtgatatagaaaatatgtaggagactgttaaaattggtgattatggtaatatggtcatgtgaatcaatttttgatttataaagtactcacacaagttgtttcaaagatgatatttctgtgaacagagaggccatgggaagatttgaaaattattaaagaaaaattcctacagattttcaatgcagagaccataatcaaaaagtaaactttctttagtagtatgttcaatacatcatttaattttttaagttatcctgaagaaggaaaggtccttaattattatagtctaaacaaatttatagattactgtttgaagtaaataatacgagtgaatattttcaaatgtgataaaatagcacaagtggctggtgataaaatttgaaattatggttaacctcagctgtgatcttatgtatgtaaagtgaaatttaaatagataattataggttgattacaaaatccatagtgtcattttattttagtcattattgaattataccatttactctgttttcttatagtcttaattttattatattttgttgttactgtattatatttgaaaaccttcaaattagaatacattgtacagttaaagaaattgacttggtacttaaaagaaagatttcccattgcatacaggttattggagaaattttccttttgttgcatttgtggaagttagttttctggcccgtggcctttaattttcttaatcaacctaattacatcaggatagaggtagagtttctgtaaaagaagagacattaagagttcctgaaatttatatctggcatacggataggcttatattcaaaacatcttagtcatacgaccataaattaaaagtggagtcactaaatagtttgcagtacgtttctaatataagtgtaggtgggtatcaaaacaagacaaatgctgttcagggaaagaagttggcaagcttaaggttaaacaaaaataaaattacatgtgttttcgccttccta

SEQ ID NO: 157514 - DNA, 1360 bp, Homo sapiens
  Payload ID: 10869
  Gene Symbol: NDUFA5
  Gene Name: NADH dehydrogenase (ubiquinone) 1 alpha subcomplex, 5
  ENST ID: ENST00000378795
  CDS Start-End: 1-337
tgaacagaccactggccttgtgggattggctgtgtgcaatactcctcacgagaggctaagaatattgtacacaaagattcttgatgttcttgaggaaatccctaaaaatgcagcatatagaaagtatacagaacagattacaaatgagaagctggctatggttaaagcggaaccagatgttaaaaaattagaagaccaacttcaaggcggtcaattagaagaggtgattcttcaggctgaacatgaactaaatctggcaagaaaaatgagggaatggaaactatgggagccattagtggaagagcctcctgccgatcagtggaaatggccaatataattattaagtgactttggtgtgttcatgggaaactgatgtaattaaatattctgttatattaagagcgtgttcttattactgacattttgtaatcaagaaaagtgatatagaaaatatgtaggagactgttaaaattggtgattatggtaatatggtcatgtgaatcaatttttgatttataaagtactcacacaagttgtttcaaagatgatatttctgtgaacagagaggccatgggaagatttgaaaattattaaagaaaaattcctacagattttcaatgcagagaccataatcaaaaagtaaactttctttagtagtatgttcaatacatcatttaattttttaagttatcctgaagaaggaaaggtccttaattattatagtctaaacaaatttatagattactgtttgaagtaaataatacgagtgaatattttcaaatgtgataaaatagcacaagtggctggtgataaaatttgaaattatggttaacctcagctgtgatcttatgtatgtaaagtgaaatttaaatagataattataggttgattacaaaatccatagtgtcattttattttagtcattattgaattataccatttactctgttttcttatagtcttaattttattatattttgttgttactgtattatatttgaaaaccttcaaattagaatacattgtacagttaaagaaattgacttggtacttaaaagaaagatttcccattgcatacaggttattggagaaattttccttttgttgcatttgtggaagttagttttctggcccgtggcctttaattttcttaatcaacctaattacatcaggatagaggtagagtttctgtaaaagaagagacattaagagttcctgaaatttatatctggcatacggataggcttatattcaaaacatcttagtcatacgaccataaattaaaagtggagtcactaaatagtttgcagtacgtttctaatataagtgtaggtgggtatcaaaacaagacaaatgctgt

SEQ ID NO: 157515 - DNA, 5608 bp, Homo sapiens
  Payload ID: 10869
  Gene Symbol: NDUFA5
  Gene Name: NADH dehydrogenase (ubiquinone) 1 alpha subcomplex, 5
  Uniprot ID: Q16718
  ENST ID: ENST00000471770
  CDS Start-End: 136-486
aagaaggtgagacgaatggaggtcactgttggaatttagactgtgggggtagactcagtccgatagccctacttcccgcgggtgttgacccctactgtcgcgggctcggcggtgcttttcggggactcgttctgcatgccttaccgggtagggcagaccactggccttgtgggattggctgtgtgcaatactcctcacgagaggctaagaatattgtacacaaagattcttgatgttcttgaggaaatccctaaaaatgcagcatatagaaagtatacagaacagattacaaatgagaagctggctatggttaaagcggaaccagatgttaaaaaattagaagaccaacttcaaggcggtcaattagaagaggtgattcttcaggctgaacatgaactaaatctggcaagaaaaatgagggaatggaaactatgggagccattagtggaagagcctcctgccgatcagtggaaatggccaatataattattaagtgactttggtgtgttcatgggaaactgatgtaattaaatattctgttatattaagagcgtgttcttattactgacattttgtaatcaagaaaagtgatatagaaaatatgtaggagactgttaaaattggtgattatggtaatatggtcatgtgaatcaatttttgatttataaagtactcacacaagttgtttcaaagatgatatttctgtgaacagagaggccatgggaagatttgaaaattattaaagaaaaattcctacagattttcaatgcagagaccataatcaaaaagtaaactttctttagtagtatgttcaatacatcatttaattttttaagttatcctgaagaaggaaaggtccttaattattatagtctaaacaaatttatagattactgtttgaagtaaataatacgagtgaatattttcaaatgtgataaaatagcacaagtggctggtgataaaatttgaaattatggttaacctcagctgtgatcttatgtatgtaaagtgaaatttaaatagataattataggttgattacaaaatccatagtgtcattttattttagtcattattgaattataccatttactctgttttcttatagtcttaattttattatattttgttgttactgtattatatttgaaaaccttcaaattagaatacattgtacagttaaagaaattgacttggtacttaaaagaaagatttcccattgcatacaggttattggagaaattttccttttgttgcatttgtggaagttagttttctggcccgtggcctttaattttcttaatcaacctaattacatcaggatagaggtagagtttctgtaaaagaagagacattaagagttcctgaaatttatatctggcatacggataggcttatattcaaaacatcttagtcatacgaccataaattaaaagtggagtcactaaatagtttgcagtacgtttctaatataagtgtaggtgggtatcaaaacaagacaaatgctgttcagggaaagaagttggcaagcttaaggttaaacaaaaataaaattacatgtgttttcgccttcctagctccctgtcattcctaaatacttggttaaatttaacgtggtatctctttccttcatagatagtactatactcttgtggggttttgtgtatacgtgtgtgtgtgtgtgtgtgtgtgtgtgtgtgtgtgtgtgtgtgtgcacgcgcatgcgcacatttgctcagaatgagaaaaaaatggtatttttccttctttccagtatatttctcccctcatagagctgtaacatgaatactaaataaatattaaataaggtggattcttagaggttagagtgcaagaaggctccttctggtggggaagtgttagagggggagttagaagcccagggtttctcattctcatggttctagtgttgttaactcaatgactacattgaggcaagtttggcctgtttctcagaatggcctatttctaatgctgcaaaagaaatagaatatgatttataacaacattttcagttctaaacatttcttgaatatataatatatttattaaaacatgatgctgaagtgtgtttgcatgggtactttcaaggtaattttctagccaaccattatttttcaggtcctttggacaacacagaaacaaagatggcttgctgtgtttttgtcatattttcagtcccgtatctgccatgattcttgggcatcttttatgtttcaccaacagtgttactgaacttttttgctaaaaggggaccttactggtgtttgcattagaaatgctagttgcagaataatagtcattgtaaaaataatattataacaataatagctaatgtttgttgagactttaatatgaatgtcaggcactatcataagtacctgactaatttcactcattaaacctgcactacaaccctaagagtgatactacaaattatcttcattttccagataagaaaccagaaccctacgtgagtagttttcccctgcaattatgcaacttggggccttggggacactgaaaccaagagatgatttaataacaaatccaaggtcacatagctagtaagatgtgaagctgaagtttgaacccaggcagtctggttctagaactgatgctcctgttatattattatttatgaatatgcttgggatgttgtgacttcttcctgtgctgtatgggctgtaccaaatgaaactagatcctgctctctttaccttttctgtcaaaattatctgtaaagaacaaatatgagcagaagtagtaaacgatttcattttctgcaaagagctgcatataggttataggcagattatgttaatgggataggtatctaaaaggtattgcaatttggtcattggttctttctcctgtctcaattgctcacagaactttacacctgatcgtttttactccttcagtcttttcccagttgcttcctataaacatccaggttaagtctcctgatcactttgcaaatgattcttttattcagagatcttcagtgttttgagtggctactaaactaattttaataattttcagaatggcctatttcagttctcccatgggtttcattctagttaatcatcatactgcagatacttcaaaagaaagagaagctaatcaatttgagctttgctaagaaagaagaaatggcaacaaagttgatgccccctttctcccacactgggacttagtgcagacgattccaatttcttggcattctttcctttgggatgaaaatggcttatatttaggataactataggataatttatcattccacttggaatgattttgagtgaaaataattacataaggataacagatgtacaccatgactgtcctgggcaaacaagatataggggggcaccctactggagtaaggctcaggtctcaaggttgccatctttcccacaccagtaggatcaactagtctgtcattggaatagaatgaattgatgccagcagtagtagtcatcatgtgcaatcaggcctcaagttttattgtatcctttcactctccctcattctcccctccccctccttttccctcagaattgggggatggaagaaaagagagcttatattttattgtcaattttctaatcacattcagaggagcgaagctaattaagccaataacaatgtttatgaatgtatcttttttaaaagggagatgacaatatataggaaaattcccacatgtaggctaatagcagctttttctttttcctcccatcctctatgattatgtaaacatacagaagtctaacaccctacacaagtgtattgtggggtatgggattaagtaccaaattgctgaacatatcactagtattttggatttgctgagtgcagtcttcccattaaaactaagtgttcagtagggaggcgtggtggctcacacctataatcccactactttgggaggccgaggtgggtggatcacttgaggtcaaaagttcgaggccagcctggccaatatggtgaaaccccgtctctactaaaaacaaaaacaaaaactaagtgttcagtgagattgtagcctatgctacaacaatagtaatgccaattgttttagagaaaagtaaatgagaggctaccagttgtgtttagaggaggtcgacgttttattttagacaaaattcacaggaaatcacagtgggaatgtgataaggggtttgaatgattgatggggacaggaagaattcatttgagagactagagatgagtcagtattctagatcgtgaagtaaaatagtgagtcatgtagtgacttagcatgggttatccttaaatcccagtgtcttaagtgtattttttattcatactgcatgtctaaggagggttggcaaggagtgctcatagacccacaaggaatccaggctgagtgtggcaccatcaacatatatttccatgaccatagtggtggtggggaattggaacatggtaaattacacataggaataaaaaaaaagaaacaaccaaggttaaatttttttttgactgtgccacaaaatttatgaattgaacttgccatgcatcactaataattttcaaattggtctttaggtttacattagcagctaattttttgtggtacacttaaatgtaatttatgattggcatctgtatataattaaatgaaaagcattgcaaagatttctattttggtatttctcatgatcttcaatttttttttaggtgaatctattaggttttctaaagataactatttttttttttttacaaaatattggcattttaatctctctataactggagggtgaattatttttcaccagagtaaaacaggtccaaagtcccttatctaaattcctaatttcaaaaatctctgaaaacaaagttttttcataactcatttggcaacaaaccccacctgaattacatgaggctatttgtggtatttatcgcacttcaatgtgaatatgaatatattttgccacagatgtatcaatatatttgattctaaactgcttcctcagaccctcttaatgtgttacataatgtaaagtatatgcccatatttcctttcaaaaatctgaaaaattgtgaatatcaaacacatctgtcttaaaaggtttcagaaaagggacaatagacctatatttccattctcttaacaagttcacaaagtggtattatgatccaaatttaatctaaataatttccaaaacaaaaattttcaggtccttagttttctaaattattttaatattaaaaatattcattattcattttaacctgtagtaacaacaggagatactttgaaatgcttgattttatcaagccactaggtggcatctttgtaaaaataaaagcacatcaaaagaaatgtttattacataaataaatgctgagatgaataaaggtagatgtttcatgagaaatacgaagtcgtttggtggaataaatcctgagaaaatgcatagatttatcatgaaaaggaaaatggaaaatggtattgtaaaattactctttcacttttggaattgagaagctttttcctattggttgttttcattaagtttgaatataaatttattatgtaaccaaa

SEQ ID NO: 157516 - DNA, 778 bp, Homo sapiens
  Payload ID: 10869
  Gene Symbol: NDUFA5
  Gene Name: NADH dehydrogenase (ubiquinone) 1 alpha subcomplex, 5
  ENST ID: ENST00000466896
  CDS Start-End: 7-219
gctgtcatggcgggtgtgctgaagaagaccactggccttgtgggattggctgtgtgcaatactcctcacgagaggctaagaatattgtacacaaagattcttgatgttcttgaggaaatccctaaaaatgcagcatatagaaagtatacagaacagattacaaatgagaagctggctatggttaaagcgcctatcataatgcaaattatcagtagttaatcaataagaaggtgttatttgagcaaagatttgaaaagtggtgaagaaacaagtgatgcagataccctgggccatccagcaagataccctgaggcagtaacatatcacgtcttgtgttgaaaagcaaaatgaaccagatgttaaaaaattagaagaccaacttcaaggcggtcaattagaagaggtgattcttcaggctgaacatgaactaaatctggcaagaaaaatgagggaatggaaactatgggagccattagtggaagagcctcctgccgatcagtggaaatggccaatataattattaagtgactttggtgtgttcatgggaaactgatgtaattaaatattctgttatattaagagcgtgttcttattactgacattttgtaatcaagaaaagtgatatagaaaatatgtaggagactgttaaaattggtgattatggtaatatggtcatgtgaatcaatttttgatttataaagtactcacacaagttgtttcaaagatgatatttctgtgaacagagaggccatgggaagatttgaaaattattaaagaa

SEQ ID NO: 157517 - DNA, 459 bp, Homo sapiens
  Payload ID: 10869
  Gene Symbol: NDUFA5
  Gene Name: NADH dehydrogenase (ubiquinone) 1 alpha subcomplex, 5
  ENST ID: ENST00000470123
  CDS Start-End: 181-459
gggctcggcggtgcttttcggggactcgttctgcatgccttaccgggtagggcaggttagtggttccgctccgagagtcaggaaaaaagctccaaacaagcgagactgagagaccagtagctggctttagaccagttttagccgggggattcgtggttttgtatttccttagcgtgctggatgtatggaaaccgtagtaaacagcatgaatcgtgttttgtttttgaacagaccactggccttgtgggattggctgtgtgcaatactcctcacgagaggctaagaatattgtacacaaagattcttgatgttcttgaggaaatccctaaaaatgcagcatatagaaagtatacagaacagattacaaatgagaagctggctatggttaaagcggaaccagatgttaaaaaattagaagaccaacttcaaggcggtcaattagaagaggtgattcttcag

SEQ ID NO: 157518 - DNA, 1432 bp, Homo sapiens
  Payload ID: 10869
  Gene Symbol: NDUFA5
  Gene Name: NADH dehydrogenase (ubiquinone) 1 alpha subcomplex, 5
  ENST ID: ENST00000618945
  CDS Start-End: 110-343
tggagctaagctgtttccagggtgacagagtggcgacctcggtggtcgattgagcaggtctgagaattgttcccaaagggttgtgcgtcaccgagtcgttggcgctgtcatggcgggtgtgctgaagaagaccactggccttgtgggattggctgtgtgcaatactcctcacgaggaaccagatgttaaaaaattagaagaccaacttcaaggcggtcaattagaagaggtgattcttcaggctgaacatgaactaaatctggcaagaaaaatgagggaatggaaactatgggagccattagtggaagagcctcctgccgatcagtggaaatggccaatataattattaagtgactttggtgtgttcatgggaaactgatgtaattaaatattctgttatattaagagcgtgttcttattactgacattttgtaatcaagaaaagtgatatagaaaatatgtaggagactgttaaaattggtgattatggtaatatggtcatgtgaatcaatttttgatttataaagtactcacacaagttgtttcaaagatgatatttctgtgaacagagaggccatgggaagatttgaaaattattaaagaaaaattcctacagattttcaatgcagagaccataatcaaaaagtaaactttctttagtagtatgttcaatacatcatttaattttttaagttatcctgaagaaggaaaggtccttaattattatagtctaaacaaatttatagattactgtttgaagtaaataatacgagtgaatattttcaaatgtgataaaatagcacaagtggctggtgataaaatttgaaattatggttaacctcagctgtgatcttatgtatgtaaagtgaaatttaaatagataattataggttgattacaaaatccatagtgtcattttattttagtcattattgaattataccatttactctgttttcttatagtcttaattttattatattttgttgttactgtattatatttgaaaaccttcaaattagaatacattgtacagttaaagaaattgacttggtacttaaaagaaagatttcccattgcatacaggttattggagaaattttccttttgttgcatttgtggaagttagttttctggcccgtggcctttaattttcttaatcaacctaattacatcaggatagaggtagagtttctgtaaaagaagagacattaagagttcctgaaatttatatctggcatacggataggcttatattcaaaacatcttagtcatacgaccataaattaaaagtggagtcactaaatagtttgcagtacgtttctaatataagtgtaggtgggtatcaaaacaagacaaatgctgttcagggaaagaagttggcaagcttaaggttaaacaaaaataaaattacatgtgttttcgccttcct

SEQ ID NO: 157519 - DNA, 1504 bp, Homo sapiens
  Payload ID: 10869
  Gene Symbol: NDUFA5
  Gene Name: NADH dehydrogenase (ubiquinone) 1 alpha subcomplex, 5
  ENST ID: ENST00000611607
  CDS Start-End: 110-415
tggagctaagctgtttccagggtgacagagtggcgacctcggtggtcgattgagcaggtctgagaattgttcccaaagggttgtgcgtcaccgagtcgttggcgctgtcatggcgggtgtgctgaagaagaggctaagaatattgtacacaaagattcttgatgttcttgaggaaatccctaaaaatgcagcatatagaaagtatacagaacagattacaaatgagaagctggctatggttaaagcggaaccagatgttaaaaaattagaagaccaacttcaaggcggtcaattagaagaggtgattcttcaggctgaacatgaactaaatctggcaagaaaaatgagggaatggaaactatgggagccattagtggaagagcctcctgccgatcagtggaaatggccaatataattattaagtgactttggtgtgttcatgggaaactgatgtaattaaatattctgttatattaagagcgtgttcttattactgacattttgtaatcaagaaaagtgatatagaaaatatgtaggagactgttaaaattggtgattatggtaatatggtcatgtgaatcaatttttgatttataaagtactcacacaagttgtttcaaagatgatatttctgtgaacagagaggccatgggaagatttgaaaattattaaagaaaaattcctacagattttcaatgcagagaccataatcaaaaagtaaactttctttagtagtatgttcaatacatcatttaattttttaagttatcctgaagaaggaaaggtccttaattattatagtctaaacaaatttatagattactgtttgaagtaaataatacgagtgaatattttcaaatgtgataaaatagcacaagtggctggtgataaaatttgaaattatggttaacctcagctgtgatcttatgtatgtaaagtgaaatttaaatagataattataggttgattacaaaatccatagtgtcattttattttagtcattattgaattataccatttactctgttttcttatagtcttaattttattatattttgttgttactgtattatatttgaaaaccttcaaattagaatacattgtacagttaaagaaattgacttggtacttaaaagaaagatttcccattgcatacaggttattggagaaattttccttttgttgcatttgtggaagttagttttctggcccgtggcctttaattttcttaatcaacctaattacatcaggatagaggtagagtttctgtaaaagaagagacattaagagttcctgaaatttatatctggcatacggataggcttatattcaaaacatcttagtcatacgaccataaattaaaagtggagtcactaaatagtttgcagtacgtttctaatataagtgtaggtgggtatcaaaacaagacaaatgctgttcagggaaagaagttggcaagcttaaggttaaacaaaaataaaattacatgtgttttcgccttcct

SEQ ID NO: 157520 - DNA, 1256 bp, Homo sapiens
  Payload ID: 10870
  Gene Symbol: NDUFA6
  Gene Name: NADH dehydrogenase (ubiquinone) 1 alpha subcomplex, 6, 14kDa
  Uniprot ID: P56556
  ENST ID: ENST00000498737
  CDS Start-End: 134-598
ggcgtttctgtagatgagcatgcgcagcacccaccgttcgctcagccagagagaggcttcccagccaatccgagagcctcagagtcatcctcccgcccacccagcatacaggcggggcgttcctccttagccaatgggaaaagacattcgcccgcggtccgcacgcgctgcttgcaaaggggtggggttgtggagtggatgctttggcaagatggcggggagcggcgtccgccaagctacttctaccgccagcaccttcgtgaagcccattttcagtcgggacatgaacgaggccaagcggagggtgcgcgagctctaccgcgcctggtatcgggaggtgccgaacactgtgcaccaattccagctggacatcactgtgaaaatgggacgggataaagtccgagaaatgtttatgaagaatgcccatgtcacagaccccagggtggttgatcttctggtcattaagggaaagatcgaactggaagaaacaattaaagtatggaagcagcggacacatgttatgcggttcttccatgaaacagaagcgccaaggccaaaggatttcctatccaagttctatgttggccacgatccatgaagtcattcagtggaaagatgcacgttgatactattttagagcacaaataaactcactatacaatggtcactttgtgatagaattccattgatgaaccaattttctgcagcctctttttgcctgagcaagtgggaccttggtatacacatcacctgttctttcccttttcttgaaatgtggtgtttgctgtaaattggattgaattatttttctcagagccttgcatgtcagtaaacaggaaggaaggaggccatctgttcaaaaattgtgacattgggcatgaggctggacgacttgttaatgtagttgtttctatagcccctatgattagacacttcagtgtcagggcacagattatctaaaattagccagctcttcctgtcagggatcagggcagcactaacaggcgcaaaagtagagctgtcaagatgggctagttttccttgggttctgaagaaaatggatgtgcaaaggcttggctccgctacttgtaacaagctccagcccttaaaatgaaattaacttcctactcaggcaccctgcttaggtgcacagctgttcaatatacacagagaacagaaatattcctactgtctttggaaaccctggtgtacctctcagtggcagaataaacatcaacacaggttcaagaactgat

SEQ ID NO: 157521 - DNA, 1080 bp, Homo sapiens
  Payload ID: 10870
  Gene Symbol: NDUFA6
  Gene Name: NADH dehydrogenase (ubiquinone) 1 alpha subcomplex, 6, 14kDa
  ENST ID: ENST00000602404
  CDS Start-End: 36-422
aaggggtggggttgtggagtggatgctttggcaagatggcggggagcggcgtccgccaagctacttctaccgccagcaccttcgtgaagcccattttcagtcgggacatgaacgaggccaagcggagggtgcgcgagctctaccgcgcctggtatcgggaggtgccgaacactgtgcaccaattccagctggacatcactgtgaaaatgggacgggataaagtccgagaaatgtttatgaagaatgcccatgtcacagaccccagggtggttgatcttctggtcattaagggaaagatcgaactggaagaaacaattaaagtatggaagcagcggacacatgttatgcggttcttccatgaaacagaagcgccaaggccaaaggatttcctatccaagttctatgttggccacgatccatgaagtcattcagtggaaagatgcacgttgatactattttagagcacaaataaactcactatacaatggtcactttgtgatagaattccattgatgaaccaattttctgcagcctctttttgcctgagcaagtgggaccttggtatacacatcacctgttctttcccttttcttgaaatgtggtgtttgctgtaaattggattgaattatttttctcagagccttgcatgtcagtaaacaggaaggaaggaggccatctgttcaaaaattgtgacattgggcatgaggctggacgacttgttaatgtagttgtttctatagcccctatgattagacacttcagtgtcagggcacagattatctaaaattagccagctcttcctgtcagggatcagggcagcactaacaggcgcaaaagtagagctgtcaagatgggctagttttccttgggttctgaagaaaatggatgtgcaaaggcttggctccgctacttgtaacaagctccagcccttaaaatgaaattaacttcctactcaggcaccctgcttaggtgcacagctgttcaatatacacagagaacagaaatattcctactgtctttggaaaccctggtgtacctctcagtggcagaataaacatcaacacaggttcaagaactgat

SEQ ID NO: 157522 - DNA, 475 bp, Homo sapiens
  Payload ID: 10870
  Gene Symbol: NDUFA6
  Gene Name: NADH dehydrogenase (ubiquinone) 1 alpha subcomplex, 6, 14kDa
  ENST ID: ENST00000470753
  CDS Start-End: 193-408
atgaatcacatgtctcatcctcaagcacctagcctagggtcaggctaattttttggtgaagaaatgaatgggcgacctgtatgtgttcaatgagtatcatttgactctaggttttatttaaccatacaatttctaccctgagtcatgtttttctctctagtgcaccaattccagctggacatcactgtgaaaatgggacgggataaagtccgagaaatgtttatgaagaatgcccatgtcacagaccccagggtggttgatcttctggtcattaagggaaagatcgaactggaagaaacaattaaagtatggaagcagcggacacatgttatgcggttcttccatgaaacagaagcgccaaggccaaaggatttcctatccaagttctatgttggccacgatccatgaagtcattcagtggaaagatgcacgttgatactattttagagcacaaataaactcactatacaatggt

SEQ ID NO: 157523 - DNA, 1256 bp, Homo sapiens; identical to SEQ ID NO: 157520
  Payload ID: 10870
  Gene Symbol: NDUFA6
  Gene Name: NADH dehydrogenase (ubiquinone) 1 alpha subcomplex, 6, 14kDa
  Uniprot ID: P56556
  ENST ID: ENST00000605916
  CDS Start-End: 134-598

SEQ ID NO: 157524 - DNA, 1256 bp, Homo sapiens; identical to SEQ ID NO: 157520
  Payload ID: 10870
  Gene Symbol: NDUFA6
  Gene Name: NADH dehydrogenase (ubiquinone) 1 alpha subcomplex, 6, 14kDa
  Uniprot ID: P56556
  ENST ID: ENST00000605927
  CDS Start-End: 134-598

SEQ ID NO: 157525 - DNA, 1183 bp, Homo sapiens
  Payload ID: 10870
  Gene Symbol: NDUFA6
  Gene Name: NADH dehydrogenase (ubiquinone) 1 alpha subcomplex, 6, 14kDa
  Uniprot ID: P56556
  ENST ID: ENST00000617763
  CDS Start-End: 63-527
gagagcctcagagtcatcctcccgcccacccagcatacaggcggggcgttcctccttagccaatgggaaaagacattcgcccgcggtccgcacgcgctgcttgcaaaggggtggggttgtggagtggatgctttggcaagatggcggggagcggcgtccgccaagctacttctaccgccagcaccttcgtgaagcccattttcagtcgggacatgaacgaggccaagcggagggtgcgcgagctctaccgcgcctggtatcgggaggtgccgaacactgtgcaccaattccagctggacatcactgtgaaaatgggacgggataaagtccgagaaatgtttatgaagaatgcccatgtcacagaccccagggtggttgatcttctggtcattaagggaaagatcgaactggaagaaacaattaaagtatggaagcagcggacacatgttatgcggttcttccatgaaacagaagcgccaaggccaaaggatttcctatccaagttctatgttggccacgatccatgaagtcattcagtggaaagatgcacgttgatactattttagagcacaaataaactcactatacaatggtcactttgtgatagaattccattgatgaaccaattttctgcagcctctttttgcctgagcaagtgggaccttggtatacacatcacctgttctttcccttttcttgaaatgtggtgtttgctgtaaattggattgaattatttttctcagagccttgcatgtcagtaaacaggaaggaaggaggccatctgttcaaaaattgtgacattgggcatgaggctggacgacttgttaatgtagttgtttctatagcccctatgattagacacttcagtgtcagggcacagattatctaaaattagccagctcttcctgtcagggatcagggcagcactaacaggcgcaaaagtagagctgtcaagatgggctagttttccttgggttctgaagaaaatggatgtgcaaaggcttggctccgctacttgtaacaagctccagcccttaaaatgaaattaacttcctactcaggcaccctgcttaggtgcacagctgttcaatatacacagagaacagaaatattcctactgtctttggaaaccctggtgtacctctcagtggcagaataaacatcaacacaggttcaagaactg

SEQ ID NO: 157526 - DNA, 1256 bp, Homo sapiens; identical to SEQ ID NO: 157520
  Payload ID: 10870
  Gene Symbol: NDUFA6
  Gene Name: NADH dehydrogenase (ubiquinone) 1 alpha subcomplex, 6, 14kDa
  Uniprot ID: P56556
  ENST ID: ENST00000610887
  CDS Start-End: 134-598

SEQ ID NO: 157527 - DNA, 475 bp, Homo sapiens; identical to SEQ ID NO: 157522
  Payload ID: 10870
  Gene Symbol: NDUFA6
  Gene Name: NADH dehydrogenase (ubiquinone) 1 alpha subcomplex, 6, 14kDa
  ENST ID: ENST00000607132
  CDS Start-End: 193-408

SEQ ID NO: 157528 - DNA, 1183 bp, Homo sapiens
  Payload ID: 10870
  Gene Symbol: NDUFA6
  Gene Name: NADH dehydrogenase (ubiquinone) 1 alpha subcomplex, 6, 14kDa
  Uniprot ID: P56556
  ENST ID: ENST00000627617
  CDS Start-End: 63-527
gagagcctcagagtcatcctcccgcccacccagcatacaggcggggcgttcctccttagccaatgggaaaagacattcgcccgcggtccgcacgcgctgcttgcaaaggggtggggttgtggagtggatgctttggcaagatggcggggagcggcgtccgccaagctacttctaccgccagcaccttcgtgaagcccattttcagtcgggacatgaacgaggccaagcggagggtgcgcgagctctaccgcgcctggtatcgggaggtgccgaacactgtgcaccaattccagctggacatcactgtgaaaatgggacgggataaagtccgagaaatgtttatgaagaatgcccatgtcacagaccccagggtggttgatcttctggtcattaagggaaagatcgaactggaagaaacaattaaagtatggaagcagcggacacatgttatgcggttcttccatgaaacagaagcgccaaggccaaaggatttcctatccaagttctatgttggccacgatccatgaagtcattcagtggaaagatgcacgttgatactattttagagcacaaataaactcactatacaatggtcactttgtgatagaattccattgatgaaccaattttctgcagcctctttttgcctgagcaagtgggaccttggtatacacatcacctgttctttcccttttcttgaaatgtggtgtttgctgtaaattggattgaattatttttctcagagccttgcatgtcagtaaacaggaaggaaggaggccatctgttcaaaaattgtgacattgggcatgaggctggacgacttgttaatgtagttgtttctatagcccctatgattagacactttagtgtcagggcacagattatctaaaattagccagctcttcctgtcagggatcagggcagcactaacaggcgcaaaagtagagctgtcaagatgggctagttttccttgggttctgaagaaaatggatgtgcaaaggcttggctccgctacttgtaacaagctccagcccttaaaatgaaattaacttcctactcaggcaccctgcttaggtgcacagctgttcaatatacacagagaacagaaatattcctactgtctttggaaaccctggtgtacctctcagtggcagaataaacatcaacacaggttcaagaactg

SEQ ID NO: 157529 - DNA, 475 bp, Homo sapiens; identical to SEQ ID NO: 157522
  Payload ID: 10870
  Gene Symbol: NDUFA6
  Gene Name: NADH dehydrogenase (ubiquinone) 1 alpha subcomplex, 6, 14kDa
  ENST ID: ENST00000628198
  CDS Start-End: 193-408

SEQ ID NO: 157530 - DNA, 475 bp, Homo sapiens; identical to SEQ ID NO: 157522
  Payload ID: 10870
  Gene Symbol: NDUFA6
  Gene Name: NADH dehydrogenase (ubiquinone) 1 alpha subcomplex, 6, 14kDa
  ENST ID: ENST00000630511
  CDS Start-End: 193-408

SEQ ID NO: 157531 - DNA, 475 bp, Homo sapiens; identical to SEQ ID NO: 157522
  Payload ID: 10870
  Gene Symbol: NDUFA6
  Gene Name: NADH dehydrogenase (ubiquinone) 1 alpha subcomplex, 6, 14kDa
  ENST ID: ENST00000628004
  CDS Start-End: 193-408

SEQ ID NO: 157532 - DNA, 1080 bp, Homo sapiens
  Payload ID: 10870
  Gene Symbol: NDUFA6
  Gene Name: NADH dehydrogenase (ubiquinone) 1 alpha subcomplex, 6, 14kDa
  ENST ID: ENST00000625834
  CDS Start-End: 36-422
aaggggtggggttgtggagtggatgctttggcaagatggcggggagcggcgtccgccaagctacttctaccgccagcaccttcgtgaagcccattttcagtcgggacatgaacgaggccaagcggagggtgcgcgagctctaccgcgcctggtatcgggaggtgccgaacactgtgcaccaattccagctggacatcactgtgaaaatgggacgggataaagtccgagaaatgtttatgaagaatgcccatgtcacagaccccagggtggttgatcttctggtcattaagggaaagatcgaactggaagaaacaattaaagtatggaagcagcggacacatgttatgcggttcttccatgaaacagaagcgccaaggccaaaggatttcctatccaagttctatgttggccacgatccatgaagtcattcagtggaaagatgcacgttgatactattttagagcacaaataaactcactatacaatggtcactttgtgatagaattccattgatgaaccaattttctgcagcctctttttgcctgagcaagtgggaccttggtatacacatcacctgttctttcccttttcttgaaatgtggtgtttgctgtaaattggattgaattatttttctcagagccttgcatgtcagtaaacaggaaggaaggaggccatctgttcaaaaattgtgacattgggcatgaggctggacgacttgttaatgtagttgtttctatagcccctatgattagacactttagtgtcagggcacagattatctaaaattagccagctcttcctgtcagggatcagggcagcactaacaggcgcaaaagtagagctgtcaagatgggctagttttccttgggttctgaagaaaatggatgtgcaaaggcttggctccgctacttgtaacaagctccagcccttaaaatgaaattaacttcctactcaggcaccctgcttaggtgcacagctgttcaatatacacagagaacagaaatattcctactgtctttggaaaccctggtgtacctctcagtggcagaataaacatcaacacaggttcaagaactgat

SEQ ID NO: 157533 - DNA, 1080 bp, Homo sapiens; identical to SEQ ID NO: 157521
  Payload ID: 10870
  Gene Symbol: NDUFA6
  Gene Name: NADH dehydrogenase (ubiquinone) 1 alpha subcomplex, 6, 14kDa
  ENST ID: ENST00000628740
  CDS Start-End: 36-422

SEQ ID NO: 157534 - DNA, 1256 bp, Homo sapiens
  Payload ID: 10870
  Gene Symbol: NDUFA6
  Gene Name: NADH dehydrogenase (ubiquinone) 1 alpha subcomplex, 6, 14kDa
  Uniprot ID: P56556
  ENST ID: ENST00000630201
  CDS Start-End: 134-598
ggcgtttctgtagatgagcatgcgcagcacccaccgttcgctcagccagagagaggcttcccagccaatccgagagcctcagagtcatcctcccgcccacccagcatacaggcggggcgttcctccttagccaatgggaaaagacattcgcccgcggtccgcacgcgctgcttgcaaaggggtggggttgtggagtggatgctttggcaagatggcggggagcggcgtccgccaagctacttctaccgccagcaccttcgtgaagcccattttcagtcgggacatgaacgaggccaagcggagggtgcgcgagctctaccgcgcctggtatcgggaggtgccgaacactgtgcaccaattccagctggacatcactgtgaaaatgggacgggataaagtccgagaaatgtttatgaagaatgcccatgtcacagaccccagggtggttgatcttctggtcattaagggaaagatcgaactggaagaaacaattaaagtatggaagcagcggacacatgttatgcggttcttccatgaaacagaagcgccaaggccaaaggatttcctatccaagttctatgttggccacgatccatgaagtcattcagtggaaagatgcacgttgatactattttagagcacaaataaactcactatacaatggtcactttgtgatagaattccattgatgaaccaattttctgcagcctctttttgcctgagcaagtgggaccttggtatacacatcacctgttctttcccttttcttgaaatgtggtgtttgctgtaaattggattgaattatttttctcagagccttgcatgtcagtaaacaggaaggaaggaggccatctgttcaaaaattgtgacattgggcatgaggctggacgacttgttaatgtagttgtttctatagcccctatgattagacactttagtgtcagggcacagattatctaaaattagccagctcttcctgtcagggatcagggcagcactaacaggcgcaaaagtagagctgtcaagatgggctagttttccttgggttctgaagaaaatggatgtgcaaaggcttggctccgctacttgtaacaagctccagcccttaaaatgaaattaacttcctactcaggcaccctgcttaggtgcacagctgttcaatatacacagagaacagaaatattcctactgtctttggaaaccctggtgtacctctcagtggcagaataaacatcaacacaggttcaagaactgat

SEQ ID NO: 157535 - DNA, 1080 bp, Homo sapiens; identical to SEQ ID NO: 157521
  Payload ID: 10870
  Gene Symbol: NDUFA6
  Gene Name: NADH dehydrogenase (ubiquinone) 1 alpha subcomplex, 6, 14kDa
  ENST ID: ENST00000630971
  CDS Start-End: 36-422

SEQ ID NO: 157536 - DNA, 601 bp, Homo sapiens
  Payload ID: 10871
  Gene Symbol: NDUFA7
  Gene Name: NADH dehydrogenase (ubiquinone) 1 alpha subcomplex, 7, 14.5kDa
  Uniprot ID: O95182
  ENST ID: ENST00000301457
  CDS Start-End: 39-380
acgtcaccggctgcgcccttcagtatcgcggacggaagatggcgtccgccacccgtctcatccagcggctgcggaactgggcgtccgggcatgacctgcaggggaagctgcagctacgctaccaggagatctccaagcgaactcagcctcctcccaagctccctgtgggtcctagccacaagctctccaacaattactattgcactcgcgatggccgccgggaatctgtgcccccttccatcatcatgtcgtcgcagaaggcgctggtgtcaggcaagccagcagagagctctgctgtagctgccactgagaagaaggcggtgactccagctcctcccataaagaggtgggagctgtcctcggaccagccttacctgtgacactgcaccctcacggccacccgactactttgcctccttggatttcctccagggagaatgtgacctaatttatgacaaatacgtagagctcaggtatcacttctagttttactttaaaaaataaaaaaatagagacagagtctcaccatgtttcccaggctgatcttgaactcctggcctcaagcgatcctcctgccttgacctcccaaagtgctgggatt

SEQ ID NO: 157537 - DNA, 569 bp, Homo sapiens
  Payload ID: 10871
  Gene Symbol: NDUFA7
  Gene Name: NADH dehydrogenase (ubiquinone) 1 alpha subcomplex, 7, 14.5kDa
  Uniprot ID: O95182
  ENST ID: ENST00000593729
  CDS Start-End: 18-359
agtatcgcggacggaagatggcgtccgccacccgtctcatccagcggctgcggaactgggcgtccgggcatgacctgcaggggaagctgcagctacgctaccaggagatctccaagcgaactcagcctcctcccaagctccctgtgggtcctagccacaagctctccaacaattactattgcactcgcgatggccgccgggaatctgtgcccccttccatcatcatgtcgtcgcagaaggcgctggtgtcaggcaagccagcagagagctctgctgtagctgccactgagaagaaggcggtgactccagctcctcccataaagaggtgggagctgtcctcggaccagccttacctgtgacactgcaccctcacggccacccgactactttgcctccttggatttcctccagggagaatgtgacctaatttatgacaaatacgtagagctcagcaacccgactccgagaatggacgtttcatttattcatttactcaccaaatgtttactaagagcctactatgagtcaagcactatgtgtcagatcctgagaataaagcagtgagcaac

SEQ ID NO: 157538 - DNA, 414 bp, Homo sapiens
  Payload ID: 10871
  Gene Symbol: NDUFA7
  Gene Name: NADH dehydrogenase (ubiquinone) 1 alpha subcomplex, 7, 14.5kDa
  ENST ID: ENST00000601101
  CDS Start-End: 18-209
agtatcgcggacggaagatggcgtccgccacccgtctcatccagcggctgcggaactgggcgtccgggcatgacctgcaggggaagctgcagctacgctaccaggagatctccaagcgctctgctgtagctgccactgagaagaaggcggtgactccagctcctcccataaagaggtgggagctgtcctcggaccagccttacctgtgacactgcaccctcacggccacccgactactttgcctccttggatttcctccagggagaatgtgacctaatttatgacaaatacgtagagctcagcaacccgactccgagaatggacgtttcatttattcatttactcaccaaatgtttactaagagcctactatgagtcaagcactatgtgtcagatcctgagaataaagcagtga

SEQ ID NO: 157539 - DNA, 553 bp, Homo sapiens
  Payload ID: 10871
  Gene Symbol: NDUFA7
  Gene Name: NADH dehydrogenase (ubiquinone) 1 alpha subcomplex, 7, 14.5kDa
  ENST ID: ENST00000595856
  CDS Start-End: 18-248
agtatcgcggacggaagatggcgtccgccacccgtctcatccagcggctgcggaactgggcgtccgggcatgacctgcaggggaagctgcagctacgctaccaggagatctccaagcgtagaaacggggtttcaccatgttggccagtctggtctcgaactcctgacttcataatccgcctgcctcggcctcccaaagtgctgggattacagaactcagcctcctcccaagctccctgtgggtcctagccacaagctctccaacaattactattgcactcgcgatggccgccgggaatctgtgcccccttccatcatcatgtcgtcgcagaaggcgctggtgtcaggcaagccagcagagagctctgctgtagctgccactgagaagaaggcggtgactccagctcctcccataaagaggtgggagctgtcctcggaccagccttacctgtgacactgcaccctcacggccacccgactactttgcctccttggatttcctccagggagaatgtgacctaatttatgacaaatacgtagagctcagcaacccg

SEQ ID NO: 157540 - DNA, 844 bp, Homo sapiens
  Payload ID: 10872
  Gene Symbol: NDUFA8
  Gene Name: NADH dehydrogenase (ubiquinone) 1 alpha subcomplex, 8, 19kDa
  Uniprot ID: P51970
  ENST ID: ENST00000373768
  CDS Start-End: 143-661
ggttgggcagggcaatacgcctgcgtgttgccggatgcgcatgcgcaggcgccgtgtggcactcggcggtcgaaaggggagttcaaggagacgggggcgacgcggctgagggcttctcgtcggggtcggggctgcagccgtcatgccggggatagtggagctgcccactctagaggagctgaaagtagatgaggtgaaaattagttctgctgtgcttaaagctgcggcccatcactatggagctcaatgtgataagcccaacaaggagtttatgctctgccgctgggaagagaaagatccgaggcggtgtttagaggaaggcaaactggtcaacaagtgtgctttggacttctttaggcagataaaacgtcactgtgcagagccttttacagaatattggacttgcattgattatactggccagcagttatttcgtcactgtcgcaaacagcaggcaaagtttgacgagtgtgtgctggacaaactgggctgggtgcggcctgacctgggagaactgtcaaaggtcaccaaagtgaaaacagatcgacctttaccggagaatccctatcactcaagaccaagaccggatcccagccctgagatcgagggagatctgcagcctgccacacatggcagccgcttttatttctggaccaagtaaagatgggtccgtggcccacactcggtcatgtgctcagacaacgactgatgaaaacgcccatgcggtttgcatcgactgatagtgtgttctttccgggatcacaaacattaacaaaaaagttaacttatgtgacttggcagttattctataccatttcctgtccattaaaatttttaaaggaaa

SEQ ID NO: 157541 - DNA, 8363 bp, Homo sapiens
  Payload ID: 10873
  Gene Symbol: NDUFA9
  Gene Name: NADH dehydrogenase (ubiquinone) 1 alpha subcomplex, 9, 39kDa
  Uniprot ID: Q16795
  ENST ID: ENST00000266544
  CDS Start-End: 21-1154
gtgggggattgtgggaaaagatggcggctgccgcacaatcccgggttgtccgggtcctgtcaatgtcacgttctgccattactgcaatagccacatctgtgtgtcacggcccaccctgtcgccagcttcatcatgccctcatgcctcatgggaaaggtggacgttcctcagtcagtgggattgtggccactgtgtttggagcaacaggattcctggggcgatatgttgtcaaccaccttggacgcatggggtcacaggtaatcataccctatcggtgtgataaatatgacatcatgcaccttcgtcccatgggtgacctgggccagcttctgtttctggaatgggacgcgagagataaagattctatccgacgagtagtacaacacagcaatgtggtcatcaatcttattggacgagactgggaaaccaaaaactttgattttgaggatgtttttgtgaagattccccaagcaattgctcaactgtccaaggaagctggagttgaaaaattcattcatgtttcacatctgaatgcgaatattaaaagctcttctagatatttgagaaataaggctgttggagagaaagtagtgagagatgcatttccggaagccattatcgtaaagccgtcggacatctttggaagagaggatagattccttaattcttttgcaagtatgcatcggtttggtcctataccccttggttccttgggctggaagacagttaaacaaccagtatatgtcgtagatgtatccaaaggaattgttaatgcagttaaggatcctgatgccaatgggaaatcctttgctttcgttggtcccagtcggtacctccttttccacctggtgaagtacatctttgctgtggctcacagattgttcctcccattccccttgccgctttttgcctatcgatgggtagcaagagtctttgaaataagcccatttgagccctggataacaagggataaagtggagcggatgcacatcacagacatgaaattgcctcacctgcctggcttagaagaccttggtattcaggcaacaccactggaactcaaggccattgaggtgctgcggcgtcatcgcacttaccgctggctgtctgctgaaattgaggatgtgaagccggccaagaccgtcaacatttagtgcctcctgagcagctcttggttttggcgtcttttgggtcggcccatgtggtttgagcacccagccaggcggtctctttagaggatcctgtacacagttccactattaaaacatttcaggttgaattctgcagtattttcttccttgatttacaaaatgagaaatgtagtcacttagaacttgagcatgatttttgttaaacatatttaataatgatatatatactatttattctctgaaatgccagagagtttgaattttcctatgacaaaccacttctagcatacgttctagaagacaaggaccctttttaatgtcaaagtattgtaaagaccccaagtgatatgtgattgttttttaatttccattaaatgagagagcatacagtatcccctaacctgaatgtgtttacactgaaggtgtttttaaaatttattttaataatgtccatatgccttttaaaaatagtagtacatatatagaaaaacattgtccatagattctcaaaccccttgcagtaattccacagtcttcttggatctgagctatctgaggccagcccgatgcccttagtaccacatctggattatttcagacacataggtggagatagattctcttcacatgcaaaggagatgcttcagcttctatgccagcagtgccagcacttaggaattatgaccttctaatgaagttcttaaaattgcagccaagacccagatgaacatttggtttagtgttggcaaatcccaccagtacagtgtgatttaaaactcccacaatttgtggtgaagccaacataccaccatcctaggtgacccagggttggtcattgtgtttcactggacttcagcctcctgatctatatttgggacagggatgtcagtaaaaacgctgtttgatgagggaatgcccgtctccttacagagagaaaggtatatcagtgttgaaggtaagttctccacctgccctttctgcctgcatcagaatctttttatcccaaaacggtcaacagtgagctactccaagtgtggtccatagatcaccagcattgggatcatcttggggcttgttagaaatgcagaacccgggctgggcacagtggctcacacctgtaatcccaacgcttttgagttgctgtggtgggacggtcgcttgaggccaggagtttgagaccagcctaggcaatatggcaagaccttgtctctacagaaaaatttcaaaaagttagtagggcatggtggcacgcacctgtagtctcagttattcgggaggctaaggtatgatgattgcttgagcctgggagttcaaggttacagtgagctatgatagtgccactgcacttcagcttggactgaagatcctgtctcagaaaaaaaaaaaaaaaaaggcagaatcctaggttttgtcctgtcccaggcgtgttgaatcagaatctgcattttagcaaggtctccaggagatttgtatgcacattacagtatgagaagcactgccatacagaagagctgtatcagagttcagtgtgatccctgttattaatccaggttgctgaccccaccccagacctactgaatcagagtctcaggaaggagggcccaggaattttagttttattaaacattctagtttattctcctgtacactagtatgtcagaatcagcgtactagggaaaggaacacaaacccaacttcacgttttttcttcagatgctgtctgttattttggatgacacccctcctggccataagccagccattaggcacagagatgggtggatttaatttgaaaaggaactataattctataatgcacagtgtcctctcttagaatatctacactttctttcctttttttgattcttaaaaaaaaacttattgatacataatagatgtaaatattgtcagggtatatgtggtaatttgatatattcatataatcaatcagtgtaattgggatatccatcaccttaaacatttacctttatgctagtaacattcaaattactctcttctagctattttgaaatgtacagtagattagtattaactctagttaccctactgatctattgaacaccaggtcttacttcttctgtcttaactgtaattatcttcattttctagcaatgctatttctcatctctaacttgtatcatctcaggatgctgtatatttcttttattttttattttttatttttttatttttattgatcattcttgggtgtttctcgcagagggggatttggcagggtcataggacaatagtggagggaaggtcagcagataaacaagtgaacaaaggtctctggttttcctaggcagaggaccctgcggccttccgcagtgtttgtgtccctgggtacttgagattagggagtggtgatgactcttaacgagcatgctgccttcaagcatctgtttaacaaagtacatcttgcaccgcccttaatccatttaaccctgagtggacacagcacatgtttcagagagcacagggttgggggtaagatcatagatcaacagcatcccaaggcagaagaatttttcttagtacagaacaaagtgaagtctcccatgtctacttctttctacacagacacagcaacaatgtgatttctctatcttttccccacatttcccccttttctattccgcaaaaccaccatcgtcatcatggcccgttctcaatgagctgttgggtacacctcccagacgtggtggtggccgggcagaggggctcctcacttcccagtaggggcggccgggcagaagcgccccccacctcccggactggtcggctggctgggcggaggcgccccccacacaaacactgaagccgtagcattgactaaggaaacaattttaccatcctaagctagtggatgtcaccctctcagtgtatggaggttgcatatgacaagtaactgggagctgggcataagatctaggacactcatatccagggtgattctcttcataaggaggcatgggctgagtctccatttataggggctgtccccatagagacttcaagccacacctttctagggattcaggttgcacattacctgattctcacagttgatttgagcctgcaagactgtaaacccatcccattatcatgttttcttcctcatttacctacatttatcattaaacctttgtgattcagcaaatctgtttaccttctgattctactttaaattccgttcatgttcttccttggccctcctgtgtatttcccacagctttgctaggccttaagatcatctcacattcttcatcctaatgacaaaaataagttctatgggctgggcgcggtggctcttgcctgtaatcccagcactttgggaggctgatgggggtggatcatgaggttaggagttcaagaccagcctggccaatatggtgaaaccccgtctctactaaaaaatacaaaaaatcagccaggcatggtggggcccacctgtatatagtcccagcccaggagggagactgaggcaggagaatcactgaaacctgggaggcagaggttgcagtgagctgagatcacaccactgcactccagcctgggagacagagggagactctgtctaaaataaataataataataataataataaaggtacatgatggaagcatatatgggaatatatgcaaagatctctgagaagataaagaaaggtctctggaaggattagcaaaaactccatagaaaacggatttttaaagctgcatcttgatgttaacctgctgaaatgtgtgtgttggaccggggtgaggaggaagcagtcattcatgctgtggaagagaacagcatgagcaattgcagtggggcatgaatgagtgggtggttatgagtgggaggcagagtccgtgagttgggaggggcacaagcgagtttaacctttaccttggaggtgatgcagagcagttgagttccatacagatttggcttcgaatatgagttccactacttcttagttgtgagattggacaagtcacttgacctctctttgtcagcctcagttttcttgtttataaaatgggggtgatagtaataactacatgatgggatagtgatgaggaattaaatgagatcatgcatgtaaaatgctgagccctgcacataataagaactaagtaaatgtgagccattatcatttaagtagggaatatcatgcccatctgagtccatacatttgtttcctgacttaataaaatagctgccgttcctgagaaggagggattcctatttcccaaatgctggaaacagggacttatagaaggtaaattgccccattagtaagtagctgaattggttttccaacctggatctttctggctacaaaactgatgccttgttccagaaaggatttaaggatgctcaggaggaagacattcccagagttacactctagaaggtcttggagtgaatgggaggtatagtggaatggagggcgtatttgaagaaacccttcctgtgaaggaaaatccaagagaatgaagtaaggagagacttaaacttgaaaagattcttgtgagagaaggaaaggggctatttacaatagagaagagactagaagaaagtctgaactcacctccctggaagcagagggtggtggggtttttgagggctgtgtgagagtgtagaagtactgagaacaagaagccatgtggatcctgtgagggccaggatgggggggggggtcatgggtcatctgtgtttgctgattggctttatccaaaggaagagtaaacatctcatccttatgacaggaagtagtcctgcagcttggagcaaggtgcccaccaaagttaggcacatcccacagcaagtgggagaaaggagtgctatctccttttgaggttacatttcagagaatggttcccctgggtccttgagaaagacagtcctgggttgtaaaactggcaagaggctgagggaagatgtatgtctcaaaggggaactcaaataatttataattttaagttttctgatgctctaagggaagtcaggtgcctaatattggtgatgtggtttggatgtccccacccaaatctcatgttgcaatgtaatctccagtgttggagttggggcctagtgggaggcgattagatcatggagtagatttatcatgaatgatttagtaccattctcttggtacaatcctcaagatagtgagttcttacaagatctggtcatttaaaagtgtgaggcaactctcctcaccccttgttcctactcctaccatgtgaggtgcttgctcccttttcacctactgccatgactggaagcttcctgaagcctccccagaagcagatgcctatgtgacgcttcctgtacagcctgcagaaccatgagccaattaaacctcttttctttatacattacctagactcagatatttctttatagcaatacaagaatggcctaatcgtgttaggaagaagcctgtctgaagtgcagtcaggctgaggggagcatgaaggccatcttgatgggggaaatcttttagtaccctaatgcgagcagatgatgatgttgttggcagagagggagggtataacttgtggtgcctagccctagagggaatggaagggccagaatccagagcataggtgggattgtgtgggctgacaagtaatagtatatgatagcatagtatatgatagcagtagtatacgatagcatgtgtgtgagtccattttgtattgccataaaggagtacctgaagctgggtaattaataaagaaaaggggtttatttggctcactgttctgtaggctgtacaagcatggcactaacatctgcttggcatgagccaccacacccggccagaattttatttttagtgactaggctttcctttaaaacctctgtactaggccgggtgcagtggctcgcgcctgtaatcccagcactttgggaggctgaggtgggaggatcacttgagcccaggagtttgagaccagcctgggcaacagagtgaaaccccatctctttaaaaaaataaagcacttgaagcagaactttttatctgtcataatcactgctatgtccacagcacctaaaacagtcccagacatctgttgaataaatgaatgaatgaggtgggaagtctttctttacacttagatgaaaactccatcggaccccaaattgttctggtcttgttcaggtaataattttaattctataataaaatctcaagttataataggctcaatttgataattaggatgcccagtgttgtgtaataattaaagcgttaaatttcctctctgccccacagctgggatccaagaagaccctgtggctggctactcttctgtattttcatttatctccacccccagtttaccagcagtggttatcctctctccaagactgggccaggggtgagaagggcagtcttaccaggcaagggtctttgctgacagatgtctgggccttcttgacagcaggtgtttaaagctgaatctggttctactttcaggagagtgatggtttgagatggtaactgaagttgtagaagtagatgttgaggatgaagtatcatattaataaaacattgcccattaacaccttagcacaaattaaaactagctatacctcactgataaggacctgaatggctaaataatgatgaatgatttatggatgtagcggggaactgggtggaagcagtagtaagaaatttgaattaaggaatcgtaagggaatcgagattatctagtttcccctcgacattttataactgaataaacaataaaaaacaagagaagtgacagctttatagcatctgattggggaaaaacacatcttttctggggctagacagtccataaataggacttggaaatggaagtgtagggggagatcccattgtacttcagtggaaaactatgcattgtctggaatctagactctggacaaagacccttccttcctggctgtttgattttgattctatgggagctatcttgcaactctgtaagctgtaggtaactgatagcagagcaaaataattcttgtctatagacgtgtacattgtgtcttagcgtagattcacccgacctccttccccagttttgcttctattagcacatttatttcagtaattttgatctttggattctccttggacattcctcactgaaaaatgaaataaaatttttggcatgtgctcttcttttgca

SEQ ID NO: 157542 - DNA, 642 bp, Homo sapiens
  Payload ID: 10873
  Gene Symbol: NDUFA9
  Gene Name: NADH dehydrogenase (ubiquinone) 1 alpha subcomplex, 9, 39kDa
  ENST ID: ENST00000540688
  CDS Start-End: 107-517
tgtttgttggttttatttcattttaagtttaagatctgttgtttctttggaggagaacaaagtgtaccagcagttacagcagccgactgggttggcttgagaggagatggaccaaaaagcagaggtagcctcacaggtcgaggtggttattttcttaaaaaaaaaaaatcagttcagactgctctacagcggtctgtcttcctgcagttctcataggctagcttacatcttgggcagagagatgcttatcacatgtgctatatgtatttctctttccagatgggtagcaagagtctttgaaataagcccatttgagccctggataacaagggataaagtggagcggatgcacatcacagacatgaaattgcctcacctgcctggcttagaagaccttggtattcaggcaacaccactggaactcaaggccattgaggtgctgcggcgtcatcgcacttaccgctggctgtctgctgaaattgaggatgtgaagccggccaagaccgtcaacatttagtgcctcctgagcagctcttggttttggcgtcttttgggtcggcccatgtggtttgagcacccagccaggcggtctctttagaggatcctgtacacagttccactattaaaacatttcaggttgaa

SEQ ID NO: 157543 - DNA, 512 bp, Homo sapiens
  Payload ID: 10873
  Gene Symbol: NDUFA9
  Gene Name: NADH dehydrogenase (ubiquinone) 1 alpha subcomplex, 9, 39kDa
  ENST ID: ENST00000535050
  CDS Start-End: 64-512
gcattggtacatgaactttgagggttcattctagtaccaagaacctcagtcaatgaaaaagaaatggtggaatgtttgacaagtctcttgctgttaaactttctaaaagtcagaatatcttttctcaagcacttcactccttttatcattatttgtgatgttcttcagtggttttatagttctgccattactgcaatagccacatctgtgtgtcacggcccaccctgtcgccagcttcatcatgccctcatgcctcatgggaaaggtggacgttcctcagtcagtgggattgtggccactgtgtttggagcaacaggattcctggggcgatatgttgtcaaccaccttggacgcatggggtcacaggtaatcataccctatcggtgtgataaatatgacatcatgcaccttcgtcccatgggtgacctgggccagcttctgtttctggaatgggacgcgagagataaagattctatccgacgagtagtacaacacagcaatgtggtcatcaa

SEQ ID NO: 157544 - DNA, 528 bp, Homo sapiens
  Payload ID: 10874
  Gene Symbol: NDUFB1
  Gene Name: NADH dehydrogenase (ubiquinone) 1 beta subcomplex, 1, 7kDa
  Uniprot ID: O75438
  ENST ID: ENST00000329559
  CDS Start-End: 141-458
gtgctgtcggaaggcgacggcggtcacgcctgcacgcctcgtctgtctggagcgaaattttattcagaaattattggtaatgtttggaagctaaaaaaaaaaaaaatgagaggagtcaaccctgaggaggaaaaagtagtatgatttgctggcgtcacccctctgctccgtgcgggcgcggcgaatggcaggtcccgaggtcgcagcttccactggcgcgggttgagttccctgttgcccttggtctcggggtcgctgtaggcgctgaggctgcagctatcatggtgaacttacttcagattgtgcgggaccactgggttcatgttcttgtccctatgggatttgtcattggatgttatttagacagaaagagtgatgaacggctaactgccttccggaacaagagtatgttatttaaaagggaattgcaacccagtgaagaagttacctggaagtaaagactggctagattatcgaatgttcacattttaaagttctgagagaaataaaaacatgaagaatctgaaa

SEQ ID NO: 157545 - DNA, 458 bp, Homo sapiens
  Payload ID: 10874
  Gene Symbol: NDUFB1
  Gene Name: NADH dehydrogenase (ubiquinone) 1 beta subcomplex, 1, 7kDa
  Uniprot ID: O75438
  ENST ID: ENST00000555441
  CDS Start-End: 215-391
cgtagagatgtgacccagtgaccgcccgctaaccggactggagagaagaccggcccggatcccacgcctggcctgaagcagggaagacgctgcctcccctccgcgagcagcttacattcgtccaagttccagccttctgtcttctcgctaacctcgctctcttccaaatcgcaaatcctcttgagccgacaccgttgcgcctaaatgatctatcatggtgaacttacttcagattgtgcgggaccactgggttcatgttcttgtccctatgggatttgtcattggatgttatttagacagaaagagtgatgaacggctaactgccttccggaacaagagtatgttatttaaaagggaattgcaacccagtgaagaagttacctggaagtaaagactggctagattatcgaatgttcacattttaaagttctgagagaaataaaaacatgaagaatctg

SEQ ID NO: 157546 - DNA, 454 bp, Homo sapiens
  Payload ID: 10874
  Gene Symbol: NDUFB1
  Gene Name: NADH dehydrogenase (ubiquinone) 1 beta subcomplex, 1, 7kDa
  Uniprot ID: O75438
  ENST ID: ENST00000553514
  CDS Start-End: 207-383
cccgaggtcgcagcttccactggcgcgggttgagttccctgttgcccttggtctcggggtcgctgtaggcgctgaggctgcagagactcgctgtatcccccaggctggagtgtagtggcgtcatctcagctcactgcaacctctgcctcccgagttcaagcaattctcctgcctcagcctcctgagtaactgggactacagctatcatggtgaacttacttcagattgtgcgggaccactgggttcatgttcttgtccctatgggatttgtcattggatgttatttagacagaaagagtgatgaacggctaactgccttccggaacaagagtatgttatttaaaagggaattgcaacccagtgaagaagttacctggaagtaaagactggctagattatcgaatgttcacattttaaagttctgagagaaataaaaacatgaagaatctgaaat

SEQ ID NO: 157547 - DNA, 336 bp, Homo sapiens
  Payload ID: 10874
  Gene Symbol: NDUFB1
  Gene Name: NADH dehydrogenase (ubiquinone) 1 beta subcomplex, 1, 7kDa
  Uniprot ID: O75438
  ENST ID: ENST00000605997
  CDS Start-End: 92-268
ggtcccgaggtcgcagcttccactggcgcgggttgagttccctgttgcccttggtctcggggtcgctgtaggcgctgaggctgcagctatcatggtgaacttacttcagattgtgcgggaccactgggttcatgttcttgtccctatgggatttgtcattggatgttatttagacagaaagagtgatgaacggctaactgccttccggaacaagagtatgttatttaaaagggaattgcaacccagtgaagaagttacctggaagtaaagactggctagattatcgaatgttcacattttaaagttctgagagaaataaaaacatgaagaatctga

SEQ ID NO: 157548 - DNA, 417 bp, Homo sapiens
  Payload ID: 10874
  Gene Symbol: NDUFB1
  Gene Name: NADH dehydrogenase (ubiquinone) 1 beta subcomplex, 1, 7kDa
  Uniprot ID: O75438
  ENST ID: ENST00000617122
  CDS Start-End: 33-350
agaggagtcaaccctgaggaggaaaaagtagtatgatttgctggcgtcacccctctgctccgtgcgggcgcggcgaatggcaggtcccgaggtcgcagcttccactggcgcgggttgagttccctgttgcccttggtctcggggtcgctgtaggcgctgaggctgcagctatcatggtgaacttacttcagattgtgcgggaccactgggttcatgttcttgtccctatgggatttgtcattggatgttatttagacagaaagagtgatgaacggctaactgccttccggaacaagagtatgttatttaaaagggaattgcaacccagtgaagaagttacctggaagtaaagactggctagattatcgaatgttcacattttaaagttctgagagaaataaaaacatgaagaatctg

SEQ ID NO: 157549 - DNA, 705 bp, Homo sapiens
  Payload ID: 10875
  Gene Symbol: NDUFB10
  Gene Name: NADH dehydrogenase (ubiquinone) 1 beta subcomplex, 10, 22kDa
  Uniprot ID: O96000
  ENST ID: ENST00000268668
  CDS Start-End: 118-636
gcgcagacgcagccgccctcggcgtcctctgtagcgggcgacctaggccgcgggacccggacggaggtagaggccagggcagcgcgtccgggagcggagtccgcgcccgccgccgccatgccggacagctgggacaaggatgtgtaccctgagcccccgcgccgcacgccggtgcagcccaatcccatcgtctacatgatgaaagcgttcgacctcatcgtggaccgacccgtgaccctcgtgagagaatttatagagcggcagcacgcaaagaacaggtattactactaccaccggcagtaccgccgcgtgccagacatcactgagtgcaaggaggaggacatcatgtgcatgtatgaagccgaaatgcagtggaagagggactacaaagtcgaccaagaaattatcaacattatgcaggatcggctcaaagcctgtcagcagagggaaggacagaactaccagcagaactgtatcaaggaagtggagcagttcacccaggtggccaaggcctaccaggaccgctatcaggacctgggggcctacagttctgccaggaagtgcctggccaaacagaggcagaggatgctgcaagagagaaaagctgcaaaagaggccgccgctgccacctcctgaggcagctgtgggtgcccctgctgtgtggctctgtatgactgttgctgaaatataaagccctgcaacctg

SEQ ID NO: 157550 - DNA, 830 bp, Homo sapiens
  Payload ID: 10875
  Gene Symbol: NDUFB10
  Gene Name: NADH dehydrogenase (ubiquinone) 1 beta subcomplex, 10, 22kDa
  Uniprot ID: O96000
  ENST ID: ENST00000543683
  CDS Start-End: 83-589
gggcgacctaggccgcgggacccggacggaggtagaggccagggcagcgcgtccgggagcggagtccgcgcccgccgccgccatgccggacagctgggacaaggatgtgtaccctgagcccccgcgccgcacgccggtgcagcccaatcccatcgtctacatgatgaaagcgttcgacctcatcgtggaccgacccgtgaccctcgtgagagaatttatagagcggcagcacgcaaagaacaggtattactactaccaccggcagtaccgccgcgtgccagacatcactgagtgcaaggaggaggacatcatgtgcatgtatgaagccgaaatgcagtggaagagggactacaaagtcgaccaagaaattatcaacattatgcaggatcggctcaaagcctgtcagcagagggaaggacagaactaccagcagaactgtatcaaggaagtggagcagttcacccaggtggccaaggcctaccaggaccgctgtgcgtgccccacccacccccaaccccccaccatcctcctgaggcctgggggccagaaccattgcaaatcttccctcccctcccttgtgctcacttgactttgccccctttgcatgtagcagaggcctcggttcccagcttgtttccattgcttccccagatcaggacctgggggcctacagttctgccaggaagtgcctggccaaacagaggcagaggatgctgcaagagagaaaagctgcaaaagaggccgccgctgccacctcctgaggcagctgtgggtgcccctgctgtgtggctctgtatgactgttgctgaaatataaagccctgcaacctg

SEQ ID NO: 157551 - DNA, 628 bp, Homo sapiens
  Payload ID: 10875
  Gene Symbol: NDUFB10
  Gene Name: NADH dehydrogenase (ubiquinone) 1 beta subcomplex, 10, 22kDa
  ENST ID: ENST00000569148
  CDS Start-End: 74-559
aggccgcgggacccggacggaggtagaggccagggcagcgcgtccgggagcggagtccgcgcccgccgccgccatgccggacagctgggacaaggatgtgtaccctgagcccccgcgccgcacgccggtgcagcccaatcccatcgtctacatgatgaaagcgttcgacctcatcgtggaccgacccgtgaccctcgtgagagaatttatagagcggcagcacgcaaagaacaggtattactactaccaccggcagtaccgccgcgtgccagacatcactgagtgcaaggaggaggacatcatgtgcatcaaagtcgaccaagaaattatcaacattatgcaggatcggctcaaagcctgtcagcagagggaaggacagaactaccagcagaactgtatcaaggaagtggagcagttcacccaggtggccaaggcctaccaggaccgctatcaggacctgggggcctacagttctgccaggaagtgcctggccaaacagaggcagaggatgctgcaagagagaaaagctgcaaaagaggccgccgctgccacctcctgaggcagctgtgggtgcccctgctgtgtggctctgtatgactgttgctgaaatataaagccctgcaacctg

SEQ ID NO: 157552 - DNA, 495 bp, Homo sapiens
  Payload ID: 10875
  Gene Symbol: NDUFB10
  Gene Name: NADH dehydrogenase (ubiquinone) 1 beta subcomplex, 10, 22kDa
  ENST ID: ENST00000570172
  CDS Start-End: 68-495
cgggacccggacggaggtagaggccagggcagcgcgtccgggagcggagtccgcgcccgccgccgccatgccggacagctgggacaaggatgtgtaccctgagcccccgcgccgcacgccggtgcagcccaatcccatcgtctacatgatgaaagcgttcgacctcatcgtggaccgacccgtgaccctcgtgagagaatttatagagcggcagcacgcaaagaacaggtattactactaccaccggcagtaccgccgcgtgccagacatcactgagtgcaaggaggaggacatcatgtgcatgtatgaagccgaaatgcagtggaagagggactacaaagtcgaccaagaaattatcaacattatgcaggatcggctcaaagcctgtcagcagagggaaggacagaactaccagcagaactgtatcaaggaagtggagcagttcacccagatcaggacctgggggcctacagttctgccaggaagtgcctggcc

SEQ ID NO: 157553 - DNA, 948 bp, Homo sapiens
  Payload ID: 10876
  Gene Symbol: NDUFB11
  Gene Name: NADH dehydrogenase (ubiquinone) 1 beta subcomplex, 11, 17.3kDa
  Uniprot ID: Q9NX14
  ENST ID: ENST00000276062
  CDS Start-End: 360-851
tttgaagatgaaagactagcggaagctctgcctctttccccagtgggcgagggaactcggggcgattggctgggaactgtatccacccaaatgtcaccgatttcttcctatgcaggaaatgagcagacccatcaataagaaatttctcagcctggccgaaaatggttggccccacgaagccacgacaactggaggcaaagagggttgctcaacgccccgcctcattggaaaaccaaatcagatctgggacctatatagcgtggcggaggcggggcgatgattgtcgcgctcgcacccactgcagctgcgcacagtcgcatttctttccccgcccctgagaccctgcagcaccatctgtcatggcggctgggctgtttggtttgagcgctcgccgtcttttggcggcagcggcgacgcgagggctcccggccgcccgcgtccgctgggaatctagcttctccaggactgtggtcgccccgtccgctgtggcgggaaagcggcccccagaaccgaccacaccgtggcaagaggacccagaacccgaggacgaaaacttgtatgagaagaacccagactcccatggttatgacaaggaccccgttttggacgtctggaacatgcgacttgtcttcttctttggcgtctccatcatcctggtccttggcagcacctttgtggcctatctgcctgactacaggtgcacagggtgtccaagagcgtgggatgggatgaaagagtggtcccgccgcgaagctgagaggcttgtgaaataccgagaggccaatggccttcccatcatggaatccaactgcttcgaccccagcaagatccagctgccagaggatgagtgaccagttgctaagtggggctcaagaagcaccgccttccccaccccctgcctgccattctgacctcttctcagagcacctaattaaaggggctgaaagt

SEQ ID NO: 157554 - DNA, 1388 bp, Homo sapiens
  Payload ID: 10876
  Gene Symbol: NDUFB11
  Gene Name: NADH dehydrogenase (ubiquinone) 1 beta subcomplex, 11, 17.3kDa
  Uniprot ID: Q9NX14
  ENST ID: ENST00000377811
  CDS Start-End: 826-1287
gaccagcgtcgacgctcaccttctcggcccgggctgtcaaggaagggctcccagacatcacctctgcccgccgccacctcctccaactctcccagctcagccggagccggagcgcgcaacaaccaagtccgagactggaggcagatcggggggaggggagaagcgccaagcgcgctgccctcccagggaaactcactgccgcctactcccagccggccacagtcaccagctcaaaatggcgacgacgagaagggagtcggcgctccgaccaccatccacctactaaggaagcgcgctctggccggccccggcgattggtcaccgcccgctaggggacagccctggcctcctctgattggcaagcgctggccacctccccacaccccttgcgaacgctcccctagtggagaaaaggagtagctattagccaattcggcagggcccgctttttagaagcttgatttcctttgaagatgaaagactagcggaagctctgcctctttccccagtgggcgagggaactcggggcgattggctgggaactgtatccacccaaatgtcaccgatttcttcctatgcaggaaatgagcagacccatcaataagaaatttctcagcctggccgaaaatggttggccccacgaagccacgacaactggaggcaaagagggttgctcaacgccccgcctcattggaaaaccaaatcagatctgggacctatatagcgtggcggaggcggggcgatgattgtcgcgctcgcacccactgcagctgcgcacagtcgcatttctttccccgcccctgagaccctgcagcaccatctgtcatggcggctgggctgtttggtttgagcgctcgccgtcttttggcggcagcggcgacgcgagggctcccggccgcccgcgtccgctgggaatctagcttctccaggactgtggtcgccccgtccgctgtggcgggaaagcggcccccagaaccgaccacaccgtggcaagaggacccagaacccgaggacgaaaacttgtatgagaagaacccagactcccatggttatgacaaggaccccgttttggacgtctggaacatgcgacttgtcttcttctttggcgtctccatcatcctggtccttggcagcacctttgtggcctatctgcctgactacaggatgaaagagtggtcccgccgcgaagctgagaggcttgtgaaataccgagaggccaatggccttcccatcatggaatccaactgcttcgaccccagcaagatccagctgccagaggatgagtgaccagttgctaagtggggctcaagaagcaccgccttccccaccccctgcctgccattctgacctcttctcagagcacctaattaaaggggctgaaagtctga

SEQ ID NO: 157555 - DNA, 504 bp, Homo sapiens
  Payload ID: 10877
  Gene Symbol: NDUFB2
  Gene Name: NADH dehydrogenase (ubiquinone) 1 beta subcomplex, 2, 8kDa
  Uniprot ID: O95178
  ENST ID: ENST00000247866
  CDS Start-End: 74-391
cgggcggagcgccggggaagcgaagtaggcaggggcgaggcggctggggaccgcggggcggacgggagcgagtatgtccgctctgactcggctggcgtctttcgctcgcgttggaggccgccttttcagaagcggctgcgcacggactgctggagatggtggagtccgtcatgccggtggtggtgtgcacattgagccccggtatagacagttcccccagctgaccagatcccaggtgttccagagcgagttcttcagcggactcatgtggttctggattctctggcgcttttggcatgactcagaagaggtgctgggtcactttccgtatcctgatccttcccagtggacagatgaagaattaggtatccctcctgatgatgaagactgaaggtgtagactcagcctcactctgtacaagagccaggtgagaatttcaaggattatcgacttcatattgcacattaaagttacaaattaaagtggcttggtcaagaatgagaa

SEQ ID NO: 157556 - DNA, 660 bp, Homo sapiens
  Payload ID: 10877
  Gene Symbol: NDUFB2
  Gene Name: NADH dehydrogenase (ubiquinone) 1 beta subcomplex, 2, 8kDa
  ENST ID: ENST00000476181
  CDS Start-End: 36-140
ggcggctggggaccgcggggcggacgggagcgagtatgtccgctctgactcggctggcgtctttcgctcgcgttggaggccgccttttcagaagcggctgcgcacggactgctggagatggtggagtccgtcagaactgaggcccaggaaatgaaaggagtgacttgcctgaagtcccacatggatgaagaatctggagctggggcaggtgtggggtgggcagaaggcaaagccctgtgtgacttgggcaaagacagtgatggagagccatgagcgacagcccttggtcctgcatgaggagatgggggaatgccgatcttccctgagtgccggtggtggtgtgcacattgagccccggtatagacagttcccccagctgaccagatcccaggtgttccagagcgagttcttcagcggactcatgtggttctggattctctggcgcttttggcatgactcagaagaggtgctgggtcactttccgtatcctgatccttcccagtggacagatgaagaattaggtatccctcctgatgatgaagactgaaggtgtagactcagcctcactctgtacaagagccaggtgagaatttcaaggattatcgacttcatattgcacattaaagttacaaattaaagtggcttggtcaagaatgagaa

SEQ ID NO: 157557 - DNA, 503 bp, Homo sapiens
  Payload ID: 10877
  Gene Symbol: NDUFB2
  Gene Name: NADH dehydrogenase (ubiquinone) 1 beta subcomplex, 2, 8kDa
  ENST ID: ENST00000472695
  CDS Start-End: 268-393
ctcgaggagagggaccccgctggccggagggagagggagagacttcgctgggcagatgggacaccgtgtgcagggccgtcatgctagatcctgaatgaataatataattggtatatgaggacattacggaaacagtatgctacgtcattcaagttgtaaagtggcgatatttgtgccggtggtggtgtgcacattgagccccggtatagacagttcccccagctgaccagatcccaggtgttccagagcgagttcttcagcggactcatgtggttctggattctctggcgcttttggcatgactcagaagaggtgctgggtcactttccgtatcctgatccttcccagtggacagatgaagaattaggtatccctcctgatgatgaagactgaaggtgtagactcagcctcactctgtacaagagccaggtgagaatttcaaggattatcgacttcatattgcacattaaagttacaaattaaagtggcttggtcaagaatga

SEQ ID NO: 157558 - DNA, 420 bp, Homo sapiens
  Payload ID: 10877
  Gene Symbol: NDUFB2
  Gene Name: NADH dehydrogenase (ubiquinone) 1 beta subcomplex, 2, 8kDa
  ENST ID: ENST00000460088
  CDS Start-End: 182-307
gcgactcgaggagagggaccccgctggccggagggagagggagagacttcgctgggcagatgggacaccgtgtgcagggccgtcatgtgccggtggtggtgtgcacattgagccccggtatagacagttcccccagctgaccagatcccaggtgttccagagcgagttcttcagcggactcatgtggttctggattctctggcgcttttggcatgactcagaagaggtgctgggtcactttccgtatcctgatccttcccagtggacagatgaagaattaggtatccctcctgatgatgaagactgaaggtgtagactcagcctcactctgtacaagagccaggtgagaatttcaaggattatcgacttcatattgcacattaaagttacaaattaaagtggcttggtcaagaatgagaa

SEQ ID NO: 157559 - DNA, 539 bp, Homo sapiens
  Payload ID: 10877
  Gene Symbol: NDUFB2
  Gene Name: NADH dehydrogenase (ubiquinone) 1 beta subcomplex, 2, 8kDa
  ENST ID: ENST00000475276
  CDS Start-End: 194-430
aggatcgcttgaacccaggaggcggaggttgcagtgagccaagattgttccattgcactccagcctgggtgacagagtgagactctcgcaaacaaacaaacaaagaaaacaaacagtcctagctaacatgtatcaagaaccactgccctgttactgttcacgaatctgtgcattatgaagacaagatattttaatgcacttttcctacagtgccggtggtggtgtgcacattgagccccggtatagacagttcccccagctgaccagatcccaggtgttccagagcgagttcttcagcggactcatgtggttctggattctctggcgcttttggcatgactcagaagaggtgctgggtcactttccgtatcctgatccttcccagtggacagatgaagaattaggtatccctcctgatgatgaagactgaaggtgtagactcagcctcactctgtacaagagccaggtgagaatttcaaggattatcgacttcatattgcacattaaagttacaaattaaagtggcttggtcaagaatg

SEQ ID NO: 157560 - DNA, 1666 bp, Homo sapiens
  Payload ID: 10877
  Gene Symbol: NDUFB2
  Gene Name: NADH dehydrogenase (ubiquinone) 1 beta subcomplex, 2, 8kDa
  Uniprot ID: O95178
  ENST ID: ENST00000476279
  CDS Start-End: 75-392
gcgggcggagcgccggggaagcgaagtaggcaggggcgaggcggctggggaccgcggggcggacgggagcgagtatgtccgctctgactcggctggcgtctttcgctcgcgttggaggccgccttttcagaagcggctgcgcacggactgctggagatggtggagtccgtcatgccggtggtggtgtgcacattgagccccggtatagacagttcccccagctgaccagatcccaggtgttccagagcgagttcttcagcggactcatgtggttctggattctctggcgcttttggcatgactcagaagaggtgctgggtcactttccgtatcctgatccttcccagtggacagatgaagaattaggtatccctcctgatgatgaagactgaaggtgtagactcagcctcactctgtacaagtgggtagctagcaacatggaccacagatatactggtgactccgctctcctctggccaagctacaaatcatcacctgaggcagagatgctactaccctcttctggggctcaactaccgatgggcatcagtaatccatcccagtataacatttcaaggatgtgctggagacaatacatggactttctctttcaatggtgaggaatgaaacaagatacaagaaccacagcatggaatatgttttcttttacatccaatggccaggtcataaaggatgccttgagacctccaccctggcccccacagcgctttgggacaggatgactaacgcagtccagcttcatgtgcaatcaagtcccgggaagaaatttacatttcaaactctgaaaaatcagtgtctaggttggcagcagtactctggaaactgataaaaccaaattcggtcctatatttcaatttccccttctaagttaatacatgattgctgcccatcatacagtacttcaaccctaaactacagcaatttctgtcaacatttctgttgtataaaagttccatgctttgaagagcctatgggagtagaaaaagtttctctagaaatgtcactgaactatatttgcaacctagttgctctatgtgataaatatatctgactatactagggattatgtgctttaaaaaaataattttgttcactgaaaatttacctgtgtgttttctcattgttaaatgtgattttggctataaactctttagtgcatttacctatgcagtctaaattgcactctaaaaattattaacacagctgagttaaaccagagtggctgctctcttcacaaatcactgatttctgctaaaatgttagcttttttattgcatcatgaaggcacagtaagatcatttggcaaattgtcaaggtatttttctagagcctcacctacaccatttcaactcatgacctgtaagctatttgctgttcatactcacagtaaaccttccatctctggctatggtgtttatagcctaatggttggaatctgctcgtctcaaggtgctggtattcctagcactaacaatgccaacttggacaaagaagagaatcttgcaaaaagagtaatcattctaccctcttagctgggtggtctttctatgaatgcctgtgcatgtgacaaagctgcagcaaactcattatgaggatgtactgtcatgccaagcctactgaaaattaaaattacatcactgttagt

SEQ ID NO: 157561 - DNA, 1101 bp, Homo sapiens
  Payload ID: 10877
  Gene Symbol: NDUFB2
  Gene Name: NADH dehydrogenase (ubiquinone) 1 beta subcomplex, 2, 8kDa
  Uniprot ID: O95178
  ENST ID: ENST00000465506
  CDS Start-End: 56-373
agcgaagtaggcaggggcgaggcggctggggaccgcggggcggacgggagcgagtatgtccgctctgactcggctggcgtctttcgctcgcgttggaggccgccttttcagaagcggctgcgcacggactgctggagatggtggagtccgtcatgccggtggtggtgtgcacattgagccccggtatagacagttcccccagctgaccagatcccaggtgttccagagcgagttcttcagcggactcatgtggttctggattctctggcgcttttggcatgactcagaagaggtgctgggtcactttccgtatcctgatccttcccagtggacagatgaagaattaggtatccctcctgatgatgaagactgaaggtgtagactcagcctcactctgtacaagtgggtgtgctccaaatttctttatgtcatatttaccttttttcataaacattagtttttactttgtgcctatgatggacttgaaaaaactgcatattctaacagcatgaagttgagttaaccatgtcctgtatctgcttttttttttttttttgagacagagtcttgctctgtcgcccagactggagtgcagtggcgtgatctgggctcactgcaacctctgccttccaggttcaagtgattctccttcctcagcctcctgagtagctgggattataggcacatgctaccacacttggctaatttttgtatttttagtagaggcagagttttgccacgttggccaggctggtctcgaacttctgacctcaagtgatctgcccacctcagactcccaaagtgctaggattacaggtgtgagccaccacgcctggccatgtatctgatttctgccttaagttttcacatttgctttggtctcttcttccttttcattgtatgttttattttatttacattttttattttgtagagacagggtgtcactatgttgcccaggctggtcttgaactcctgggctcaaatgattctcctgcctctgcctcccaaagtgctgggattacaggcatgtgccaccacacctggcccattgtataataaaaaaaaatttttttcctaagttaggttataattttaggg

SEQ ID NO: 157562 - DNA, 544 bp, Homo sapiens
  Payload ID: 10877
  Gene Symbol: NDUFB2
  Gene Name: NADH dehydrogenase (ubiquinone) 1 beta subcomplex, 2, 8kDa
  ENST ID: ENST00000482954
  CDS Start-End: 306-431
tctctctagtgtctttaagttgctgatgactcacaaggataaagttcctcattcctgtcttttagtgagcagtatggtttaggtggacagagattcctttggtgcagtttttttcaaggagctagatcctgaatgaataatataattggtatatgaggacattacggaaacagtatgctacgtcattcaagttgtaaagtggcgatatttgtgccggtggtggtgtgcacattgagccccggtatagacagttcccccagctgaccagatcccaggtgttccagagcgagttcttcagcggactcatgtggttctggattctctggcgcttttggcatgactcagaagaggtgctgggtcactttccgtatcctgatccttcccagtggacagatgaagaattaggtatccctcctgatgatgaagactgaaggtgtagactcagcctcactctgtacaagagccaggtgagaatttcaaggattatcgacttcatattgcacattaaagttacaaattaaagtggcttggtcaagaatgagaa

SEQ ID NO: 157563 - DNA, 726 bp, Homo sapiens
  Payload ID: 10877
  Gene Symbol: NDUFB2
  Gene Name: NADH dehydrogenase (ubiquinone) 1 beta subcomplex, 2, 8kDa
  ENST ID: ENST00000464566
  CDS Start-End: 1-315
tccgctctgactcggctggcgtctttcgctcgcgttggaggccgccttttcagaagcggctgcgcacggactgctggagatggtggagtccgtcatgccggtggtggtgtgcacattgagccccggtatagacagttcccccagctgaccagatcccaggtgttccagagcgagttcttcagcggactcatgtggttctggattctctggcgcttttggcatgactcagaagaggtgctgggtcactttccgtatcctgatccttcccagtggacagatgaagaattaggtatccctcctgatgatgaagactgaaggtgtagactcagcctcactctgtacaaggtctcattctgtcatccagactggagtgcagcgtgatcatggctcactgtaaccccaacctcctgagctcaagtgattctcccgcctcagccttctcagtagctgggactactactcttggctaatttttgtatattttgtagagatgaggttttgccatgttgcccaggctgatctcaaattcttggactcaagtgatccacctcttggcttcccaaagtgttgggattacaggtgtgagccagtgtacctggccaacaaatttgttttaatgactggactgtaaacccttgagagaggaagggtgattttgcttctcttgtctacaaggctgtcacatgatcagtgctcaataaatacttgaataattgaataaatgaa

SEQ ID NO: 157564 - DNA, 499 bp, Homo sapiens
  Payload ID: 10877
  Gene Symbol: NDUFB2
  Gene Name: NADH dehydrogenase (ubiquinone) 1 beta subcomplex, 2, 8kDa
  ENST ID: ENST00000471136
  CDS Start-End: 107-388
gaggcctagggagggcgcggtccagggtcccggtgcctggctgcggaatttagggtagagtctgttcggcagcctttaatcggagacgtcacgtggccgctttttaatgctgaaaaatcactctggctgcagggagtggaggctgtcgcccagagagagcgccgtcggtgccggtggtggtgtgcacattgagccccggtatagacagttcccccagctgaccagatcccaggtgttccagagcgagttcttcagcggactcatgtggttctggattctctggcgcttttggcatgactcagaagaggtgctgggtcactttccgtatcctgatccttcccagtggacagatgaagaattaggtatccctcctgatgatgaagactgaaggtgtagactcagcctcactctgtacaagagccaggtgagaatttcaaggattatcgacttcatattgcacattaaagttacaaattaaagtggcttggtcaagaatgag

SEQ ID NO: 157565 - DNA, 559 bp, Homo sapiens
  Payload ID: 10877
  Gene Symbol: NDUFB2
  Gene Name: NADH dehydrogenase (ubiquinone) 1 beta subcomplex, 2, 8kDa
  ENST ID: ENST00000461457
  CDS Start-End: 58-348
gaagcgaagtaggcaggggcgaggcggctggggaccgcggggcggacgggagcgagtatgtccgctctgactcggctggcgtctttcgctcgcgttggaggccgccttttcagaagcggctgcgcacggactgctggagatggtggagtccgtcaagctagcaacatggaccacagatatactggtgactccgctctcctctggccaagctacaaatcatcacctgaggcagagatgctactaccctcttctggggctcaactaccgatgggcatcagtaatccatcccagtataacatttcaaggatgtgctggagacaatacatggactttctctttcaatggtgaggaatgaaacaagatacaagaaccacagcatggaatatgttttcttttacatccaatggccaggtcataaaggatgccttgagacctccaccctggcccccacagcgctttgggacaggatgactaacgcagtccagcttcatgtgcaatcaagtcccgggaagaaatttacatttcaaactctgaaaaatcagtgtctaggttggcagca

SEQ ID NO: 157566 - DNA, 482 bp, Homo sapiens
  Payload ID: 10877
  Gene Symbol: NDUFB2
  Gene Name: NADH dehydrogenase (ubiquinone) 1 beta subcomplex, 2, 8kDa
  ENST ID: ENST00000476470
  CDS Start-End: 250-375
aggcggaggaagcagcgtgcgcggcgggtgtggacgctcctggagcgaggcggggggcggcggcgctagatcctgaatgaataatataattggtatatgaggacattacggaaacagtatgctacgtcattcaagttgtaaagtggcgatatttgtgccggtggtggtgtgcacattgagccccggtatagacagttcccccagctgaccagatcccaggtgttccagagcgagttcttcagcggactcatgtggttctggattctctggcgcttttggcatgactcagaagaggtgctgggtcactttccgtatcctgatccttcccagtggacagatgaagaattaggtatccctcctgatgatgaagactgaaggtgtagactcagcctcactctgtacaagagccaggtgagaatttcaaggattatcgacttcatattgcacattaaagttacaaattaaagtggcttggtcaagaa

SEQ ID NO: 157567 - DNA, 755 bp, Homo sapiens
  Payload ID: 10878
  Gene Symbol: NDUFB3
  Gene Name: NADH dehydrogenase (ubiquinone) 1 beta subcomplex, 3, 12kDa
  Uniprot ID: O43676
  ENST ID: ENST00000237889
  CDS Start-End: 324-620
agtatgccggcagccccgccctgtgtgcggtgtctaaggattccgtccccaagcaaggacaacatattatcttccccgcccttctcttttctacagtatctgttacctcagtcagattgaggatgcacatatactgggaaaataatcgacttccagcgtccctcatgtagtctctacctgattcaggaatctctaacccagtatcggaacgttaagcggcttctccgctttcctgccgtgagaaactcgaggtgacaacctccgtttccggttggctccggttgcagagttgagtgtcctgagaggtcagattgctgtcagacatggcccatgaacatggacatgagcatggacatcataaaatggaacttccagattatagacaatggaagatagaagggacaccattagaaactatccagaagaagctggctgcaaaagggctaagggatccatggggccgcaatgaagcttggagatacatgggtggctttgcaaagagtgtttccttttctgatgtattctttaaaggattcaaatggggatttgctgcatttgtggtagctgtaggagctgaatattacctggagtccctgaataaagataagaagcatcactgaagataatacctggaagcatcatagtggtttcttaactctccaaaataagatttcttctctgtagcctacttgtctggtttatcccttacagaatattagtaagatttaatcaattaaaatatatatatatgccaa

SEQ ID NO: 157568 - DNA, 462 bp, Homo sapiens
  Payload ID: 10878
  Gene Symbol: NDUFB3
  Gene Name: NADH dehydrogenase (ubiquinone) 1 beta subcomplex, 3, 12kDa
  ENST ID: ENST00000450023
  CDS Start-End: 268-462
acgaccctcccaagatgctacctggtttacgagaggttccgggaccaccaacacaccggctaccgcctttccagaccaccctcgccagctcccgtctgtagtttccgcggccgaaggagaagaaaacccctcttcatctagcactttgcctcccccaaagacagcaccgccgcctacctgtcaccctgctgtctccggcttcctaccgccgccgcctcccgcagcagcctgccaactgcagcgcaacaaccaaccctctcattggacatggcccatgaacatggacatgagcatggacatcataaaatggaacttccagattatagacaatggaagatagaagggacaccattagaaactatccagaagaagctggctgcaaaagggctaagggatccatggggccgcaatgaagcttggagatacatgggtggctttgcaaagagtgtttccttttctgat

SEQ ID NO: 157569 - DNA, 547 bp, Homo sapiens
  Payload ID: 10878
  Gene Symbol: NDUFB3
  Gene Name: NADH dehydrogenase (ubiquinone) 1 beta subcomplex, 3, 12kDa
  Uniprot ID: O43676
  ENST ID: ENST00000454214
  CDS Start-End: 116-412
gagtgtcctgagaggtcagattgctgtcaggtgcttgttcccgcttctgccacacgcaaaattgtctttgtttgcctttggatcgcaaaggcagaagaacagcatcactaaaaacatggcccatgaacatggacatgagcatggacatcataaaatggaacttccagattatagacaatggaagatagaagggacaccattagaaactatccagaagaagctggctgcaaaagggctaagggatccatggggccgcaatgaagcttggagatacatgggtggctttgcaaagagtgtttccttttctgatgtattctttaaaggattcaaatggggatttgctgcatttgtggtagctgtaggagctgaatattacctggagtccctgaataaagataagaagcatcactgaagataatacctggaagcatcatagtggtttcttaactctccaaaataagatttcttctctgtagcctacttgtctggtttatcccttacagaatattagtaagatttaatcaattaaaatatatatatatgccaa

SEQ ID NO: 157570 - DNA, 503 bp, Homo sapiens
  Payload ID: 10878
  Gene Symbol: NDUFB3
  Gene Name: NADH dehydrogenase (ubiquinone) 1 beta subcomplex, 3, 12kDa
  Uniprot ID: O43676
  ENST ID: ENST00000433898
  CDS Start-End: 78-374
ggttggctccggttgcagagttgagtgtcctgagaggtcagattgctgtcaggcagaagaacagcatcactaaaaacatggcccatgaacatggacatgagcatggacatcataaaatggaacttccagattatagacaatggaagatagaagggacaccattagaaactatccagaagaagctggctgcaaaagggctaagggatccatggggccgcaatgaagcttggagatacatgggtggctttgcaaagagtgtttccttttctgatgtattctttaaaggattcaaatggggatttgctgcatttgtggtagctgtaggagctgaatattacctggagtccctgaataaagataagaagcatcactgaagataatacctggaagcatcatagtggtttcttaactctccaaaataagatttcttctctgtagcctacttgtctggtttatcccttacagaatattagtaagatttaatcaattaaaatatatatata

SEQ ID NO: 157571 - DNA, 671 bp, Homo sapiens
  Payload ID: 10879
  Gene Symbol: NDUFB4
  Gene Name: NADH dehydrogenase (ubiquinone) 1 beta subcomplex, 4, 15kDa
  Uniprot ID: O95168
  ENST ID: ENST00000184266
  CDS Start-End: 52-441
gacaaagggcctcagaatcgcgcaggcgcaattgtgccctggttcgccaagatgtcgttcccaaagtataagccgtcgagcctgcgcactctgcctgagaccctcgacccagccgaatacaacatatctccggaaacccggcgggcgcaagccgagcggttggccataagagcccagctgaaacgagagtacctgcttcagtacaacgatcccaaccgccgagggctcatcgaaaatcctgccttgcttcgttgggcctatgcaagaacaataaatgtctatcctaatttcagacccactcctaaaaactcactcatgggagctctgtgtggatttgggcccctcatcttcatttattatattatcaaaactgagagggataggaaagaaaaacttatccaggaaggaaaattggatcgaacatttcacctctcatattaagtctggcaatgatgactatatgtattcctgcctaaataaatcatctattaatcattaagtagtagtttctctttcttagtattaccttgattcaatgttaaaaactattaacaccctaacaacacagaagcagacgcagcccgtgttgggaatctgctgtcagagtgacagcaaacatttgctgtacattgaatgaatgaacataaacttcattaaactgtgagctctta

SEQ ID NO: 157572 - DNA, 821 bp, Homo sapiens
  Payload ID: 10879
  Gene Symbol: NDUFB4
  Gene Name: NADH dehydrogenase (ubiquinone) 1 beta subcomplex, 4, 15kDa
  ENST ID: ENST00000461682
  CDS Start-End: 6-215
ccaagatgtcgttcccaaagtataagccgtcgagcctgcgcactctgcctgagaccctcgacccagccgaatacaacatatctccggaaacccggcgggcgcaagccgagcggttggccataagagcccagctgaaacgagagtacctgcttcagtacaacgatcccaaccgccgagggctcatcgtgagtgtggggcctcccaggcgggaatagggcccgagtcctgggagagaccgagagagaccacgcaaagggtcggccaccgctcccgatcagtatctcagacgcaggaaaatcctgccttgcttcgttgggcctatgcaagaacaataaatgtctatcctaatttcagacccactcctaaaaactcactcatgggagctctgtgtggatttgggcccctcatcttcatttattatattatcaaaactgagagggtaagtattcagaccagatgtttagtatttgagtgataggttcactttctagggaccagctgcagctccttctcttgaagattgccaccagtgcccctcccaccttggggctgtcctctgccttcccttcctctcttcttttatctttattcctttccagcaggagttaaaacagaaagttttcagtcacctttgtctatttttgttagttcatttgttttttaaaaagatgatgtttattgggttaagtattagcagaatacataaatcatttagtacgtttcctgtttgcgtgaattctatttatgttggtcacattttgcaaattaatgttaaaacctattaatactctacggacagagaagcacaagctgcctgtgtg

SEQ ID NO: 157573 - DNA, 558 bp, Homo sapiens
  Payload ID: 10879
  Gene Symbol: NDUFB4
  Gene Name: NADH dehydrogenase (ubiquinone) 1 beta subcomplex, 4, 15kDa
  ENST ID: ENST00000491335
  CDS Start-End: 4-213
aagatgtcgttcccaaagtataagccgtcgagcctgcgcactctgcctgagaccctcgacccagccgaatacaacatatctccggaaacccggcgggcgcaagccgagcggttggccataagagcccagctgaaacgagagtacctgcttcagtacaacgatcccaaccgccgagggctcatcgtgagtgtggggcctcccaggcgggaatagggcccgagtcctgggagagaccgagagagaccacgcaaagggtcggccaccgctcccgatcagtatctcagacgcaggaaaatcctgccttgcttcgttgggcctatgcaagaacaataaatgtctatcctaatttcagacccactcctaaaaactcactcatgggagctctgtgtggatttgggcccctcatcttcatttattatattatcaaaactgagagggataggaaagaaaaacttatccaggaaggaaaattggatcgaacatttcacctctcatattaagtctggcaatgatgactatatgtattcctgcctaaataaatcatctattaatcattaa

SEQ ID NO: 157574 - DNA, 309 bp, Homo sapiens
  Payload ID: 10879
  Gene Symbol: NDUFB4
  Gene Name: NADH dehydrogenase (ubiquinone) 1 beta subcomplex, 4, 15kDa
  ENST ID: ENST00000492739
  CDS Start-End: 14-256
ctggttcgccaagatgtcgttcccaaagtataagccgtcgagcctgcgcactctgcctgagaccctcgacccagccgaatacaacatatctccggaaacccggcgggcgcaagccgagcggttggccataagagcccagctgaaacgagagtacctgcttcagtacaacgatcccaaccgccgagggctcatcgataggaaagaaaaacttatccaggaaggaaaattggatcgaacatttcacctctcatattaagtctggcaatgatgactatatgtattcctgcctaaataaatcatctattaatc

SEQ ID NO: 157575 - DNA, 1426 bp, Homo sapiens
  Payload ID: 10879
  Gene Symbol: NDUFB4
  Gene Name: NADH dehydrogenase (ubiquinone) 1 beta subcomplex, 4, 15kDa
  Uniprot ID: O95168
  ENST ID: ENST00000485064
  CDS Start-End: 33-395
gcgcaggcgcaattgtgccctggttcgccaagatgtcgttcccaaagtataagccgtcgagcctgcgcactctgcctgagaccctcgacccagccgaatacaacatatctccggaaacccggcgggcgcaagccgagcggttggccataagagcccagctgaaacgagagtacctgcttcagtacaacgatcccaaccgccgagggctcatcgaaaatcctgccttgcttcgttgggcctatgcaagaacaataaatgtctatcctaatttcagacccactcctaaaaactcactcatgggagctctgtgtggatttgggcccctcatcttcatttattatattatcaaaactgagagggtaagtattcagaccagatgtttagtatttgagtgataggttcactttctagggaccagctgcagctccttctcttgaagattgccaccagtgcccctcccaccttggggctgtcctctgccttcccttcctctcttcttttatctttattcctttccagcaggagttaaaacagaaagttttcagtcacctttgtctatttttgttagttcatttgttttttaaaaagatgatgtttattgggttaagtattagcagaatacataaatcatttagtacgtttcctgtttgcgtgaattctatttatgttggtcacattttgcaaattaatgttaaaacctattaatactctacggacagagaagcacaagctgcctgtgtggggaatagctgccgtcagcagcctgggtatatgattggagagaaagtcaagctgatctttggcaccaaaccattccacatctggtactaaaccctgagctgcagcccccaggcttgtgttgccactggagcccactcgtctagctttgtctttaactggcccatctgcattcccattagagttcgtgtattttgattatctggtgaatgatctacttaacagaaaggtagtccacattttcccagaaagtgtttgcattttgctttcaatatatggttttatgggataatatatttctaatgactaaaatgtgagtaagatgtttttgaataggagcattttcttactgtgtctttagttcctcggattactgtttcttcgcacactccctgggctttagacagtgggattgcaattaggtttggagtgtttcattctgtttgtcagttgtacggtgggttgtgccaaaatgcagtttttcttaccttttttatttatttatttttatctaatatagccaactggcagaatatattgtctttaatgtactttttttctgtctttacaggataggaaagaaaaacttatccaggaaggaaaattggatcgaacatttcacctctcatattaagtctggcaatgatgactatatgtattcctgcctaaataaatcatctattaatca

SEQ ID NO: 157576 - DNA, 1141 bp, Homo sapiens
  Payload ID: 10880
  Gene Symbol: NDUFB5
  Gene Name: NADH dehydrogenase (ubiquinone) 1 beta subcomplex, 5, 16kDa
  Uniprot ID: O43674
  ENST ID: ENST00000259037
  CDS Start-End: 115-684
atagaaaacttgccctcacttaagatggccacatcctgcctttgtcctcattggtaaattggctctctcagcttccgtgacccgcctcccttcttcctcctgcccgtagtagccatggcggccatgagtttgttgcggcgggtttcggttactgcggtggcagctctgtctggccggccccttggcactcgcctcggatttgggggcttcctcactcgtggctttccgaaggctgctgctcctgttcgacacagtggagaccatgggaaaagactatttgtcatcagaccttctagattctatgacaggcgttttttgaagttattgagattctacattgcattgactgggattccagtagcaattttcataactctggtgaatgtattcattggtcaagctgaactagcagaaattccagaaggctatgtcccagaacactgggaatattataagcatcccatatcaagatggattgcccgtaatttctatgatagtcctgaaaagatatatgaaagaacaatggccgtccttcagattgaagctgaaaaggctgaattacgggtaaaggagctggaagtgcgaaaattgatgcatgtgagaggagatggaccctggtattactatgagacaattgacaaggaacttattgatcattctccgaaagcaactcctgacaattaagcatttttttctccaaatacaaagtatattctctttattggaaaataaattaataaatatattctgtatttttgctctccgtgaaaaacaaaagagcctctgacattactgtctctcagtgttggttcagattgaggcttttgtttgaggagtttggcttccagtccccaaagaaggtttaaaatgtactaataaaaactggagaaataggaatttgtgaactcctaaaattgtagcaactttgaaaggttagtgttttatttacctgacaaatggaagttatagaagtctaataatgttaagcaccagtaattatagtattttgtacaaatgcctgtactgtagatgtctgtattattgaggggcaactcaggattttaagttccataaagtattgaaccaactctaaaatgttaactccttaataaacagattctcagtaaacaaattttaaagt

SEQ ID NO: 157577 - DNA, 1054 bp, Homo sapiens
  Payload ID: 10880
  Gene Symbol: NDUFB5
  Gene Name: NADH dehydrogenase (ubiquinone) 1 beta subcomplex, 5, 16kDa
  ENST ID: ENST00000359944
  CDS Start-End: 6-134
tagccatggcggccatgagtttgttgcggcgggtttcggttactgcggtggcagctctgtctggccggccccttggcactcgcctcggatttgggggcttcctcactcgtggctttccgaaggctgctgggtaattcaatattcccagctcctgttcgacacagtggagaccatgggaaaagactatttgtcatcagaccttctagattctatgacaggcgttttttgaagttattgagattctacattgcattgactgggattccagtagcaattttcataactctggtgaatgtattcattggtcaagctgaactagcagaaattccagaaggctatgtcccagaacactgggaatattataagcatcccatatcaagatggattgcccgtaatttctatgatagtcctgaaaagatatatgaaagaacaatggccgtccttcagattgaagctgaaaaggctgaattacgggtaaaggagctggaagtgcgaaaattgatgcatgtgagaggagatggaccctggtattactatgagacaattgacaaggaacttattgatcattctccgaaagcaactcctgacaattaagcatttttttctccaaatacaaagtatattctctttattggaaaataaattaataaatatattctgtatttttgctctccgtgaaaaacaaaagagcctctgacattactgtctctcagtgttggttcagattgaggcttttgtttgaggagtttggcttccagtccccaaagaaggtttaaaatgtactaataaaaactggagaaataggaatttgtgaactcctaaaattgtagcaactttgaaaggttagtgttttatttacctgacaaatggaagttatagaagtctaataatgttaagcaccagtaattatagtattttgtacaaatgcctgtactgtagatgtctgtattattgaggggcaactcaggattttaagttccataaagtattgaaccaactctaaaatgttaactccttaataaacagattctcagtaaacaaattttaaagttta

SEQ ID NO: 157578 - DNA, 671 bp, Homo sapiens
  Payload ID: 10880
  Gene Symbol: NDUFB5
  Gene Name: NADH dehydrogenase (ubiquinone) 1 beta subcomplex, 5, 16kDa
  ENST ID: ENST00000482604
  CDS Start-End: 1-620
tgagtttgttgcggcgggtttcggttactgcggtggcagctctgtctggccggccccttggcactcgcctcggatttgggggcttcctcactcgtggctttccgaaggctgctgctcctgttcgacacagtggagaccatgggaaaagactatttgtcatcagaccttctagattctatgacaggcgttttttgaagttattggctctatacgaacaaagtagaggcttagaaaatgggagattgtctggaccatctgccacgagattctacattgcattgactgggattccagtagcaattttcataactctggtgaatgtattcattggtcaagctgaactagcagaaattccagaaggctatgtcccagaacactgggaatattataagcatcccatatcaagatggattgcccgtaatttctatgatagtcctgaaaagatatatgaaagaacaatggccgtccttcagattgaagctgaaaaggctgaattacgggtaaaggagctggaagtgcgaaaattgatgcatgtgagaggagatggaccctggtattactatgagacaattgacaaggaacttattgatcattctccgaaagcaactcctgacaattaagcatttttttctccaaatacaaagtatattctctttattggaaaataaatt

SEQ ID NO: 157579 - DNA, 729 bp, Homo sapiens
  Payload ID: 10880
  Gene Symbol: NDUFB5
  Gene Name: NADH dehydrogenase (ubiquinone) 1 beta subcomplex, 5, 16kDa
  ENST ID: ENST00000480374
  CDS Start-End: 1-303
gggtttcggttactgcggtggcagctctgtctggccggccccttggcactcgcctcggatttgggggcttcctcactcgtggctttccgaaggctgctgggtaattcaatattcccagctcctgttcgacacagtggagaccatgggaaaagactatttgtcatcagaccttctagattctatgacaggcgttttttgaagttattgagattctacattgcattgactgggattccagtagcaattttcataactctggtgaatgtattcattgcatcccatatcaagatggattgcccgtaatttctatgatagtcctgaaaagatatatgaaagaacaatggccgtccttcagattgaagctgaaaaggctgaattacgggtaaaggagctggaagtgcgaaaattgatgcatgtgagaggagatggaccctggtattactatgagacaattgacaaggaacttattgatcattctccgaaagcaactcctgacaattaagcatttttttctccaaatacaaagtatattctctttattggaaaataaattaataaatatattctgtatttttgctctccgtgaaaaacaaaagagcctctgacattactgtctctcagtgttggttcagattgaggcttttgtttgaggagtttggcttccagtccccaaagaaggtttaaaatgtactaataaaaactggagaaataggaatttgtgaactccta

SEQ ID NO: 157580 - DNA, 744 bp, Homo sapiens
  Payload ID: 10880
  Gene Symbol: NDUFB5
  Gene Name: NADH dehydrogenase (ubiquinone) 1 beta subcomplex, 5, 16kDa
  ENST ID: ENST00000472629
  CDS Start-End: 16-549
ctgcccgtagtagccatggcggccatgagtttgttgcggcgggtttcggttactgcggtggcagctctgtctggccggccccttggcactcgcctcggatttgggggcttcctcactcgtggctttccgaaggctgctgcccctggtaaccaccattctgctgtctttatgattttgactactctatttctcatattctacattgcattgactgggattccagtagcaattttcataactctggtgaatgtattcattggtcaagctgaactagcagaaattccagaaggctatgtcccagaacactgggaatattataagcatcccatatcaagatggattgcccgtaatttctatgatagtcctgaaaagatatatgaaagaacaatggccgtccttcagattgaagctgaaaaggctgaattacgggtaaaggagctggaagtgcgaaaattgatgcatgtgagaggagatggaccctggtattactatgagacaattgacaaggaacttattgatcattctccgaaagcaactcctgacaattaagcatttttttctccaaatacaaagtatattctctttattggaaaataaattaataaatatattctgtatttttgctctccgtgaaaaacaaaagagcctctgacattactgtctctcagtgttggttcagattgaggcttttgtttgaggagtttggcttccagtccccaaagaaggtttaaaatgtactaataa

SEQ ID NO: 157581 - DNA, 684 bp, Homo sapiens
  Payload ID: 10880
  Gene Symbol: NDUFB5
  Gene Name: NADH dehydrogenase (ubiquinone) 1 beta subcomplex, 5, 16kDa
  ENST ID: ENST00000471112
  CDS Start-End: 1-171
attccagtagcaattttcataactctggtgaatgtattcattggtcaagctgaactagcagaaattccagaaggctatgtcccagaacactgggaatattataagggtaaaggagctggaagtgcgaaaattgatgcatgtgagaggagatggaccctggtattactatgagacaattgacaaggaacttattgatcattctccgaaagcaactcctgacaattaagcatttttttctccaaatacaaagtatattctctttattggaaaataaattaataaatatattctgtatttttgctctccgtgaaaaacaaaagagcctctgacattactgtctctcagtgttggttcagattgaggcttttgtttgaggagtttggcttccagtccccaaagaaggtttaaaatgtactaataaaaactggagaaataggaatttgtgaactcctaaaattgtagcaactttgaaaggttagtgttttatttacctgacaaatggaagttatagaagtctaataatgttaagcaccagtaattatagtattttgtacaaatgcctgtactgtagatgtctgtattattgaggggcaactcaggattttaagttccataaagtattgaaccaactctaaaatgttaactccttaataaacagattctcagtaaacaaattttaaagtt

SEQ ID NO: 157582 - DNA, 4046 bp, Homo sapiens
  Payload ID: 10880
  Gene Symbol: NDUFB5
  Gene Name: NADH dehydrogenase (ubiquinone) 1 beta subcomplex, 5, 16kDa
  Uniprot ID: O43674
  ENST ID: ENST00000493866
  CDS Start-End: 26-439
cttcttcctcctgcccgtagtagccatggcggccatgagtttgttgcggcgggtttcggttactgcggtggcagctctgtctggccggccccttggcactcgcctcggatttgggggcttcctcactcgtggctttccgaaggctgctggtcaagctgaactagcagaaattccagaaggctatgtcccagaacactgggaatattataagcatcccatatcaagatggattgcccgtaatttctatgatagtcctgaaaagatatatgaaagaacaatggccgtccttcagattgaagctgaaaaggctgaattacgggtaaaggagctggaagtgcgaaaattgatgcatgtgagaggagatggaccctggtattactatgagacaattgacaaggaacttattgatcattctccgaaagcaactcctgacaattaagcatttttttctccaaatacaaagtatattctctttattggaaaataaattaataaatatattctgtatttttgctctccgtgaaaaacaaaagagcctctgacattactgtctctcagtgttggttcagattgaggcttttgtttgaggagtttggcttccagtccccaaagaaggtttaaaatgtactaataaaaactggagaaataggaatttgtgaactcctaaaattgtagcaactttgaaaggttagtgttttatttacctgacaaatggaagttatagaagtctaataatgttaagcaccagtaattatagtattttgtacaaatgcctgtactgtagatgtctgtattattgaggggcaactcaggattttaagttccataaagtattgaaccaactctaaaatgttaactccttaataaacagattctcagtaaacaaattttaaagtttataatgctttcatggtttttttttttgccatgtattgttcttttttaaactacacacagacacacagacacgtacacacacacacacacacacacacacacacacgctcttttcctagatgcaatctctgggatcccttagagtccttttttggggaagtagttgcactaggtaatgtgattcctgcagagattataaaatgtgagtaaaagctaaaaatgactcatttattaagcatttattgtctgctagacactatattaaataactgcattttttaacattattttcttttctttttttttttttttttttttgacgaaatcttgcactgtcacccaggctagagtgcagtgccgtgatctcggctgcaacctccgcctcccgggttcaagcaattcttgtctcagcctcccaagtagctgggattacaggcacccaccaccacacccggctaatttttgtatttttcagtaaagactgtttcgctgtgttggccaggctggtcttgaacttctgacctcaggtgattggcctgtctccacttcccaaagtgctgattacaggcctgagccactgcacccaacattattttcaaaatgacaagaggtagtatttagtacctgaggctcagatgttaaacacaaactcagtatttacaaaaataaacatttaaaacatttacacttcaacttccaaaatggctttttaccataaacattcaggattttcaaacctgtaacagcttatcaatgcatctcatcttagaagtatgttttacattcttcataaaaataaaaatgaacccaggcttcctaagattcaggccagtgggtctccacttaaggccaaatggagaaataattttttgctgcctaaacacacaagtgaattgaaaagccacaggccattcattcaacaaataactttattatttttattgataatgtacttgtaatgtgctattttgatacatgtatgcaaagtataatggtcaaatcagggtatttgaatatacatatatttcaaaatatagttatatatttcaaaataagatatagcaagttagaagtatatataagtatattattatatgttattgttaactataatttacctactgtactatcaaatactagaacttattccttgtatctaaatgtattcttgtaaccattaactaacttttctgaatttcctactctccccttcccttcccagccttgtaaccacctttctactctgcctccatgagacccattttttaatctcccacatatgagtgagaacattcaatatttgtctttctaggcttggcttatttcacttacattaatgacctccagttccatccatgttgctacaaatgacagaatcccattctttttcataatattgtccatacataccacattttctatatccatttatctgttgatggacacaggttgcaaagggattgctggattgtatgataattctatgtgtagtttcttgaggaaccttcatggtgttcttcatagtggttgtactactgtacattcctaccaatggtggatgagcgttcccctttctccacatcctcacaagcatttgttattttttcttttttttcaaatgaacattttaactggggtgagatatcttaatgtggtattggtttacatttccctaattatggttgagcattttttcacatatctaatggccattcatatgtcttcctttgagaaatgtctatacagatctctggccctttttttaaattttttttttttttgaattggggtcacccagtctggaggtgatctgggcttccacatcctgggctcaagtgatcattccacctcaggatgacccaaatagctaggaccaaaggcgagtgccaccatgctcagctaatttttttgtattttttgtagcgactgggtttcaccatgttgcccaggctggtcttgaactcctgtgctcaagtgatccgctcaccttggcctctcaaagtgcaggtactttaggcgtgcctggcctttttgtccattttatttttttgagatggagtcttgctgtgtcacccaggctggagtgcagtggtgcgatctcgactcagtgcaacctccgcctcccaggttcaagcaattctcctgcctcagcctcctgagtagctgggattacaggtgtgcaccaccacacccagctaatttttttgtatttttagtagagagggggtgtcaccatgttggccagggtgatcttgaacttctgaccttgtgatccacccaccttggtctcccaaagtgctgggattacaggtgtgagccactgcgcccagcctgtccattttttaatcaggttatgggttttttgctattgaattgtttgagttccttatatattctggttatgaatcccttgttagatggtgtgttaggccattcttgtgttgctataaagaaaatcctgagtctgggtaatttataaagaaaaaaggtgtaaatggctcatagttctgcagactgtacaggaagcatggcaccagcattgcttggcttctggggaggcctcaaggaactttcactcatagcagaaagcaaagcaggagcaggcacatcacatggcaagagagcaagagagagaggtggaggagatgccacacactgttttaaacaaccagatctctcaggaactcattgttgttagaaaaggaattaaaagaaatcaaagagtgtgtaagcagaaactcagttgtacgtaagaaaacccaattccccctgagaaagagaaagagctggagtcctttaaaaattcactgcctgtttttctggtggctagtgagtgttagctctcctcccttcccaggcattgtgaagaccctgtttccctagctgtgcagctgcaaggtcactagacagataaactcaagtcgcaaaacatgtttttccttgaaaagtaagaaatgatgtaatgcatgtcttgactgaataactgtctttgtttcttgcttctgtaatatgcttccccctgcacagatctccccctgccccacgaaatgcttaaaagctaacttaactctttgttcagggctcagtcctttggatgttaatctgactgggccggagcacctaaataataaatattctcctgaacccca

SEQ ID NO: 157583 - DNA, 824 bp, Homo sapiens
  Payload ID: 10880
  Gene Symbol: NDUFB5
  Gene Name: NADH dehydrogenase (ubiquinone) 1 beta subcomplex, 5, 16kDa
  ENST ID: ENST00000468210
  CDS Start-End: 8-208
agtagccatggcggccatgagtttgttgcggcgggtttcggttactgcggtggcagctctgtctggccggccccttggcactcgcctcggatttgggggcttcctcactcgtggctttccgaaggctgctgagattctacattgcattgactgggattccagtagcaattttcataactctggtgaatgtattcattggtcaagctgaactagcagaaattccagaaggctatgtcccagaacactgggaatattataagcatcccatatcaagatggattgcccgtaatttctatgatagtcctgaaaagatatatgaaagaacaatggccgtccttcagattgaagctgaaaaggctgaattacgggtaaaggagctggaagtgcgaaaattgatgcatgtgagaggagatggaccctggtattactatgagacaattgacaaggaacttattgatcattctccgaaagcaactcctgacaattaagcatttttttctccaaatacaaagtatattctctttattggaaaataaattaataaatatattctgtatttttgctctccgtgaaaaacaaaagagcctctgacattactgtctctcagtgttggttcagattgaggcttttgtttgaggagtttggcttccagtccccaaagaaggtttaaaatgtactaataaaaactggagaaataggaatttgtgaactcctaaaattgtagcaactttgaaaggttagtgttttatttacctgacaaatggaagttatagaagtctaataatgttaagcaccagtaattatagtattttgtacaaatgcct

SEQ ID NO: 157584 - DNA, 951 bp, Homo sapiens
  Payload ID: 10880
  Gene Symbol: NDUFB5
  Gene Name: NADH dehydrogenase (ubiquinone) 1 beta subcomplex, 5, 16kDa
  ENST ID: ENST00000611971
  CDS Start-End: 30-437
ctcccttcttcctcctgcccgtagtagccatggcggccatgagtttgttgcggcgggtttcggttactgcggtggcagctctgtctggccggccccttggcactcgcctcggatttgggggcttcctcactcgtggctttccgaaggctgctgctcctgttcgacacagtggagaccatgggaaaagactatttgtcatcagaccttctagattctatgacaggcgttttttgaagttattgagattctacattgcattgactgggattccagtagcaattttcataactctggtgaatgtattcattggtcaagctgaactagcagaaattccagaaggctatgtcccagaacactgggaatattataagggtaaaggagctggaagtgcgaaaattgatgcatgtgagaggagatggaccctggtattactatgagacaattgacaaggaacttattgatcattctccgaaagcaactcctgacaattaagcatttttttctccaaatacaaagtatattctctttattggaaaataaattaataaatatattctgtatttttgctctccgtgaaaaacaaaagagcctctgacattactgtctctcagtgttggttcagattgaggcttttgtttgaggagtttggcttccagtccccaaagaaggtttaaaatgtactaataaaaactggagaaataggaatttgtgaactcctaaaattgtagcaactttgaaaggttagtgttttatttacctgacaaatggaagttatagaagtctaataatgttaagcaccagtaattatagtattttgtacaaatgcctgtactgtagatgtctgtattattgaggggcaactcaggattttaagttccataaagtattgaaccaactctaaaatgttaactccttaataaacagattctcagtaaacaaattttaaagttt

SEQ ID NO: 157585 - DNA, 666 bp, Homo sapiens
  Payload ID: 10881
  Gene Symbol: NDUFB6
  Gene Name: NADH dehydrogenase (ubiquinone) 1 beta subcomplex, 6, 17kDa
  Uniprot ID: O95139
  ENST ID: ENST00000350021
  CDS Start-End: 100-441
gttcccgcaaggtcgctttgcagagcgggagcgcgcttaagtaactagtccgtagttcgagggtgcgccgtgtccttttgcgttggtaccagcggcgacatgacggggtacactccggatgagaaactgcggctgcagcagctgcgagagctgagaaggcgatggctgaaggaccaggagctgagccctcgggagccggtgctgcccccacagaagatggggcctatggagaaattctggaataaatttttggagaataaatccccttggaggaaaatggtccatggggtatacaaaaagagtatctttgttttcactcatgtacttgtacctgtctggattattcattattacatgaagtatcatgtttctggtgatacaattctggagactggagaagtaattccaccaatgaaagaatttcctgatcaacatcattaaagattatgtaaaaagttaaaaggcttatgagcctaagtttgttcctatattaccatatttactgaattttctggaaaagtaactttaataaagtttaatctcagaaattgtcatatctgttttcaagcattgtacaatttgagactgagtaatttaacaataagtaaaaagtggacatgctaaacaaatatgagagactacctactttttctggtcattcttgac

SEQ ID NO: 157586 - DNA, 1366 bp, Homo sapiens
  Payload ID: 10881
  Gene Symbol: NDUFB6
  Gene Name: NADH dehydrogenase (ubiquinone) 1 beta subcomplex, 6, 17kDa
  Uniprot ID: O95139
  ENST ID: ENST00000379847
  CDS Start-End: 103-489
ggcgttcccgcaaggtcgctttgcagagcgggagcgcgcttaagtaactagtccgtagttcgagggtgcgccgtgtccttttgcgttggtaccagcggcgacatgacggggtacactccggatgagaaactgcggctgcagcagctgcgagagctgagaaggcgatggctgaaggaccaggagctgagccctcgggagccggtgctgcccccacagaagatggggcctatggagaaattctggaataaatttttggagaataaatccccttggaggaaaatggtccatggggtatacaaaaagagtatctttgttttcactcatgtacttgtacctgtctggattattcattattacatgaagtatcatgtttctgaaaaaccatatggcatagttgaaaagaagtccagaatattccctggtgatacaattctggagactggagaagtaattccaccaatgaaagaatttcctgatcaacatcattaaagattatgtaaaaagttaaaaggcttatgagcctaagtttgttcctatattaccatatttactgaattttctggaaaagtaactttaataaagtttaatctcagaaattgtcatatctgttttcaagcattgtacaatttgagactgagtaatttaacaataagtaaaaagtggacatgctaaacaaatatgagagactacctactttttctggtcattcttgacttggaaaacggtatggaaaagtatttagttacatgtttgtttgtttttttcttacacagtacttacactaatttggtatcagggtatgcaacagtgaaatatcacaataaacaaatgtaagaacagcaattccatgcacttttgttttaaggaaatctttccggccaggcgcagtggctcatgcctgtaatcccagcactttgggaggccgaggcgggcagatcacgaagtcaggagatcgagaccatcatggctaacacagtgaaaccccgtccctactaaaaatacaaaaaaattagccgggcgtggtggcgggctcctgtagtcccagctactgcggaggctgaggcacgagattggtgtgaacccagaaggcggagcttgcagtaagccgagatagtgccactgagcctgggcgacagagcaagactccgtctcaaaaaaaaaaaaagctttccgaatcatttttgaagaatttagaaacttgattgaaaagcttattccaactatgatctgacactcaagactgtcagatttaggttgctgttaattttgtcatgagaatgtaaaatactaaaatctctaagtgaaaaatttgcatactagtgcttgttataaaggataatgcaaaaataaacttgggaactttgca

SEQ ID NO: 157587 - DNA, 761 bp, Homo sapiens
  Payload ID: 10881
  Gene Symbol: NDUFB6
  Gene Name: NADH dehydrogenase (ubiquinone) 1 beta subcomplex, 6, 17kDa
  ENST ID: ENST00000366466
  CDS Start-End: 125-418
gtaataaccgcgcgcggcgctcggcgttcccgcaaggtcgctttgcagagcgggagcgcgcttaagtaactagtccgtagttcgagggtgcgccgtgtccttttgcgttggtaccagcggcgacatgacggggtacactccggatgagaaactgcggctgcagcagctgcgagagctgagaaggcgatggctgaaggaccaggagctgagccctcgggagccggtgctgcccccacagaagatggggcctatggagaaattctggaataaatttttggagaataaatccccttggaggaaaatggaaaaaccatatggcatagttgaaaagaagtccagaatattccctggtgatacaattctggagactggagaagtaattccaccaatgaaagaatttcctgatcaacatcattaaagattatgtaaaaagttaaaaggcttatgagcctaagtttgttcctatattaccatatttactgaattttctggaaaagtaactttaataaagtttaatctcagaaattgtcatatctgttttcaagcattgtacaatttgagactgagtaatttaacaataagtaaaaagtggacatgctaaacaaatatgagagactacctactttttctggtcattcttgacttggaaaacggtatggaaaagtatttagttacatgtttgtttgtttttttcttacacagtacttacactaatttggtatcagggtatgcaacagtgaaatatcacaataaacaaatgt

SEQ ID NO: 157588 - DNA, 531 bp, Homo sapiens
  Payload ID: 10882
  Gene Symbol: NDUFB7
  Gene Name: NADH dehydrogenase (ubiquinone) 1 beta subcomplex, 7, 18kDa
  Uniprot ID: P17568
  ENST ID: ENST00000215565
  CDS Start-End: 63-476
gtggttccgggtaggagctaggtgaccctcggctgctgcagggatctgcagcgactgcagccatgggggcccacctggtccggcgctacctgggcgatgcctcggtggagcccgaccccctgcagatgccaaccttcccgccagactacggcttccccgaacgcaaggagcgcgagatggtggccacacagcaggagatgatggacgcgcagctgaggctccagctgcgggactactgcgcccaccacctcatccggctgctcaagtgcaagcgtgacagcttccccaacttcctggcctgcaagcaggagcggcacgactgggactactgcgagcaccgcgactatgtgatgcgcatgaaggagtttgagcgggagcggaggctgctccagcggaagaagcggcgggagaagaaggcggcagagttggccaaaggccagggacccggggaagtggaccccaaggtggccctgtagggggtgcaccccccaccctatggaccagtcaaataaaagccttcaggcccctcaa

SEQ ID NO: 157589 - DNA, 529 bp, Homo sapiens
  Payload ID: 10882
  Gene Symbol: NDUFB7
  Gene Name: NADH dehydrogenase (ubiquinone) 1 beta subcomplex, 7, 18kDa
  ENST ID: ENST00000593353
  CDS Start-End: 63-275
gtggttccgggtaggagctaggtgaccctcggctgctgcagggatctgcagcgactgcagccatgggggcccacctggtccggcgctacctgggcgatgcctcggtggagcccgaccccctgcagatgccaaccttcccgccagactacggcttccccgaacgcaaggagcgcgatggtggccacacagcaggagatgatggacgcgcagctgaggctccagctgcgggactactgcgcccaccacctcatccggctgctcaagtgcaagcgtgacagcttccccaacttcctggcctgcaagcaggagcggcacgactgggactactgcgagcaccgcgactatgtgatgcgcatgaaggagtttgagcgggagcggaggctgctccagcggaagaagcggcgggagaagaaggcggcagagttggccaaaggccagggacccggggaagtggaccccaaggtggccctgtagggggtgcaccccccaccctatggaccagtcaaataaaagccttcaggcccctcaa

SEQ ID NO: 157590 - DNA, 671 bp, Homo sapiens
  Payload ID: 10883
  Gene Symbol: NDUFB8
  Gene Name: NADH dehydrogenase (ubiquinone) 1 beta subcomplex, 8, 19kDa
  Uniprot ID: O95169
  ENST ID: ENST00000299166
  CDS Start-End: 14-574
gaagaaggtgaagatggcggtggccagggccggggtcttgggagtccagtggctgcaaagggcatcccggaacgtgatgccgctgggcgcacggacagcctcccacatgaccaaggacatgttcccggggccctatcctaggaccccagaagaacgggccgccgccgccaagaagtataatatgcgtgtggaagactacgaaccttacccggatgatggcatggggtatggcgactacccgaagctccctgaccgctcacagcatgagagagatccatggtatagctgggaccagccgggcctgaggttgaactggggtgaaccgatgcactggcacctagacatgtacaacaggaaccgtgtggatacatcccccacacctgtttcttggcatgtcatgtgtatgcagctcttcggtttcctggctttcatgatattcatgtgctgggtgggggacgtgtaccctgtctaccagcctgtgggaccaaagcagtatccttacaataatctgtacctggaacgaggcggtgatccctccaaagaaccagagcgggtggttcactatgagatctgaggaggcttcgtgggcttttgggtcctctaactaggactccctcattcctagaaatttaaccttaatgaaatccctaataaaactcagtgctgtgtta

SEQ ID NO: 157591 - DNA, 684 bp, Homo sapiens
  Payload ID: 10883
  Gene Symbol: NDUFB8
  Gene Name: NADH dehydrogenase (ubiquinone) 1 beta subcomplex, 8, 19kDa
  Uniprot ID: O95169
  ENST ID: ENST00000370320
  CDS Start-End: 14-532
gaagaaggtgaagatggcggtggccagggccggggtcttgggagtccagtggctgcaaagggcatcccggaacgtgatgccgctgggcgcacggacagcctcccacatgaccaaggacatgttcccggggccctatcctaggaccccagaagaacgggccgccgccgccaagaagtataatatgcgtgtggaagactacgaaccttacccggatgatggcatggggtatggcgactacccgaagctccctgaccgctcacagcatgagagagatccatggtatagctgggaccagccgggcctgaggttgaactggggtgaaccgatgcactggcacctagacatgtacaacaggaaccgtgtggatacatcccccacacctgtttcttggcatgtcatgtgtatgcagctcttcggtttcctggctttcatgatattcatgtgctgggtgggggacgtgtaccctgtctaccagcctgtgtgtaggcaccacttctcttacaatttaggctttctctctgccttgggctgagtgaggaagaggagtgctgttcctgccttcctagcccagctgggtctgaccagaggctactgtgtacccatttaccatgcgtgattgttaactcagagtggggtgtagccaggtattgactgaatgtatgttcttgctgacctgtgtttttt

SEQ ID NO: 157592 - DNA, 713 bp, Homo sapiens
  Payload ID: 10883
  Gene Symbol: NDUFB8
  Gene Name: NADH dehydrogenase (ubiquinone) 1 beta subcomplex, 8, 19kDa
  Uniprot ID: O95169
  ENST ID: ENST00000370322
  CDS Start-End: 152-619
ttggcttcccaactgcgtatttaaaccccgcccctgttgaacccttcggcttttcttcactcccggcttcctccgtcacgtttggcccggctcagccgccgtgacaggcctttgcgcatgtgcagaagggaaacgtgaagaagcctcccacatgaccaaggacatgttcccggggccctatcctaggaccccagaagaacgggccgccgccgccaagaagtataatatgcgtgtggaagactacgaaccttacccggatgatggcatggggtatggcgactacccgaagctccctgaccgctcacagcatgagagagatccatggtatagctgggaccagccgggcctgaggttgaactggggtgaaccgatgcactggcacctagacatgtacaacaggaaccgtgtggatacatcccccacacctgtttcttggcatgtcatgtgtatgcagctcttcggtttcctggctttcatgatattcatgtgctgggtgggggacgtgtaccctgtctaccagcctgtgggaccaaagcagtatccttacaataatctgtacctggaacgaggcggtgatccctccaaagaaccagagcgggtggttcactatgagatctgaggaggcttcgtgggcttttgggtcctctaactaggactccctcattcctagaaatttaaccttaatgaaatccctaataaaactcagtgctgtg

SEQ ID NO: 157593 - DNA, 608 bp, Homo sapiens
  Payload ID: 10883
  Gene Symbol: NDUFB8
  Gene Name: NADH dehydrogenase (ubiquinone) 1 beta subcomplex, 8, 19kDa
  ENST ID: ENST00000528425
  CDS Start-End: 20-235
aaacgtgaagaaggtgaagatggcggtggccagggccggggtcttgggagtccagtggctgcaaagggcatcccggaacgtgatgccgctgggcgcacggacagcctcccacatgaccaaggacatgttcccggggccctatcctaggaccccagaagaacgggccgccgccgccaagaagtataatatgcgtgtggaagactacgaaccttacccggatgatggcatggggtgagacagagagggtatggcgactacccgaagctccctgaccgctcacagcatgagagagatccatggtatagctgggaccagccgggcctgaggttgaactggggtgaaccgatgcactggcacctagacatgtacaacaggaaccgtgtggatacatcccccacacctgtttcttggcatgtcatgtgtatgcagctcttcggtttcctggctttcatgatattcatgtgctgggtgggggacgtgtaccctgtctaccagcctgtgtgtaggcaccacttctcttacaatttaggctttctctctgccttgggctgagtgaggaagaggagtgctgttcctgccttcctagcccagctgggtctgaccagagg

SEQ ID NO: 157594 - DNA, 711 bp, Homo sapiens
  Payload ID: 10884
  Gene Symbol: NDUFB9
  Gene Name: NADH dehydrogenase (ubiquinone) 1 beta subcomplex, 9, 22kDa
  Uniprot ID: Q9Y6M9
  ENST ID: ENST00000276689
  CDS Start-End: 85-624
ccttccggctggccccgctcagtcacccgcagcaggcgtgcagtttcccggctctccgcgcggccggggaaggtcagcgccgtaatggcgttcttggcgtcgggaccctacctgacccatcagcaaaaggtgttgcggctttataagcgggcgctacgccacctcgagtcgtggtgcgtccagagagacaaataccgatactttgcttgtttgatgagagcccggtttgaagaacataagaatgaaaaggatatggcgaaggccacccagctgctgaaggaggccgaggaagaattctggtaccgtcagcatccacagccatacatcttccctgactctcctgggggcacctcctatgagagatacgattgctacaaggtcccagaatggtgcttagatgactggcatccttctgagaaggcaatgtatcctgattactttgccaagagagaacagtggaagaaactgcggagggaaagctgggaacgagaggttaagcagctgcaggaggaaacgccacctggtggtcctttaactgaagctttgccccctgcccgaaaggaaggtgatttgcccccactgtggtggtatattgtgaccagaccccgggagcggcccatgtagaaagagagagacctcatctttcatgcttgcaagtgaaatatgttacagaacatgcacttgccctaataaaaaatcagtgaaatggtc

SEQ ID NO: 157595 - DNA, 789 bp, Homo sapiens
  Payload ID: 10884
  Gene Symbol: NDUFB9
  Gene Name: NADH dehydrogenase (ubiquinone) 1 beta subcomplex, 9, 22kDa
  ENST ID: ENST00000518008
  CDS Start-End: 57-593
gcagcaggcgtgcagtttcccggctctccgcgcggccggggaaggtcagcgccgtaatggcgttcttggcgtcgggaccctacctgacccatcagcaaaaggtgttgcggctttataagcgggcgctacgccacctcgagtcgtggtgcgtccagagagacaaataccgatactttgcttgtttgatgagagcccggtttgaagaacataagaatgaaaaggatatggcgaaggccacccagctgctgaaggaggccgaggaagaattctggtaccgtcagcatccacagccatacatcttccctgactctcctgggggcacctcctatgagagatacgattgctacaaggtcccagaatggtgcttagatgactggcatccttctgagaaggcaatgtatcctgattactttgccaagagagaacagtggaagaaactgcggagggaaagctgggaacgagaggtgcgttctacttgtacttcgttattccttagctatgtagatggagtgaagttttgctccccacaagcagaggtccagattccagccatgacagttactctgggcccttgcttctcagatatactttagtatctaagtgtatcaatttaacatttataatcaccttacaagtaagttaaagtgcattccctggtcgttttggctttgtctttgattttgcttcagatctccttctctttagtcctttgtctgacttttttgccttcttgctatactttccctcaacctgcctctccactattttcttaggcatttttcagtcatg

SEQ ID NO: 157596 - DNA, 636 bp, Homo sapiens
  Payload ID: 10884
  Gene Symbol: NDUFB9
  Gene Name: NADH dehydrogenase (ubiquinone) 1 beta subcomplex, 9, 22kDa
  ENST ID: ENST00000517367
  CDS Start-End: 44-550
agtttcccggctctccgcgcggccggggaaggtcagcgccgtaatggcgttcttggcgtcgggaccctacctgacccatcagcaaaaggtgttgcggctttataagcgggcgctacgccacctcgagtcgtggtgcgtccagagagcccggtttgaagaacataagaatgaaaaggatatggcgaaggccacccagctgctgaaggaggccgaggaagaattctggtaccgtcagcatccacagccatacatcttccctgactctcctgggggcacctcctatgagagatacgattgctacaaggtcccagaatggtgcttagatgactggcatccttctgagaaggcaatgtatcctgattactttgccaagagagaacagtggaagaaactgcggagggaaagctgggaacgagaggttaagcagctgcaggaggaaacgccacctggtggtcctttaactgaagctttgccccctgcccgaaaggaaggtgatttgcccccactgtggtggtatattgtgaccagaccccgggagcggcccatgtagaaagagagagacctcatctttcatgcttgcaagtgaaatatgttacagaacatgcacttgccctaataaaaaatcagtgaaatggt

SEQ ID NO: 157597 - DNA, 1319 bp, Homo sapiens
  Payload ID: 10884
  Gene Symbol: NDUFB9
  Gene Name: NADH dehydrogenase (ubiquinone) 1 beta subcomplex, 9, 22kDa
  ENST ID: ENST00000522532
  CDS Start-End: 48-713
gtgcagtttcccggctctccgcgcggccggggaaggtcagcgccgtaatggcgttcttggcgtcgggaccctacctgacccatcagcaaaaggtgttgcggctttataagcgggcgctacgccacctcgagtcgtggtgcgtccagagagacaaataccgatactttgcttgtttgatgagagcccggtttgaagaacataagaatgaaaaggatatggcgaaggccacccagctgctgaaggaggccgaggaagaattctggtaccgtcagcatccacagccatacatcttccctgactctcctgggggcacctcctatgagagatacgattgctacaaggtcccagaatggtgcttagatgactggcatccttctgagaaggcaatgtatcctgattactttgccaagagagaacagtggaagaaactgcggagggaaagctgggaacgagagcaacttagtaaaagacaagtaagacaggagctggggaccatggaagaaacatcccatgtgctttatcgaagtgccaagttgggaccacgggccgggctagaacgatccatggaaaagttctgtgctcaggggaacaactcaaattcagacattttgctagggctaagggaaatgagctggtaccttcgaatcagcttccagaacgcctgcagtgcaagttctcaattacggcatgcaaatgatttccttaaaaattaagtctaaattgattcattgaggctcttggatattcatctcatggtcaccccttagtactcggctacaacagtgagtctcaaaaccacctggagtgctcctttaaaacacagacgactgggtccccacccccagaggtttggacttggtgggtctgggttgggcccaagaacttgcatttctagccagttcccacgtgatgctgctgacctggggacctcactttgagaaccaccctgctgggccttcttgacttggtgagacaaagtaacggggaacaagtggtactagaacagtgaatgaggagtgagctacatggccatcaacttgcactgaatcgctggtctgtacaggagataccaccatcatgattcctgacagtagattctccatgactcaacagtggatggataaaattagaaggaagccacctctacaccagcagtttaaaccttctggagttttccattaacttacaatcactggccgcagcatagagatgaaggtacagaatcggccacgttcttcaatcaaagccttccggacagcctgcttttctgtttcttccaataagagatacttatcattgacatcttggagagcactgtc

SEQ ID NO: 157598 - DNA, 717 bp, Homo sapiens
  Payload ID: 10885
  Gene Symbol: NDUFAB1
  Gene Name: NADH dehydrogenase (ubiquinone) 1, alpha/beta subcomplex, 1, 8kDa
  Uniprot ID: O14561
  ENST ID: ENST00000007516
  CDS Start-End: 67-537
gcgcgccgccggaaaggaaccctggtccggaggcggcggcgcagtgcatcctgggttggcgtagccatggcgtctcgtgtcctttcagcctatgtcagccgcctgcccgcggcctttgcgccgctgccccgggtccggatgctggccgtggcccggcctctcagcaccgctctctgctccgcggggacccagacgaggctcgggactttgcagccggccttagtgctcgcgcaggttcctggtagagttacacagttgtgccgccagtatagcgacatgcctcctttgacgttagagggcatccaggaccgtgttctttacgtattgaaactctatgacaagattgacccagagaagctttcagtaaattctcattttatgaaagacctgggcttagacagtttggaccaagtggagattatcatggccatggaagacgaatttgggtttgaaattcctgatatagatgctgaaaagttaatgtgtccacaagaaattgtagattacattgcagataagaaggatgtatatgaataaagtatcagaccctttggctttgctgagagaggactcagatgatagtgacgaatgtctggcagtgaggacacattttggcattcttgctgactctgacagagtgattctgatggacttgtatttaaattgtatgtgttttactctttgaaaataaatctataaaaccaacattttccccca

SEQ ID NO: 157599 - DNA, 843 bp, Homo sapiens
  Payload ID: 10885
  Gene Symbol: NDUFAB1
  Gene Name: NADH dehydrogenase (ubiquinone) 1, alpha/beta subcomplex, 1, 8kDa
  ENST ID: ENST00000484769
  CDS Start-End: 14-238
ggttggcgtagccatggcgtctcgtgtcctttcagcctatgtcagccgcctgcccgcggcctttgcgccgctgccccgggtccggatgctggccgtggcccggcctctcagcaccgctctctgctccgcggggacccagacgaggctcgggactttgcagccggccttagtgctcgcgcagcaccttctgcctgtgtccaggactcctggaagtaattctaggaaacaagccaagtgacctttgaccaataaggatttgaattgcgcgggtccacttatatgcggattttttttcaaccaaacgcgaccagtatttacgggatgtgccgccccgcgtataaggagggcaggctcttcctataagcggattctgcaaggctgactgcgggacgttcctggtagagttacacagttgtgccgccagtatagcgacatgcctcctttgacgttagagggcatccaggaccgtgttctttacgtattgaaactctatgacaagattgacccagagaagctttcagtaaattctcattttatgaaagacctgggcttagacagtttggaccaagtggagattatcatggccatggaagacgaatttgggtttgaaattcctgatatagatgctgaaaagttaatgtgtccacaagaaattgtagattacattgcagataagaaggatgtatatgaataaagtatcagaccctttggctttgctgagagaggactcagatgatagtgacgaatgtctggcagtgaggacacattttggcattcttgctgactctgacagagtgattctgatggacttgtatttaaattgtatgtgttttactctttgaa

SEQ ID NO: 157600 - DNA, 503 bp, Homo sapiens
  Payload ID: 10885
  Gene Symbol: NDUFAB1
  Gene Name: NADH dehydrogenase (ubiquinone) 1, alpha/beta subcomplex, 1, 8kDa
  ENST ID: ENST00000562133
  CDS Start-End: 1-335
tcctttcagcctatgtcagccgcctgcccgcggcctttgcgccgctgccccgggtccggatgctggccgtggcccggcctctcagcaccgctctctgctccgcggggacccagacgaggctcgggactttgcagccggccttagtgctcgcgcagctttcagtaaattctcattttatgaaagacctgggcttagacagtttggaccaagtggagattatcatggccatggaagacgaatttgggtttgaaattcctgatatagatgctgaaaagttaatgtgtccacaagaaattgtagattacattgcagataagaaggatgtatatgaataaagtatcagaccctttggctttgctgagagaggactcagatgatagtgacgaatgtctggcagtgaggacacattttggcattcttgctgactctgacagagtgattctgatggacttgtatttaaattgtatgtgttttactctttgaaaataaatctataaaaccaa

SEQ ID NO: 157601 - DNA, 885 bp, Homo sapiens
  Payload ID: 10885
  Gene Symbol: NDUFAB1
  Gene Name: NADH dehydrogenase (ubiquinone) 1, alpha/beta subcomplex, 1, 8kDa
  Uniprot ID: O14561
  ENST ID: ENST00000570319
  CDS Start-End: 2-472
catggcgtctcgtgtcctttcagcctatgtcagccgcctgcccgcggcctttgcgccgctgccccgggtccggatgctggccgtggcccggcctctcagcaccgctctctgctccgcggggacccagacgaggctcgggactttgcagccggccttagtgctcgcgcaggttcctggtagagttacacagttgtgccgccagtatagcgacatgcctcctttgacgttagagggcatccaggaccgtgttctttacgtattgaaactctatgacaagattgacccagagaagctttcagtaaattctcattttatgaaagacctgggcttagacagtttggaccaagtggagattatcatggccatggaagacgaatttgggtttgaaattcctgatatagatgctgaaaagttaatgtgtccacaagaaattgtagattacattgcagataagaaggatgtatatgaataaagtatcaggtaaatagacttaaaaaatgatgttcacccatagatttgtctgtggttcttcaataaaggaaacttaagaagaaacagaaaatggaaatgcttgaccaagatttttcactacttataaaatgcaagccctttcctgttgtctgccactcaaaggggcccagccctggtggtgatctttgagaggttgagaactgtcattcctggatagaactcccttgattgtcagctgtcctcacaaaagcagaacattgtacaaagtactgaacagggtaacctggaaacagacctctgtctccctcaattactcagccaaggtaagcccagcctgctgggtaagacactgaagtgacctggctcttaagtaggcaagagaggcctcatgtataagaggatggactttggagt

SEQ ID NO: 157602 - DNA, 520 bp, Homo sapiens
  Payload ID: 10885
  Gene Symbol: NDUFAB1
  Gene Name: NADH dehydrogenase (ubiquinone) 1, alpha/beta subcomplex, 1, 8kDa
  ENST ID: ENST00000567761
  CDS Start-End: 311-520
cagagatccagttagaaggagcagcaagaccttccaggaggccatgctggaaggacatggggtgaggaggatacctaaccttcccttgcctcagtttctcatctgtaaaaaggagggtgatagtatcatggatctcaccagaatactggagagctgaagaaagatgatgtgtgtaaagtgcaatatcatagcctgagctgataagaaattaatggaggccgggacgtggtggcttatgcatgtaatcccagcactttgagaggctgaggttcctggtagagttacacagttgtgccgccagtatagcgacatgcctcctttgacgttagagggcatccaggaccgtgttctttacgtattgaaactctatgacaagattgacccagagaagctttcagtaaattctcattttatgaaagacctgggcttagacagtttggaccaagtggagattatcatggccatggaagacgaatttgggtttgaaattcctgatatagatgctgaaaagttaatgtgt

SEQ ID NO: 157603 - DNA, 598 bp, Homo sapiens
  Payload ID: 10886
  Gene Symbol: NDUFC1
  Gene Name: NADH dehydrogenase (ubiquinone) 1, subcomplex unknown, 1, 6kDa
  Uniprot ID: O43677
  ENST ID: ENST00000394223
  CDS Start-End: 286-516
ccagaaacgagaacaacggaggcagaggagctgaagactccagtatgcaactgactacaaggagatgcagtttcacatacagctgggtactccaagtgtacagttcccatcagctctaatatgacagaaggctgaggccggggtgctagagaaccttgccgtgctggaattcacgttgacgcccccacggagctctgctgcagagccctcgagtcccgcacttccggccgccaggtggcgctggttctgttgccaactcggagagactgagctgggccacgcaagatggcgccgtccgccttgctgcgtcccctttcccggctgctggcccccgccaggctcccgagcggcccttcagtgcgatcaaagttctacgtgcgagagccgccgaatgccaaacctgactggctgaaagttgggttcaccttgggcaccactgtcttcttgtggatctatctcatcaaacaacacaatgaagatattttagagtacaaaagaagaaatgggctggaataaacttttgaaacactaatgtagtatgctccgtatagtgattgtagctgttcctctggattcaccatctgttgagttgtaaatg

SEQ ID NO: 157604 - DNA, 761 bp, Homo sapiens
  Payload ID: 10886
  Gene Symbol: NDUFC1
  Gene Name: NADH dehydrogenase (ubiquinone) 1, subcomplex unknown, 1, 6kDa
  Uniprot ID: O43677
  ENST ID: ENST00000394228
  CDS Start-End: 335-565
cctcccgagaagagtgacggggtggggctgtttcccgctcggaaactaagaaataaatgcctcatccctactccagaaacgagaacaacggaggcagaggagctgaagactccagtatgcaactgactacaaggaggtttgtgaggcttcagtatgatcgtgagtgtaagtgacagaaggctgaggccggggtgctagagaaccttgccgtgctggaattcacgttgacgcccccacggagctctgctgcagagccctcgagtcccgcacttccggccgccaggtggcgctggttctgttgccaactcggagagactgagctgggccacgcaagatggcgccgtccgccttgctgcgtcccctttcccggctgctggcccccgccaggctcccgagcggcccttcagtgcgatcaaagttctacgtgcgagagccgccgaatgccaaacctgactggctgaaagttgggttcaccttgggcaccactgtcttcttgtggatctatctcatcaaacaacacaatgaagatattttagagtacaaaagaagaaatgggctggaataaacttttgaaacactaatgtagtatgctccgtatagtgattgtagctgttcctctggattcaccatctgttgagttgtaaatgtgagagaaaaagttatatgtgaatatatatcaagccagcatttgtattttgcatcattaaataaaaagaaataaaaatacttctgtattcttcagataaagcatattgtgacaa

SEQ ID NO: 157605 - DNA, 809 bp, Homo sapiens
  Payload ID: 10886
  Gene Symbol: NDUFC1
  Gene Name: NADH dehydrogenase (ubiquinone) 1, subcomplex unknown, 1, 6kDa
  Uniprot ID: O43677
  ENST ID: ENST00000505036
  CDS Start-End: 404-634
ctcgcacactgtgtgatcatcgtttgagcccaaagtgctaaaatacaggtgtaggtgtttgagaagcgctgtagttgattatggacgaaatgcctaatttaaggagcagaggcggagtggaaaatgaaaaaagcttcaccgcagtggagacttgttaacagccctggggagaaaggggcttaacagagtctggaaatcgtgaaagagcttgaccgatgaaatgggcctggctgtcgtatcgacagaaggctgaggccggggtgctagagaaccttgccgtgctggaattcacgttgacgcccccacggagctctgctgcagagccctcgagtcccgcacttccggccgccaggtggcgctggttctgttgccaactcggagagactgagctgggccacgcaagatggcgccgtccgccttgctgcgtcccctttcccggctgctggcccccgccaggctcccgagcggcccttcagtgcgatcaaagttctacgtgcgagagccgccgaatgccaaacctgactggctgaaagttgggttcaccttgggcaccactgtcttcttgtggatctatctcatcaaacaacacaatgaagatattttagagtacaaaagaagaaatgggctggaataaacttttgaaacactaatgtagtatgctccgtatagtgattgtagctgttcctctggattcaccatctgttgagttgtaaatgtgagagaaaaagttatatgtgaatatatatcaagccagcatttgtattttgcatcattaaataaaaagaaataaaaatacttctgtattcttc

SEQ ID NO: 157606 - DNA, 628 bp, Homo sapiens
  Payload ID: 10886
  Gene Symbol: NDUFC1
  Gene Name: NADH dehydrogenase (ubiquinone) 1, subcomplex unknown, 1, 6kDa
  Uniprot ID: O43677
  ENST ID: ENST00000503997
  CDS Start-End: 18-248
gagctgggccacgcaagatggcgccgtccgccttgctgcgtcccctttcccggctgctggcccccgccaggctcccgagcggcccttcagtgcgatcaaagttctacgtgcgagagccgccgaatgccaaacctgactggctgaaagttgggttcaccttgggcaccactgtcttcttgtggatctatctcatcaaacaacacaatgaagatattttagagtacaaaagaagaaatgggctggaataaacttttgaaacactaatgtacatctctgcgccggatgtcatctaacagattccctggatcatctggatcaaatatgatttattatctggttgtaggcgtcacagtcagtgctggtggatattatgcttacaagacagtcacatcagaccaagccaaacacacagaacataaaacaaatttgaaagaaaaaacaaaagcagagatacatccatttcaaggtgaaaaggagaatgttgcggaaactgagaaagcaagttcagaagccccagaagaacttatagtggaagctgaggtggtagatgctgaagaaagtcccagtgctacagttgtggtcataaaagaggcatctgcctgtccaggtcacgtggaggctgctccgg

SEQ ID NO: 157607 - DNA, 725 bp, Homo sapiens
  Payload ID: 10886
  Gene Symbol: NDUFC1
  Gene Name: NADH dehydrogenase (ubiquinone) 1, subcomplex unknown, 1, 6kDa
  Uniprot ID: O43677
  ENST ID: ENST00000539387
  CDS Start-End: 299-529
cctcccgagaagagtgacggggtggggctgtttcccgctcggaaactaagaaataaatgcctcatccctactccagaaacgagaacaacggaggcagaggagctgaagactccagtatgcaactgactacaaggagacagaaggctgaggccggggtgctagagaaccttgccgtgctggaattcacgttgacgcccccacggagctctgctgcagagccctcgagtcccgcacttccggccgccaggtggcgctggttctgttgccaactcggagagactgagctgggccacgcaagatggcgccgtccgccttgctgcgtcccctttcccggctgctggcccccgccaggctcccgagcggcccttcagtgcgatcaaagttctacgtgcgagagccgccgaatgccaaacctgactggctgaaagttgggttcaccttgggcaccactgtcttcttgtggatctatctcatcaaacaacacaatgaagatattttagagtacaaaagaagaaatgggctggaataaacttttgaaacactaatgtagtatgctccgtatagtgattgtagctgttcctctggattcaccatctgttgagttgtaaatgtgagagaaaaagttatatgtgaatatatatcaagccagcatttgtattttgcatcattaaataaaaagaaataaaaatacttctgtattcttcagataaagcatattgtgacaa

SEQ ID NO: 157608 - DNA, 1198 bp, Homo sapiens
  Payload ID: 10886
  Gene Symbol: NDUFC1
  Gene Name: NADH dehydrogenase (ubiquinone) 1, subcomplex unknown, 1, 6kDa
  Uniprot ID: O43677
  ENST ID: ENST00000539002
  CDS Start-End: 772-1002
aagagtctcgcacactgtgtgatcatcgtttgagcccaaagtgctaaaatacaggtgtaggtgtttgagaagcgctgtagttgattatggacgaaatgcctaatttaaggagcagaggcggagtggaaaatgaaaaaagcttcaccgcagtggagacttgttaacagccctggggagaaaggggcttaacagagtctggaaatcgtgaaagagcttgaccgatgaaatgggcctggctgtcgtatcggtaatttggtgaatgttgcttaagatcagcctggaaaggtagttagtcagatccgaagtgacatatttgcactgccaaaggaggctctggaggttaaagtatgtgttttaatttcgttgttgaggccatataatgcagagttgacggaccgaccttatgagtcaccttggagcggagtagtggagacttaaagacagactaccctggagctggcttcaaactagttcttaatattgtgactcgaactccccatccccagaaattctcagatcttagaagccaaagactggcaaggatactagagggaactactcgagtaggcgaggtcagactacataccgaataggagtccttccaaaaatacagaaggctgaggccggggtgctagagaaccttgccgtgctggaattcacgttgacgcccccacggagctctgctgcagagccctcgagtcccgcacttccggccgccaggtggcgctggttctgttgccaactcggagagactgagctgggccacgcaagatggcgccgtccgccttgctgcgtcccctttcccggctgctggcccccgccaggctcccgagcggcccttcagtgcgatcaaagttctacgtgcgagagccgccgaatgccaaacctgactggctgaaagttgggttcaccttgggcaccactgtcttcttgtggatctatctcatcaaacaacacaatgaagatattttagagtacaaaagaagaaatgggctggaataaacttttgaaacactaatgtagtatgctccgtatagtgattgtagctgttcctctggattcaccatctgttgagttgtaaatgtgagagaaaaagttatatgtgaatatatatcaagccagcatttgtattttgcatcattaaataaaaagaaataaaaatacttctgtattcttcagataaagcatattgtgacaa

SEQ ID NO: 157609 - DNA, 1257 bp, Homo sapiens
  Payload ID: 10886
  Gene Symbol: NDUFC1
  Gene Name: NADH dehydrogenase (ubiquinone) 1, subcomplex unknown, 1, 6kDa
  Uniprot ID: O43677
  ENST ID: ENST00000544855
  CDS Start-End: 831-1061
aagagtctcgcacactgtgtgatcatcgtttgagcccaaagtgctaaaatacaggtgtaggtgtttgagaagcgctgtagttgattatggacgaaatgcctaatttaaggagcagaggcggagtggaaaatgaaaaaagcttcaccgcagtggagacttgttaacagccctggggagaaaggggcttaacagagtctggaaatcgtgaaagagcttgaccgatgaaatgggcctggctgtcgtatcggtaatttggtgaatgttgcttaagatcagcctggaaaggtagttagtcagatccgaagtgacatatttgcactgccaaaggaggctctggaggttaaagtatgtgttttaatttcgttgttgaggccatataatgcagagttgacggaccgaccttatgagtcaccttggagcggagtagtggagacttaaagacagactaccctggagctggcttcaaactagttcttaatattgtgactcgaactccccatccccagaaattctcagatcttagaagccaaagactggcaaggatactagagggaactactcgagtaggcgaggtcagactacataccgaataggagtccttccaaaaatatgcagtttcacatacagctgggtactccaagtgtacagttcccatcagctctaatatgacagaaggctgaggccggggtgctagagaaccttgccgtgctggaattcacgttgacgcccccacggagctctgctgcagagccctcgagtcccgcacttccggccgccaggtggcgctggttctgttgccaactcggagagactgagctgggccacgcaagatggcgccgtccgccttgctgcgtcccctttcccggctgctggcccccgccaggctcccgagcggcccttcagtgcgatcaaagttctacgtgcgagagccgccgaatgccaaacctgactggctgaaagttgggttcaccttgggcaccactgtcttcttgtggatctatctcatcaaacaacacaatgaagatattttagagtacaaaagaagaaatgggctggaataaacttttgaaacactaatgtagtatgctccgtatagtgattgtagctgttcctctggattcaccatctgttgagttgtaaatgtgagagaaaaagttatatgtgaatatatatcaagccagcatttgtattttgcatcattaaataaaaagaaataaaaatacttctgtattcttcagataaagcatattgtgacaa

SEQ ID NO: 157610 - DNA, 2518 bp, Homo sapiens
  Payload ID: 10887
  Gene Symbol: NDUFC2
  Gene Name: NADH dehydrogenase (ubiquinone) 1, subcomplex unknown, 2, 14.5kDa
  Uniprot ID: O95298
  ENST ID: ENST00000281031
  CDS Start-End: 476-835
tagcttttatggaatttcaattaattacgtttatcaaaactacgcatcatgcccatttgtgggtattggatgaaaagataaatctttccagaaggggcaggggagggagaggcaattctggttggggaagttgggagaaaagaaaatcagtatctcctagtcttcgcccagtttggctcgtttggggtactcctcgaccccgcgttaccaggcccgtgaatcccactcccaccagagaattagcgcgggcggacgagcaaagtgaaacttagtagcccggaacttcgcgtgccgggttcccgcagcaacacgtaccgggaagcgtttgggcgctgcaccgcgctgcgccgtgcccgtgagtccggcgcgcagaggaggaggagaaagctgaccgcttaggccggggtagtggtcgtcgtggttttccttgtagttcgtggtctgagaccaggcctcaagtggaaacggcgtcaccatgatcgcacggcggaacccagaacccttacggtttctgccggatgaggcccggagcctgcccccgcccaagctgaccgacccgcggctcctctacatcggcttcttgggctactgctccggcctgattgataacctaatccggcggaggccgatcgcgacggctggtttgcatcgccagcttctatatattacggcctttttttttgctggatattatcttgtaaaacgtgaagactacctgtatgctgtgagggaccgtgaaatgtttggatatatgaaattacatccagaggattttcctgaagaagataagaaaacatatggtgaaatttttgaaaaattccatccaatacgttgaagtcttcaaaatgcttgctccagtttcactgatacctgctgtttctgaatttgatggaacatgtttcttatgacagttgaagcttatgctaatctgtatgttgacaccttgtaattaaaatacgtaccatgagtactctgactctttattgttgtaagaaaaatagttcatcatcagagaatggtcagtttccattcacccatctgaaagattttaagatgaggttgaattctagtttagagttagcagactacccaaatctggcccactgccaataaagtctcattggaacacagccatgctcatttgtttacatgttgtttatggcgactgccatgctgcaagagcagaattgagtagttgtgatagagacctatggcctgcaaagcctaattaatatgtagccctttcagaaaaggtttgcctgcccctgtcctagtgcaaagtgaatttagagtgagccagattatggaggattctgtgactcttgccaaataattttgacttcatcctgtaggtattaagtcattaaggcgttttaaatcatacagtcaggtttgtatttctgagctgtctataatgaatgatatagaaggtggtttcgaaggaggagactccagacaaggaaaacagaaatcttatgttgccaagttgtctttgctcttaggtgggttatcctggagaaaatggactcaggagctaatactgtctacagtggagcttggtgcaattagaagcaaaagactgtacctaactggaatgaggttactttttatggcttatcaaatgcttgtcctggcccgatgcagtggctcatgcctgtaatcccagcactttgagaggctgaggcagggcagattgcatgagcccaggagttcgagaccaacttgggcaacatggtgaaacactgtctctacataaaatacaaaaattagctgggcgtggtggcacgttcctgcaatcccagctactcataaggctgaggtgggaggatctattgagccctggaattcgaggatgcaattaattgtggttgtgtcacagttcactgcagcctgggtgacactccagcctgggtgacaaaggagaccccgtcaaaaaaaaaagtacttgtcccaaaagtttttgtttcctagcttagaatttataatcagattaggttttggagataaagtatatgtggtatttttttttttttttttgagacgacagtcttgctctgtcatcaggctggagtgcagtggcgcaatttcggctcactgcaacctccacctcctgggttcaagcaattctcctgcctcagcctcccgagtagctgggactacaggtgcatgccacgacgcccagctgatttttgtgtttttagtagagacggggtttcaccatgttggccaagatggtctcaatctcttgaccttgtgatccacctgccttggccttccaaagtgttggaattacaggcgtgagccaccgcgcctggtctatatgtgatttcaaattaggtggccttataaatataagcagatggtttctgggcaaaatcaaatgatttctgtctctattttcttgagtaccaattgtaaaaactgaaattaggttgaggaaagtgctttagaaataataaagatgtacaaatacaaggctttggattttttattagttctgcaataaataataggttta

SEQ ID NO: 157611 - DNA, 422 bp, Homo sapiens
  Payload ID: 10887
  Gene Symbol: NDUFC2
  Gene Name: NADH dehydrogenase (ubiquinone) 1, subcomplex unknown, 2, 14.5kDa
  ENST ID: ENST00000534029
  CDS Start-End: 76-291
ccggggtagtggtcgtcgtggttttccttgtagttcgtggtctgagaccaggcctcaagtggaaacggcgtcaccatgatcgcacggcggaacccagaacccttacggtttctgccggatgaggcccggagcctgcccccgcccaagctgaccgacccgcggctcctctacatcggcttcttgggctactgctccggcctgattgataacctaatccggcggaggccgatcgcgacggctgataagaaaacatatggtgaaatttttgaaaaattccatccaatacgttgaagtcttcaaaatgcttgctccagtttcactgatacctgctgtttctgaatttgatggaacatgtttcttatgacagttgaagcttatgctaatctgtatgttgacaccttgtaattaaaatacgtaccatg

SEQ ID NO: 157612 - DNA, 1888 bp, Homo sapiens
  Payload ID: 10887
  Gene Symbol: NDUFC2
  Gene Name: NADH dehydrogenase (ubiquinone) 1, subcomplex unknown, 2, 14.5kDa
  Uniprot ID: O95298
  ENST ID: ENST00000527806
  CDS Start-End: 98-364
aggagaaagctgaccgcttaggccggggtagtggtcgtcgtggttttccttgtagttcgtggtctgagaccaggcctcaagtggaaacggcgtcaccatgatcgcacggcggaacccagaacccttacggtttctgccggatgaggcccggagcctgcccccgcccaagctgaccgacccgcggctcctctacatcggcttcttgggctactgctccggcctgattgataacctaatccggcggaggccgatcgcgacggctggtttgcatcgccagcttctatatattacggcctttttttttgctggatattatcttgtaaaacttgaagcttatgctaatctgtatgttgacaccttgtaattaaaatacgtaccatgagtactctgactctttattgttgtaagaaaaatagttcatcatcagagaatggtcagtttccattcacccatctgaaagattttaagatgaggttgaattctagtttagagttagcagactacccaaatctggcccactgccaataaagtctcattggaacacagccatgctcatttgtttacatgttgtttatggcgactgccatgctgcaagagcagaattgagtagttgtgatagagacctatggcctgcaaagcctaattaatatgtagccctttcagaaaaggtttgcctgcccctgtcctagtgcaaagtgaatttagagtgagccagattatggaggattctgtgactcttgccaaataattttgacttcatcctgtaggtattaagtcattaaggcgttttaaatcatacagtcaggtttgtatttctgagctgtctataatgaatgatatagaaggtggtttcgaaggaggagactccagacaaggaaaacagaaatcttatgttgccaagttgtctttgctcttaggtgggttatcctggagaaaatggactcaggagctaatactgtctacagtggagcttggtgcaattagaagcaaaagactgtacctaactggaatgaggttactttttatggcttatcaaatgcttgtcctggcccgatgcagtggctcatgcctgtaatcccagcactttgagaggctgaggcagggcagattgcatgagcccaggagttcgagaccaacttgggcaacatggtgaaacactgtctctacataaaatacaaaaattagctgggcgtggtggcacgttcctgcaatcccagctactcataaggctgaggtgggaggatctattgagccctggaattcgaggatgcaattaattgtggttgtgtcacagttcactgcagcctgggtgacactccagcctgggtgacaaaggagaccccgtcaaaaaaaaaagtacttgtcccaaaagtttttgtttcctagcttagaatttataatcagattaggttttggagataaagtatatgtggtatttttttttttttttttgagacgacagtcttgctctgtcatcaggctggagtgcagtggcgcaatttcggctcactgcaacctccacctcctgggttcaagcaattctcctgcctcagcctcccgagtagctgggactacaggtgcatgccacgacgcccagctgatttttgtgtttttagtagagacggggtttcaccatgttggccaagatggtctcaatctcttgaccttgtgatccacctgccttggccttccaaagtgttggaattacaggcgtgagccaccgcgcctggtctatatgtgatttcaaattaggtggccttataaatataagcagatggtttctgggcaaaatcaaatgatttctgtctctattttcttgagtaccaattgtaaaaactgaaattaggttgaggaaagtgctttagaaataataaagatgtacaaatac

SEQ ID NO: 157613 - DNA, 495 bp, Homo sapiens
  Payload ID: 10887
  Gene Symbol: NDUFC2
  Gene Name: NADH dehydrogenase (ubiquinone) 1, subcomplex unknown, 2, 14.5kDa
  Uniprot ID: O95298
  ENST ID: ENST00000525085
  CDS Start-End: 76-366
ccggggtagtggtcgtcgtggttttccttgtagttcgtggtctgagaccaggcctcaagtggaaacggcgtcaccatgatcgcacggcggaacccagaacccttacggtttctgccggatgaggcccggagcctgcccccgcccaagctgaccgacccgcggctcctctacatcggcttcttgggctactgctccggcctgattgataacctaatccggcggaggccgatcgcgacggctgactacctgtatgctgtgagggaccgtgaaatgtttggatatatgaaattacatccagaggattttcctgaagaagataagaaaacatatggtgaaatttttgaaaaattccatccaatacgttgaagtcttcaaaatgcttgctccagtttcactgatacctgctgtttctgaatttgatggaacatgtttcttatgacagttgaagcttatgctaatctgtatgttgacaccttgtaattaaaatacgtacca

SEQ ID NO: 157614 - DNA, 561 bp, Homo sapiens
  Payload ID: 10887
  Gene Symbol: NDUFC2
  Gene Name: NADH dehydrogenase (ubiquinone) 1, subcomplex unknown, 2, 14.5kDa
  ENST ID: ENST00000528164
  CDS Start-End: 118-441
agtccggcgcgcagaggaggaggagaaagctgaccgcttaggccggggtagtggtcgtcgtggttttccttgtagttcgtggtctgagaccaggcctcaagtggaaacggcgtcaccatgatcgcacggcggaacccagaacccttacggtttctgccggatgaggcccggagcctgcccccgcccaagctgaccgacccgcggctcctctacatcggcttcttgggctactgctccggcctgattgataacctaatccggcggaggccgatcgcgacggctggtttgcatcgccagcttctatatattacggcctttttttttgctggatattatcttgtaaaacgtgaagactacctgtatgctgtgagggaccgtgaaatgtttggatatatgaaattacatccagaggattttcctgaagaaggtatttcaagttaattttagataatctgtgtttactgtattattattttccctggttaatcttatccatgtgtatggctttagataccttctaaattctgttgactcccacatcttagtctatagaccaaaatt

SEQ ID NO: 157615 - DNA, 1461 bp, Homo sapiens
  Payload ID: 10888
  Gene Symbol: NDUFAF1
  Gene Name: NADH dehydrogenase (ubiquinone) complex I, assembly factor 1
  Uniprot ID: Q9Y375
  ENST ID: ENST00000260361
  CDS Start-End: 383-1366
aagcggcggcaggccggcggttggtgtgtcccgggtgtggggaggcgacagagccctggcacttgagggttgagggggcctccccagcgcggcgaaccgtctagcctccggaggccaggccgtgagtgcgggaggtatacgccaaggcggaagaattttgccactcactacctgtgtgacctcgggtaaattagccttggaacgtcagtttcttcgtctctataattgaaataataatagtacctctctcaggattgttgtgagccgtcagtgaaacacttagagcagtttctggcacatggtagaattgggctatttgctgaagcttcttggtggcccttgctagcccaggaagaaacttacattttgatttttttgtaccatggctttggttcacaaattgctgcgtggtacttattttctcagaaaattctctaagccaacttctgccttgtatccatttttgggtattcgctttgcagagtattccagtagtcttcagaaaccagtggcttctcctggcaaagcctcctcacagaggaagactgaaggggatttgcaaggagatcaccagaaagaagttgctttggatataacttcttctgaggagaagcctgatgttagtttcgataaagcaattagagatgaagcaatataccattttaggcttttgaaggatgaaattgtggatcattggagaggaccggaaggccaccctctgcatgaggtcttgctggaacaagccaaggttgtctggcaattccgggggaaagaagatttggataagtggacagtgacttctgataagacgattggaggcagaagtgaagtgtttttgaaaatgggcaagaataaccaaagtgcactgctatatggaactctgagctctgaggcgcctcaggacggggagtctacccgaagtgggtactgtgcaatgatatccaggattccaaggggtgcttttgagaggaagatgtcttacgattggtcccagttcaatactctgtatctccgtgtacgtggggatggtcggccttggatggtgaatatcaaggaggacacagatttcttccagaggacgaatcagatgtatagttacttcatgttcacccgcgggggaccctactggcaggaggtcaagattcctttttccaaatttttcttctctaatcgaggaagaatccgggatgttcagcatgagcttccgcttgataagatctcttctataggattcaccttggctgataaagtggatggtccattcttcctggagatagattttattggcgtgtttactgatccagctcatacagaagaatttgcctatgaaaattctccagagcttaacccaaggctttttaaataaagatcatatggtagttttgttttactaatctaagggtactagcatctacaatgatatagacaaaataaaatatttctttaatggcatccaaccaa

SEQ ID NO: 157616 - DNA, 1585 bp, Homo sapiens
  Payload ID: 10888
  Gene Symbol: NDUFAF1
  Gene Name: NADH dehydrogenase (ubiquinone) complex I, assembly factor 1
  ENST ID: ENST00000559127
  CDS Start-End: 398-1183
taggctcggggaggtaagcggcggcaggccggcggttggtgtgtcccgggtgtggggaggcgacagagccctggcacttgagggttgagggggcctccccagcgcggcgaaccgtctagcctccggaggccaggccgtgagtgcgggaggtatacgccaaggcggaagaattttgccactcactacctgtgtgacctcgggtaaattagccttggaacgtcagtttcttcgtctctataattgaaataataatagtacctctctcaggattgttgtgagccgtcagtgaaacacttagagcagtttctggcacatggtagaattgggctatttgctgaagcttcttggtggcccttgctagcccaggaagaaacttacattttgatttttttgtaccatggctttggttcacaaattgctgcgtggtacttattttctcagaaaattctctaagccaacttctgccttgtatccatttttgggtattcgctttgcagagtattccagtagtcttcagaaaccagtggcttctcctggcaaagcctcctcacagaggaagactgaaggggatttgcaaggagatcaccagaaagaagttgctttggatataacttcttctgaggagaagcctgatgttagtttcgataaagcaattagagatgaagcaatataccattttaggcttttgaaggatgaaattgtggatcattggagaggaccggaaggccaccctctgcatgaggtcttgctggaacaagccaaggttgtctggcaattccgggggaaagaagatttggataagtggacagtgacttctgataagacgattggaggcagaagtgaagtgtttttgaaaatgggcaagaataaccaaagtgcactgctatatggaactctgagctctgaggcgcctcaggacggggagtctacccgaagtgggtactgtgcaatgatatccaggattccaaggggtgcttttgagaggaagatgtcttacgattggtcccagttcaatactctgtatctccgtgtacgtggggatggtcggccttggatggtgaatatcaaggaggacacagatttcttccagaggacgaatcagatgtatagttacttcatgttcacccgcgggggaccctactggcaggaggtcaaggcaactctgctaaagttggtgtcctaggcctgcgtggtggctcacacctgtaatcccagcactttgggaggccaaggcggacggatcacttgaggttgggagttcgacaccagcctgaccaacatggagaaaccctgttgtctctactaaaaaaaatacaaaattagctgggcgtggtggcgcatgcctgtaatcccagctactcgggaggctaaggcaggataattgcttgaacccaggaggcggaggtttcgattcctttttccaaatttttcttctctaatcgaggaagaatccgggatgttcagcatgagcttccgcttgataagatctcttctataggattcaccttggctgataaagtggatggtccattcttcctggagatagattttattggcgtgtttactgatccagctcatacagaag

SEQ ID NO: 157617 - DNA, 781 bp, Homo sapiens
  Payload ID: 10888
  Gene Symbol: NDUFAF1
  Gene Name: NADH dehydrogenase (ubiquinone) complex I, assembly factor 1
  ENST ID: ENST00000560978
  CDS Start-End: 155-781
ggaagggaaaagcagatggacctatacgggtaaagtggcttctgggcggaaggtacactataggctcggggaggtagaattgggctatttgctgaagcttcttggtggcccttgctagcccaggaagaaacttacattttgatttttttgtaccatggctttggttcacaaattgctgcgtggtacttattttctcagaaaattctctaagccaacttctgccttgtatccatttttgggtattcgctttgcagagtattccagtagtcttcagaaaccagtggcttctcctggcaaagcctcctcacagaggaagactgaaggggatttgcaaggagatcaccagaaagaagttgctttggatataacttcttctgaggagaagcctgatgttagtttcgataaagcaattagagatgaagcaatataccattttaggcttttgaaggatgaaattgtggatcattggagaggaccggaaggccaccctctgcatgaggtcttgctggaacaagccaaggttgtctggcaattccgggggaaagaagatttggataagtggacagtgacttctgataagacgattggaggcagaagtgaagtgtttttgaaaatgggcaagaataaccaaagtgcactgctatatggaactctgagctctgaggcgcctcaggacggggagtctacccgaagtgggtactgtgcaatgatatccaggattccaaggggtgcttttgagaggaagatgtcttacgattggtcccagttcaatactctgtat

SEQ ID NO: 157618 - DNA, 837 bp, Homo sapiens
  Payload ID: 10888
  Gene Symbol: NDUFAF1
  Gene Name: NADH dehydrogenase (ubiquinone) complex I, assembly factor 1
  ENST ID: ENST00000558719
  CDS Start-End: 265-837
gcggcggcaggccggcggttggtgtgtcccgggtgtggggaggcgacagagccctggcacttgagggttgagggggcctccccagcgcggcgaaccgtctagcctccggaggccaggccgtgagtgcgggaggtatacgccaaggcggaagaattttgccactcactacctgtgtgacctcgggtagaattgggctatttgctgaagcttcttggtggcccttgctagcccaggaagaaacttacattttgatttttttgtaccatggctttggttcacaaattgctgcgtggtacttattttctcagaaaattctctaagccaacttctgccttgtatccatttttgggtattcgctttgcagagtattccagtagtcttcagaaaccagtggcttctcctggcaaagcctcctcacagaggaagactgaaggggatttgcaaggagatcaccagaaagaagttgctttggatataacttcttctgaggagaagcctgatgttagtttcgataaagcaattagagatgaagcaatataccattttaggcttttgaaggatgaaattgtggatcattggagaggaccggaaggccaccctctgcatgaggtcttgctggaacaagccaaggttgtctggcaattccgggggaaagaagatttggataagtggacagtgacttctgataagacgattggaggcagaagtgaagtgtttttgaaaatgggcaagaataaccaaagtgcactgctatatggaactctgagctctgaggcgcctcaggacggggagtctacccgaagtgggtactgtgcaatgatatccaggattccaagg

SEQ ID NO: 157619 - DNA, 719 bp, Homo sapiens
  Payload ID: 10889
  Gene Symbol: NDUFAF2
  Gene Name: NADH dehydrogenase (ubiquinone) complex I, assembly factor 2
  Uniprot ID: Q8N183
  ENST ID: ENST00000296597
  CDS Start-End: 128-637
gttactagaagggctccaggatggaggccgacctgacttctccgcctcggtgggctgggtcggcggctggagcattacccctactgcgggtcccgctgctggcagcgctggaaactgggtggacggcatgggttggtctcaggatttgttccgcgccttgtggagatcgctgtcaagggaagtgaaggagcacgtgggcacggaccaattcgggaacaaatactactacatcccgcagtacaagaactggagaggacaaactattcgagagaaaagaattgtagaagcagcaaataaaaaagaagtagactatgaagcaggggatattccaacagaatgggaagcttggattagaagaacaagaaagactccacctactatggaggaaatactaaagaatgaaaaacacagagaagaaatcaaaataaaaagccaagatttttatgaaaaagaaaaactccttagtaaagagaccagtgaggaactcctgcctccaccagttcaaactcaaattaaaggccatgcctctgctccatactttggaaaggaagaaccctcagtggctcccagcagcactggtaaaacctttcagccaggatcctggatgccacgagatggcaagagccacaatcaatgaatgcattatggtcaaatcttttcatgtatatggatgtgactattttaacaaataaaagaagtgaaaagttatttaccttgta

SEQ ID NO: 157620 - DNA, 586 bp, Homo sapiens
  Payload ID: 10889
  Gene Symbol: NDUFAF2
  Gene Name: NADH dehydrogenase (ubiquinone) complex I, assembly factor 2
  ENST ID: ENST00000511107
  CDS Start-End: 50-232
ccctactgcgggtcccgctgctggcagcgctggaaactgggtggacggcatgggttggtctcaggatttgttccgcgccttgtggagatcgctgtcaagggaagtgaaggagcacgtgggcacggaccaattcgggaacaaatactactacatcccgcagtacaagaactggagaggtgaggtggcggcgtgggcagcgattgcgtggtcagtgattgcgagcttggattagaagaacaagaaagactccacctactatggaggaaatactaaagaatgaaaaacacagagaagaaatcaaaataaaaagccaagatttttatgaaaaagaaaaactccttagtaaagagaccagtgaggaactcctgcctccaccagttcaaactcaaattaaaggccatgcctctgctccatactttggaaaggaagaaccctcagtggctcccagcagcactggtaaaacctttcagccaggatcctggatgccacgagatggcaagagccacaatcaatgaatgcattatggtcaaatcttttcatgtatatggatgtgactattttaacaaataaaagaagtgaaaagtta

SEQ ID NO: 157621 - DNA, 461 bp, Homo sapiens
  Payload ID: 10889
  Gene Symbol: NDUFAF2
  Gene Name: NADH dehydrogenase (ubiquinone) complex I, assembly factor 2
  ENST ID: ENST00000502658
  CDS Start-End: 1-155
aattcgggaacaaatactactacatcccgcagtacaagaactggagaggacaaactattcgagagaaaagaattgtagaagcagcaaataaaaaagaagtagactatgaagcaggggatattccaacagaatgggaaggaaatactaaagaatgaaaaacacagagaagaaatcaaaataaaaagccaagatttttatgaaaaagaaaaactccttagtaaagagaccagtgaggaactcctgcctccaccagttcaaactcaaattaaaggccatgcctctgctccatactttggaaaggaagaaccctcagtggctcccagcagcactggtaaaacctttcagccaggatcctggatgccacgagatggcaagagccacaatcaatgaatgcattatggtcaaatcttttcatgtatatggatgtgactattttaacaaataaaagaagtgaaaagtta

SEQ ID NO: 157622 - DNA, 705 bp, Homo sapiens
  Payload ID: 10890
  Gene Symbol: NDUFAF3
  Gene Name: NADH dehydrogenase (ubiquinone) complex I, assembly factor 3
  Uniprot ID: Q9BU61
  ENST ID: ENST00000326912
  CDS Start-End: 207-590
ctccccagggttccagagatggccaccagcctcggctctcccacgtctacacccatcacctccagcctgagggcgcaactgagaggaactgagacccaagcagctcagtaaaggccccgcggcgagggcatcggctctcgccggcggatgacgagctgtatcagcggacgcgcatctctctgctgcaacgcgaggccgctcaggcaatgtacatcgacagctacaacagccgcggcttcatgataaacggaaaccgcgtgctcggcccctgcgctctgctcccgcactcggtggtgcagtggaacgtgggatcccaccaggacatcaccgaagacagcttttccctcttctggttgctggagccccggatagagatcgtggtggtggggactggagaccggaccgagaggctgcagtcccaggtgcttcaagccatgaggcagcggggcattgctgtggaagtgcaggacacgcccaatgcctgtgccaccttcaacttcctgtgtcatgaaggccgagtaactggagctgctctcatccctccaccaggagggacttcacttacatctttgggccaagctgctcaatgaaccgccaggaactgacctgctgactgcactctgccaggcttcccaatgctttcactcttatctaccctttggcacttatcttgcttatcaacataataatttatacacttctccc

SEQ ID NO: 157623 - DNA, 2012 bp, Homo sapiens
  Payload ID: 10890
  Gene Symbol: NDUFAF3
  Gene Name: NADH dehydrogenase (ubiquinone) complex I, assembly factor 3
  Uniprot ID: Q9BU61
  ENST ID: ENST00000326925
  CDS Start-End: 1135-1689
cgcgcccgtggggccggagaggaagtaaacccgcgcgtccacctcggggacacccccgcgctcggtggcctttgtccggtgacgctgccagcgcccggagcaccaggggccgaaggggtccacagagcagccgcgggacccccggaaacccattgcgaccggccccaggagacccaccaccaggctcccactgtgccgagcttcccgctcgcccggccccgcgggtagcgaaagcgacaatgttcccctgaggccacgacagagccggcgtgccgagatgcccaaaccccgcgcgggggccagcgactctcgcgccagtaggcccttgacttggatcaagacgggggacgggggactcccaggacgcgagcagagtgaacgaggacaaggtgatgctccacgcgcttctacttcaagtctggtccggttcggcctggtctgggccagccgaacagccacccaaacactatcacagcttgcccttccgcttgctctggctgcctgcagacttggagccattttaaggagaaaccacctggccacgccccctagagaacccgagaagccaatccacgctcggccacgcccctctccgcgcgctgcggagaggccaacggtcgcgcgggtgacggttagggcggggcgtgcttccgcgtctagccggagaaacttgagccggctgccccgcccacggtgcccgaagccccaaaggctggaattaggggctagaagtctggcacccaccgcctggccaggtgttcgggacgcgaccaggtgggcggtcgccccgccccgggagcgcggcttaatagctgagagcccgggggccaggccgcggctgcggcccaggcaacgccctgagggtggccacgctgccaggtgttccactcccccgggactatgggcaagggcccggggcggggagggcggcaggtgctgacactggagctgcgccggaggtcggggaactcggcctcctaagactgaggacactcgcctgctgggccggtcgagctgtgcggtgccctccgggacgcagggggcgctgcagccacgctgggtcaggctccgcagggccctcccaacccggggactaacggcgccggtgacgacttcgccgcgcgttggtcagccatggccaccgctctcgcgctacgtagcttgtaccgagcgcgaccctcgctgcgctgtccgcccgttgagcttccctgggccccgcggcgagggcatcggctctcgccggcggatgacgagctgtatcagcggacgcgcatctctctgctgcaacgcgaggccgctcaggcaatgtacatcgacagctacaacagccgcggcttcatgataaacggaaaccgcgtgctcggcccctgcgctctgctcccgcactcggtggtgcagtggaacgtgggatcccaccaggacatcaccgaagacagcttttccctcttctggttgctggagccccggatagagatcgtggtggtggggactggagaccggaccgagaggctgcagtcccaggtgcttcaagccatgaggcagcggggcattgctgtggaagtgcaggacacgcccaatgcctgtgccaccttcaacttcctgtgtcatgaaggccgagtaactggagctgctctcatccctccaccaggagggacttcacttacatctttgggccaagctgctcaatgaaccgccaggaactgacctgctgactgcactctgccaggcttcccaatgctttcactcttatctaccctttggcacttatcttgcttatcaacataataatttatacacttctcccattttgtatcaggtgtgttgctggccaggagctgatggctcactgggctcttggaggggaatgtgaagaaaccaaggagtcactttttcatctagattacttaggattccttgacttttcagaagtcgggaagcagtatgtttgcctgttgtagacctacttgctcacatgcagatttgagaggacctcaacggcttttctcacaaaa

SEQ ID NO: 157624 - DNA, 808 bp, Homo sapiens
  Payload ID: 10890
  Gene Symbol: NDUFAF3
  Gene Name: NADH dehydrogenase (ubiquinone) complex I, assembly factor 3
  Uniprot ID: Q9BU61
  ENST ID: ENST00000395458
  CDS Start-End: 310-693
caccaccaggctcccactgtgccgagcttcccgctcgcccggccccgcgggtagcgaaagcgacaatgttcccctgaggccacgacagagccggcgtgccgagatgcccaaaccccgcgcgggggccagcgactctcgcgccagtaggcccttgacttggatcaagacgggggacgggggactcccaggacgcgagcagagtgaacgaggacaagggccccgcggcgagggcatcggctctcgccggcggatgacgagctgtatcagcggacgcgcatctctctgctgcaacgcgaggccgctcaggcaatgtacatcgacagctacaacagccgcggcttcatgataaacggaaaccgcgtgctcggcccctgcgctctgctcccgcactcggtggtgcagtggaacgtgggatcccaccaggacatcaccgaagacagcttttccctcttctggttgctggagccccggatagagatcgtggtggtggggactggagaccggaccgagaggctgcagtcccaggtgcttcaagccatgaggcagcggggcattgctgtggaagtgcaggacacgcccaatgcctgtgccaccttcaacttcctgtgtcatgaaggccgagtaactggagctgctctcatccctccaccaggagggacttcacttacatctttgggccaagctgctcaatgaaccgccaggaactgacctgctgactgcactctgccaggcttcccaatgctttcactcttatctaccctttggcacttatcttgcttatcaacataataatttatacacttctccc

SEQ ID NO: 157625 - DNA, 774 bp, Homo sapiens
  Payload ID: 10890
  Gene Symbol: NDUFAF3
  Gene Name: NADH dehydrogenase (ubiquinone) complex I, assembly factor 3
  Uniprot ID: Q9BU61
  ENST ID: ENST00000451378
  CDS Start-End: 275-658
gcgcgctgcggagaggccaacggtcgcgcgggtgacggttagggcggggcgtgcttccgcgtctagccggagaaacttgagccggctgccccgcccacggtgcccgaagccccaaaggctggaattaggggctagaagtctggcacccaccgcctggccaggtgttcgggacgcgaccagggccccgcggcgagggcatcggctctcgccggcggatgacgagctgtatcagcggacgcgcatctctctgctgcaacgcgaggccgctcaggcaatgtacatcgacagctacaacagccgcggcttcatgataaacggaaaccgcgtgctcggcccctgcgctctgctcccgcactcggtggtgcagtggaacgtgggatcccaccaggacatcaccgaagacagcttttccctcttctggttgctggagccccggatagagatcgtggtggtggggactggagaccggaccgagaggctgcagtcccaggtgcttcaagccatgaggcagcggggcattgctgtggaagtgcaggacacgcccaatgcctgtgccaccttcaacttcctgtgtcatgaaggccgagtaactggagctgctctcatccctccaccaggagggacttcacttacatctttgggccaagctgctcaatgaaccgccaggaactgacctgctgactgcactctgccaggcttcccaatgctttcactcttatctaccctttggcacttatcttgcttatcaacataataatttatacacttctccca

SEQ ID NO: 157626 - DNA, 2399 bp, Homo sapiens
  Payload ID: 10891
  Gene Symbol: NDUFAF4
  Gene Name: NADH dehydrogenase (ubiquinone) complex I, assembly factor 4
  Uniprot ID: Q9P032
  ENST ID: ENST00000316149
  CDS Start-End: 81-608
atgctccgggtgtcccggagttgtcctgcgccggtgttcccacgtgcggcctgaacctgagcgcataatgttatgaggagatgggagcactagtgattcgcggtatcaggaatttcaacctagagaaccgagcggaacgggaaatcagcaagatgaagccctctgtcgctcccagacacccctctaccaacagcctcctgcgagagcagattagtctctatccagaagttaaaggagagattgctcgtaaagatgaaaagctgctgtcgtttctaaaagatgtgtatgttgattccaaagatcctgtgtcttccttgcaggtaaaagctgctgaaacatgtcaagagccgaaggaattcagattgccgaaagaccatcattttgatatgataaatattaagagcattcccaaaggcaaaatttccattgtagaagcattgacacttctcaataatcataagcttttcccagaaacctggactgctgagaaaataatgcaggaataccagttagaacagaaagatgtgaattctcttcttaaatattttgttacttttgaagtcgaaatcttccctcctgaagacaagaaagcaatacgatcaaaatgaagaaaatcacagaaatttcctatgtgtactcctcatccctcctgctgtatattttctcattttttgcgtaataaattatgttaattaccaaatatttaatgctctcattgtgagggcatactcttaatatttattgagctccctgacttttcaagattgccatagaatatcttttgttttattttaatttggtttaggcatatttcataagtgcatgtcagcatgactgagcacatctgtacctttattatggtgaaagagttaatttgttattttaggcacatataccaacttttaaattggtcatattaccccttgggaaatgtcctgaatccctcaactgagttttactttccaagttaggtgtttagttcattcttctcatgcgatagtgaaagtaaaagctttcctgacccttaagactgacattttctcgttagggaaagagactcgatagcagggtagactaacagtagttcccaaataaaggcacacaggagaaaatgaatcaatagaatctaattaaaattactactccagggaataagaagtattgaggatttattttattttgaattggttttaagtatggaataattgtctttacagttataaaaagtaattagtggtgtttacaaaatgttgggaatttctgctttgacagataggtaagtcccatgggaatttctgctttgacaaatagttaagtcccatggccttcagagaggcaggaagcagaaactttcaaaaaagtaacatttctctggatttaatgtggaaatagagaaaaatttaaagaataattaaaaaaccatggtagatgaaatttggtgattacatatagtttcggatgttaatgctagttgagagaagagaaaaagatagcaagtagaagcagagaacaggatcattggaagggacctgagaaattgccatttcatccattttagcaaatttaattagcatagcatgtaccagtactaggatcttgagtgagtgtgtgagtttagctctgcctaatatattactacttgggggatctttgggagactatatcttcttggagattgagtttcttctataaaataagcataatgctaccctaaatgtaagggttatcatgaagataaataataaaggactacaaaggaccaagcaaataggaattattttttgcggtggagaaacaagtgcctggggagaatatatgaccgaagattctgtagtttatgacttaaacaggcccagaatttagtttttcaaatcctagtagtgtgttttttctgtcttgccaaaaagcagcacacctcaaagaagggaaaaggtgtgaattgtgggtatattagggttattagtgcttccgagggaagataggcatcactacttcccagagatgcccctggaaatgatatagaggatgttgaagaattcaatgtgatgacggaatgaggcatttgtagtaatgctgagaacagaaaaatggactaagtggaaaatttgtaagcatgactttgaatgtagatttgttatgtgaacaaactacctagtttatttttagttcaatacaataattgttttaagaaaacatgaaataactactcaatataaaatgcattttaaaactgtaaataagtcaaaactttattctttttatcataatggtcactagctgagtcacaaatactagtacactcttctgagccatcttctttattcatatctacattgtgtggttaggcatctgttatgtggtgtcacatgataaaataaagaacttcttcccataccatt

SEQ ID NO: 157627 - DNA, 5529 bp, Homo sapiens
  Payload ID: 10892
  Gene Symbol: NDUFAF5
  Gene Name: NADH dehydrogenase (ubiquinone) complex I, assembly factor 5
  Uniprot ID: Q5TEU4
  ENST ID: ENST00000378106
  CDS Start-End: 120-1157
ggcaagcgaactaggccaaactacttgcacgttccctcgagaagatctttggagtagacacaaaagccgcgctggcgcatgcgcacaaaaagcgccggcaattggggtcgcagctggagatgctgcggccggcagggctctggcgcttatgtcggcgaccttgggcggcgagggtcccagcggagaatcttggccgtagggaagtcacctctggtgtctctccccgcggtagcacctcgcccagaaccctgaatattttcgaccgggatttgaaaaggaaacagaagaactgggcagcccggcagcccgagccgaccaaatttgactacctgaaggaggaggttggaagtcggatcgcagaccgtgtatatgacatacccagaaatttcccccttgctttggatcttggttgtggaagaggttacattgcacaatatttgaataaggaaactattggaaagtttttccaagctgacattgcagaaaatgctttgaaaaattcctcagaaacagaaatacctactgtcagcgttttagctgatgaagaattccttcccttcaaagaaaatacatttgacctggtggttagcagtttaagtttgcattgggtgaatgaccttcctagagcacttgagcagattcattatattttaaaaccagatggagtgtttatcggtgcaatgtttggaggcgacacactctatgaacttcggtgttccttacagttagcggaaacggaaagggaaggaggattttctccacacatttctcctttcactgctgtcaatgacctgggacatctgcttgggagagctggctttaatactctgactgtggacactgatgaaattcaagttaactatcctggaatgtttgaattgatggaagatttacaaggtatgggtgagagtaactgtgcttggaatagaaaagccctgctgcatcgagacacaatgctggcagctgcggcagtgtacagagaaatgtacagaaatgaagatggttcagtacctgctacataccagatctattacatgataggatggaaatatcatgagtcacaggcaagaccagctgaaagaggttccgcaactgtgtcatttggagagctaggaaaaataaacaaccttatgccaccggggaaaaaatcacaataaatatttattcagtgttaatgtcgtccagaattttcatcagaaatggatagctttaacatctaaaattattatattttgaagcaagaagcactctaagctatttactaataggcttttcatataattaggaaaacctaatatcacatctatagtaaccatttcagtttcatattgtttctgttctcataaggatactgctgagtgtctttgcagattcagcctaaaagcaaagaaaatatttccctaaaatatttgcaaataatgttcacatatgtaaatgccttggaaaatattactcatgctgaccttttacacctttttcatttgtcatactgttttctttgccttgaagaggaacagatgaatatgcaccttctccagagttatgtggttttagaatttagaagagcatgtatctttattaaatccctcctcaactctttttttttaaagcatctgaatttaaccttatttcttttttatctccatggtgtgggtgggaccaccatggttttacaccccaccctaccttagggaagaagaaaacattttaaagaataccagaagtagaatcacatgtaacagtctctgcacagtcatcagtttattgttaagctttcctttgtaatttcagggcttaagcactattatcctaatccaagttcacagtcctgttgttgtcgaggagggttcaaaatcatttggagataatcaagctcagacagcttaggataggtgagaagaacatagaggaagcagggagaaggctgagaagcaagcaggagtgagcgctaagtgttttgtttccagttagctgttcgctgtcttttccatttaacctgggcactgccctagcctcatcttcagccttcagtgatctataatagcatttccttctgtctcctctcagtctctcttctgccttccttccctcctttactgtattagcaacaagctgtccatgggtgggggctgtgtgttagcctgtacgtagcacatgggactttccacatagtagatattcagttacattttgaactaattatataacaaacttgccctttgaaagactaagttatagttaaaaaccaagatttgtaggagaaaaagaaattattgttcccttcagtttgaaaaatcatcgatatttgaaactgggatacgcttggtagcttttttgttttaacacaaagtaaacctgtgaagtagaatttggcgttttgttttttggggttttttttttttttagcttaattttcagaacttgaagagagagaacaacaacaaaaaacaaactgcgctagccaggtgcaatggcgcatgcctgtagtcccagctacttgggaggctgaggcaggcaggagttcaaggctgcagtgagctgtctgtgccacggcactccaacctgggcaaaagaggagacctcatctaaagaaaaatccaccaaaaaccctgtgttttaaagtgcaaactgatgatggaggaatgggtaaattccaggggtctatatttccaaaaggacatgtgtttttgtgcactaatacttgtttttgaagaacacatctcagtgttaagtggctgttgctgaggaaggggactgaggaactgggtgtgtctgtgtcattctgtttgaatgtctgtcaggggtatagaaactaggagggagacttgtacttttcactttttaaacttcctgtaaaatttgaattttccaagcaagaatattacttttgcttatttaatgtcaacggaattatatgtggatggtggggtggagctaaggattactctactctggctatcccaaaaaaagctccatttgtttaaaaaaattaagtaaatcaaacacagctaattgaggacccttattgtttaatgtgagtgattgtagtgaaaacacttattttagtgtgtataacactagtgaaattatttttgtagttaaatctgctggaagtgtgctattaagcttttattgtttggagccctcaggaaactaatttttctgaataaccacattttccaaatgattaagagctcatccttttaagcaatgaaacttttaaaaggtctttatcaaaaatttttcataaatgttacattcttaaatggtatatgataaataatcatcttttttgttggtttatttttttattttttattttattttattttttgagacggagtctcgctctgtctccaggctggagtacagtggcgcaatctcggctcactgctgcctccgcttcctgggttcaagtgattcttcctgcctcagcttcccaagtagctgggattacaggcgcgtgccaccacgctggctaatttttgtatttttaatagagatggggtttcaccatgttggccaggatggtctcaatctcttgaccttgtgatctgcccaccttggcttcccaaagtgctgagattacaggtgtgagccaccaggcctggccaataaccatttcttgataaccccacagataatatcataaactcaagttgtctgtattgcttcttcccagactggtcccaagaatgctgtggttggttttgtgtcttttccagcacttttcttacttgctgtcagttgtcaatctcaacaccttgaccaaaatgaactttcttgagtcatttcttctctgtttagctataagattagaattcatactgaaagatttctaggacttttgtattaaggtaggaaagaggaactaggttctgggagaaagactcctttggaataaaattcatgagctttattggttcctttaacagatcttcattgagtttcatgtgccaggcatccaactagtctctgcttttatagttgtcagtctgacagggctctagtatgtgcacaccgtgacacctgttggctgccaggagactgtttggcttatttcctggttcttagcaatattccaggttggcctggagaattccaaaggtaaatatgaaaatgtatacctacaaaagaatttttgctttataggaagaatttgtaggatttattgagatgtaagctacctatatacatcaagtatgtgatatgattgtaaaaagttacagaagtgtgtgagtcatgaagtacctgtgagggaagtttatatattttttcaaactcttttagtaccattttcatccactaggtggaagcaattacagtatgacctgcattaaagacatgtacagttttttggccggctgcagtggctcacacctgtgatctcaacactttgggaagctgagacgggaggattgcttgagcccaggagtttgagaccagcttgggcaacgtgatgaaaccctgtctctacaaataaaaaaaaaattagccaggcatggtggcacaagcctgtggtcccagctactcagaaggctgaggtgggagtattgatcgagcccaggaggtcaaggctgcagcaagctgtcgcaccactgcactctagcctgggcaacagcaagaccctcgtctcaaaaaagaaaaaaaaaaagtacaatttttgtattgattatgtattccttaagtaggagtggaataaaagtattttaccgtggattggcttctgtgaaggaaagaagtgaatattagtagatatttggaaaaaagaaagatagttgatgcagtgattattattctgttcctttgtaagttaccattagcctctcttgcttaagaaatattttgagcttttttggggaggggttgtggttaatgatgtgaaattaatcttcaggaaatttatcataagcagacttgccttttcagatattggtatattttaattctctacctgaatacatacatgacagttattttaccatgctggtttaaaaaacatcaatttgaaaatactagaaggtggggtgaacactgataagttactgttaacaaataagaaaataatgctttgccatctgtggtggttttaaaatctatccacaaatttttgatatgcttctctttaagacgggacacttcattcccctctaagtacaggctgagtttagtgattcccttccaacaaatagatggtgtgtcacttctgagactaggtaataaaaggcattgcatcctccttactctctcttggatccttcactctagggaaagccagcagccatattgtaaggccactcaactccatggagaagacctagaagtgaggagcagaggcctccagccaaaagccatgtgagggagccatcttggaagcaattctccaggcccaaacttcagatgactgtggtcccagccaatgcattgaccacaacctcatgagagaccctgagctagaaccacctagctaagccactctcaaatatcttatctacagaaactgagatgataaatgtttgtggtttaagc

SEQ ID NO: 157628 - DNA, 991 bp, Homo sapiens
  Payload ID: 10892
  Gene Symbol: NDUFAF5
  Gene Name: NADH dehydrogenase (ubiquinone) complex I, assembly factor 5
  Uniprot ID: Q5TEU4
  ENST ID: ENST00000463598
  CDS Start-End: 20-973
attggggtcgcagctggagatgctgcggccggcagggctctggcgcttatgtcggcgaccttgggcggcgagggtcccagcggagaatcttggccgtagggaagtcacctctggtgtctctccccgcggtagcacctcgcccagaaccctgaatattttcgaccgggatttgaaaaggaaacagaagaactgggcagcccggcagcccgagccgaccaaatttgactacctgaaggaggaggttggaagtcggatcgcagaccgtgtatatgacatacccagaaatttcccccttgctttggatcttggttgtggaagaggttacattgcacaatatttgaataagcttcagttattccattgcaggaaactattggaaagtttttccaagctgacattgcagaaaatgctttgtttgcattgggtgaatgaccttcctagagcacttgagcagattcattatattttaaaaccagatggagtgtttatcggtgcaatgtttggaggcgacacactctatgaacttcggtgttccttacagttagcggaaacggaaagggaaggaggattttctccacacatttctcctttcactgctgtcaatgacctgggacatctgcttgggagagctggctttaatactctgactgtggacactgatgaaattcaagttaactatcctggaatgtttgaattgatggaagatttacaaggtatgggtgagagtaactgtgcttggaatagaaaagccctgctgcatcgagacacaatgctggcagctgcggcagtgtacagagaaatgtacagaaatgaagatggttcagtacctgctacataccagatctattacatgataggatggaaatatcatgagtcacaggcaagaccagctgaaagaggttccgcaactgtgtcatttggagagctaggaaaaataaacaaccttatgccaccggggaaaaaatcacaataaatatttattcagtgttaa

SEQ ID NO: 157629 - DNA, 2409 bp, Homo sapiens
  Payload ID: 10892
  Gene Symbol: NDUFAF5
  Gene Name: NADH dehydrogenase (ubiquinone) complex I, assembly factor 5
  ENST ID: ENST00000378081
  CDS Start-End: 63-866
acacaaaagccgcgctggcgcatgcgcacaaaaagcgccggcaattggggtcgcagctggagatgctgcggccggcagggctctggcgcttatgtcggcgaccttgggcggcgagggtcccagcggagaatcttggccgtagggaagtcacctctggtgtctctccccgcggtagcacctcgcccagaaccctgaatattttcgaccgggatttgaaaaggaaacagaagaactgggcagcccggcagcccgagccgaccaaatttgactacctgaaggaggaggttggaagtcggatcgcagaccgtgtatatgacatacccagaaatttcccccttgctttggatcttggttgtggaagaggttacattgcacaatatttgaataaggaaactattggaaagtttttccaagctgacattgcagaaaatgctttgaaaaattcctcagaaacagaaatacctactgtcagcgttttagctgatgaagaattccttcccttcaaagaaaatacatttgacctggtggttagcagtttaagtttgcattgggtgaatgaccttcctagagcacttgagcagattcattatattttaaaaccagatggagtgtttatcggtgcaatgtttggaggcgacacactctatgaacttcggtgttccttacagttagcggaaacggaaagggaaggaggattttctccacacatttctcctttcactgctgtcaatgacctgggacatctgcttgggagagctggctttaatactctgactgtggacactgatgaaattcaagttaactatcctggaatgtttgaattgatggaagatttacaagaacaaaagtccagaatgttgacctaattttacaaaacaagctgcatatcagctgatgaatgcatgagaaattttcaaggctttcacagtggtcttaaggtatgggtgagagtaactgtgcttggaatagaaaagccctgctgcatcgagacacaatgctggcagctgcggcagtgtacagagaaatgtacagaaatgaagatggttcagtacctgctacataccagatctattacatgataggatggaaatatcatgagtcacaggcaagaccagctgaaagaggttccgcaactgtgtcatttggagagctaggaaaaataaacaaccttatgccaccggggaaaaaatcacaataaatatttattcagtgttaatgtcgtccagaattttcatcagaaatggatagctttaacatctaaaattattatattttgaagcaagaagcactctaagctatttactaataggcttttcatataattaggaaaacctaatatcacatctatagtaaccatttcagtttcatattgtttctgttctcataaggatactgctgagtgtctttgcagattcagcctaaaagcaaagaaaatatttccctaaaatatttgcaaataatgttcacatatgtaaatgccttggaaaatattactcatgctgaccttttacacctttttcatttgtcatactgttttctttgccttgaagaggaacagatgaatatgcaccttctccagagttatgtggttttagaatttagaagagcatgtatctttattaaatccctcctcaactctttttttttaaagcatctgaatttaaccttatttcttttttatctccatggtgtgggtgggaccaccatggttttacaccccaccctaccttagggaagaagaaaacattttaaagaataccagaagtagaatcacatgtaacagtctctgcacagtcatcagtttattgttaagctttcctttgtaatttcagggcttaagcactattatcctaatccaagttcacagtcctgttgttgtcgaggagggttcaaaatcatttggagataatcaagctcagacagcttaggataggtgagaagaacatagaggaagcagggagaaggctgagaagcaagcaggagtgagcgctaagtgttttgtttccagttagctgttcgctgtcttttccatttaacctgggcactgccctagcctcatcttcagccttcagtgatctataatagcatttccttctgtctcctctcagtctctcttctgccttccttccctcctttactgtattagcaacaagctgtccatgggtgggggctgtgtgttagcctgtacgtagcacatgggactttccacatagtagatattcagttacattttgaactaattatataacaaacttgccctttgaaagactaagttatagttaaaaaccaagatttgtaggagaaaaagaaattattgttcccttcagtttgaaaaatcatcgatatttgaaactgggatacgcttggtagcttttttgttttaacacaaagtaaacctgtgaagtagaa

SEQ ID NO: 157630 - DNA, 1869 bp, Homo sapiens
  Payload ID: 10893
  Gene Symbol: NDUFAF6
  Gene Name: NADH dehydrogenase (ubiquinone) complex I, assembly factor 6
  ENST ID: ENST00000396111
  CDS Start-End: 371-1096
cctttctgacatggtgccagccctactggagtcagcaggagtccagcacaacagatggtggtcagtggtgacttcggcacaggcagttcgtgaggagtggttggtggccatggagtcctgactggagtaggttaaaaagaaggaggaaaatcacaagaaagagagactggagccacctctcaacaacccatgaagtgtctggagctccaccctctgctcaagaggaacggcacatgacccaggcctatgccaatcagcatttcacattcctcatggttggttcaaaggaaacgggattatgaaggttatttatgctccctgctgctccctgcagaatcccgaagctctgtttttgcactgagggcctttaatgtggaactggctcaggctggttaaagactcagtctctgagaaaacaattggactgatgcgaatgcagttttggaaaaaaactgtggaagatatatactgtgacaatccaccacatcagcctgtggccattgaactatggaaggctgttaaaagacataatctgactaaaagatggcttatgaaaatcgtcgatgaaagagaaaaaaatctggatgacaaagcatatcgtaatatcaaggaactggaaaattatgctgaaaacacacagagctctcttctttacttaacactagaaatattgggtataaaggatcttcatgcagatcatgctgcaagtcatattggaaaagcacaaggcattgtcacttgcttgagagcaacaccatatcatgggagcagaagaaaggtgttccttcccatggatatttgtatgctgcatggtgtttcacaagaggactttctacggaggaaccaagataaaaatgtgagagatgtaatatatgacattgccagtcaagcacacttgcacctaaagcatgctaggtcctttcacaaaactgttcctgtgaaagcatttcctgcttttcttcagacggtttctctagaggactttctaaagaaaattcagcgagtggattttgatatattccacccatctttacagcagaagaatacattacttccattatatttgtatattcagtcatggagaaaaacatattaaaataatttcatggcattgatgttaattctagtctattagttttataaaagttaggattcttatttaggaacaacaggaaatgactgttaaggagaaaatgaatttattgaatgggatgtcaagtagctcacaaaattgagaagttgccgtgggactagggtgccaagactgctgagattctggcagaggcactgccattggcacccctggcccagacagtgtctgctgtgctgtccctggaagctggagctccaacagggaatattggtgtagctgtgcataggccataagccacacttgagccagtgggcagggagaaggaatgtcattctcccttcaccactggggaaggaaaggggaaagggctcaagttatcataggggcttacatgctgagcagctataacctaggtgttcagaacacctggaagatgcatttatttaggggtcacaaatagtgaaattaatatttgaggaatatcagtcacgtgttgtgggcttttatccttaacgtttaatttttacaatcttgtgtaaaaatttatccatgataataacataacttctttaaggttggagtggctggcaagagcagagccttaatttgactttagctctggctggtctggaagcttttacttttttgttaatcccacttcctcactctgtcattcagcattatcatgatcgtgaacaaaattgtactgagaaagtttgtataagtgatatgaacggtattgtattgaacatccattaaagggttgctacacttta

SEQ ID NO: 157631 - DNA, 2549 bp, Homo sapiens
  Payload ID: 10893
  Gene Symbol: NDUFAF6
  Gene Name: NADH dehydrogenase (ubiquinone) complex I, assembly factor 6
  ENST ID: ENST00000396113
  CDS Start-End: 1051-1776
cgcctggccaagtgcggctctgctctccccagtcccggtccgcgaccacccggagcccgctccgccggccttgcgcggcgcgcccagggaaggcatttccagcccgcccacccaggactgttctagaaaaagtcttaaaggcctaccctcctactgatgacccagagactgtccctgcccagtcactgctactgttgaccttggctcctgcccagggatggaggctctcaactgggctggttctacatggaggtctcttcttcggcctttctgacatggtgccagccctactggagtcagcaggagtccagcacaacagatggtggtcagtggtgacttcggcacaggcagttcgtgaggagtggttggtggccatggagtcctgactggagtaggttaaaaagaaggaggaaaatcacaagaaagagagactggaggtggaggttggggagaaaagagataatggtatggtgagatgtctactgaactgctcctgccaaggcccctccccatgtactctcaacgaaagttgcagccacccattctcattttgtggatataattccctgctttagttttctgagcacaagaaatcaactttggctgcacattggaatatctgagaagcttaaaaatactgatgtttggaccaggtgcagtggctcacgcctgtaatcccagcactttgggaggcagaggcagccacctctcaacaacccatgaagtgtctggagctccaccctctgctcaagaggaacggcacatgacccaggcctatgccaatcagcatttcacattcctcatggttggttcaaagtgaagcaactttcccagaagcaccacagtggacttgttctcaagtctaattggccagatcagggaaatatgcactgtcctggaccagtcactggtgatgaaagggtaacacccaccaccggggttctgctactacacaggatgaagaaaggaaacgggattatgaaggttatttatgctccctgctgctccctgcagaatcccgaagctctgtttttgcactgagggcctttaatgtggaactggctcaggctggttaaagactcagtctctgagaaaacaattggactgatgcgaatgcagttttggaaaaaaactgtggaagatatatactgtgacaatccaccacatcagcctgtggccattgaactatggaaggctgttaaaagacataatctgactaaaagatggcttatgaaaatcgtcgatgaaagagaaaaaaatctggatgacaaagcatatcgtaatatcaaggaactggaaaattatgctgaaaacacacagagctctcttctttacttaacactagaaatattgggtataaaggatcttcatgcagatcatgctgcaagtcatattggaaaagcacaaggcattgtcacttgcttgagagcaacaccatatcatgggagcagaagaaaggtgttccttcccatggatatttgtatgctgcatggtgtttcacaagaggactttctacggaggaaccaagataaaaatgtgagagatgtaatatatgacattgccagtcaagcacacttgcacctaaagcatgctaggtcctttcacaaaactgttcctgtgaaagcatttcctgcttttcttcagacggtttctctagaggactttctaaagaaaattcagcgagtggattttgatatattccacccatctttacagcagaagaatacattacttccattatatttgtatattcagtcatggagaaaaacatattaaaataatttcatggcattgatgttaattctagtctattagttttataaaagttaggattcttatttaggaacaacaggaaatgactgttaaggagaaaatgaatttattgaatgggatgtcaagtagctcacaaaattgagaagttgccgtgggactagggtgccaagactgctgagattctggcagaggcactgccattggcacccctggcccagacagtgtctgctgtgctgtccctggaagctggagctccaacagggaatattggtgtagctgtgcataggccataagccacacttgagccagtgggcagggagaaggaatgtcattctcccttcaccactggggaaggaaaggggaaagggctcaagttatcataggggcttacatgctgagcagctataacctaggtgttcagaacacctggaagatgcatttatttaggggtcacaaatagtgaaattaatatttgaggaatatcagtcacgtgttgtgggcttttatccttaacgtttaatttttacaatcttgtgtaaaaatttatccatgataataacataacttctttaaggttggagtggctggcaagagcagagccttaatttgactttagctctggctggtctggaagcttttacttttttgttaatcccacttcctcactctgtcattcagcattatcatgatcgtgaacaaaattgtactgagaaagtttgtataagtgatatgaacggtattgtattgaacatccattaaagggttgctacacttta

SEQ ID NO: 157632 - DNA, 1798 bp, Homo sapiens
  Payload ID: 10893
  Gene Symbol: NDUFAF6
  Gene Name: NADH dehydrogenase (ubiquinone) complex I, assembly factor 6
  Uniprot ID: Q330K2
  ENST ID: ENST00000396124
  CDS Start-End: 24-1025
gaagggcacgcagtgccggcgtcatggcggcctccgcgcacggctctgtctgggggccgttgcggcttggcatccccggcctgtgctgccgccggccgcctctgggtctgtacgcgcgcatgcggcggctgcccgggccggaggtgtctgggcggagcgtggctgcggccagcggaccgggcgcctggggcactgaccactactgcctggagctgctgcggaaacgggattatgaaggttatttatgctccctgctgctccctgcagaatcccgaagctctgtttttgcactgagggcctttaatgtggaactggctcaggttaaagactcagtctctgagaaaacaattggactgatgcgaatgcagttttggaaaaaaactgtggaagatatatactgtgacaatccaccacatcagcctgtggccattgaactatggaaggctgttaaaagacataatctgactaaaagatggcttatgaaaatcgtcgatgaaagagaaaaaaatctggatgacaaagcatatcgtaatatcaaggaactggaaaattatgctgaaaacacacagagctctcttctttacttaacactagaaatattgggtataaaggatcttcatgcagatcatgctgcaagtcatattggaaaagcacaaggcattgtcacttgcttgagagcaacaccatatcatgggagcagaagaaaggtgttccttcccatggatatttgtatgctgcatggtgtttcacaagaggactttctacggaggaaccaagataaaaatgtgagagatgtaatatatgacattgccagtcaagcacacttgcacctaaagcatgctaggtcctttcacaaaactgttcctgtgaaagcatttcctgcttttcttcagacggtttctctagaggactttctaaagaaaattcagcgagtggattttgatatattccacccatctttacagcagaagaatacattacttccattatatttgtatattcagtcatggagaaaaacatattaaaataatttcatggcattgatgttaattctagtctattagttttataaaagttaggattcttatttaggaacaacaggaaatgactgttaaggagaaaatgaatttattgaatgggatgtcaagtagctcacaaaattgagaagttgccgtgggactagggtgccaagactgctgagattctggcagaggcactgccattggcacccctggcccagacagtgtctgctgtgctgtccctggaagctggagctccaacagggaatattggtgtagctgtgcataggccataagccacacttgagccagtgggcagggagaaggaatgtcattctcccttcaccactggggaaggaaaggggaaagggctcaagttatcataggggcttacatgctgagcagctataacctaggtgttcagaacacctggaagatgcatttatttaggggtcacaaatagtgaaattaatatttgaggaatatcagtcacgtgttgtgggcttttatccttaacgtttaatttttacaatcttgtgtaaaaatttatccatgataataacataacttctttaaggttggagtggctggcaagagcagagccttaatttgactttagctctggctggtctggaagcttttacttttttgttaatcccacttcctcactctgtcattcagcattatcatgatcgtgaacaaaattgtactgagaaagtttgtataagtgatatgaacggtattgtattgaacatccattaaagggttgctacacttta

SEQ ID NO: 157633 - DNA, 946 bp, Homo sapiens
  Payload ID: 10893
  Gene Symbol: NDUFAF6
  Gene Name: NADH dehydrogenase (ubiquinone) complex I, assembly factor 6
  ENST ID: ENST00000454358
  CDS Start-End: 1-247
gtgctgccgccggccgcctctgggtctgtacgcgcgcatgcggcggctgcccgggccggaggtgtctgggcggagcgtggctgcggccagcggaccgggcgcctggggcactgaccactactgcctggagctgctgcggaaacgggattatgaaggttatttatgctccctgctgctccctgcagaatcccgaagctctgtttttgcactgagggcctttaatgtggaactggctcaggctggttaaagactcagtctctgagaaaacaattggactgatgcgaatgcagttttggaaaaaaactgtggaagatatatactgtgacaatccaccacatcagcctgtggccattgaactatggaaggctgttaaaagacataatctgactaaaagatggcttatgaaaatcgtcgatgaaagagaaaaaaatctggatgacaaagcatatcgtaatatcaaggaactggaaaattatgctgaaaacacacagagctctcttctttacttaacactagaaatattgggtataaaggatcttcatgcagatcatgctgcaagtcatattggaaaagcacaaggcattgtcacttgcttgagagcaacaccatatcatgggagcagaagaaaggtgttccttcccatggatatttgtatgctgcatggtgtttcacaagaggactttctacggaggaaccaagataaaaatgtgagagatgtaatatatgacattgccagtcaagcacacttgcacctaaagcatgctaggtcctttcacaaaactgttcctgtgaaagcatttcctgcttttcttcagacggtttctctagaggactttctaaagaaaattcagcgagtggattttgatatattccacccatctttacagcagaagaatacattacttccattatatttgtatattcagtcatggagaaaaacatatta

SEQ ID NO: 157634 - DNA, 949 bp, Homo sapiens
  Payload ID: 10893
  Gene Symbol: NDUFAF6
  Gene Name: NADH dehydrogenase (ubiquinone) complex I, assembly factor 6
  ENST ID: ENST00000523378
  CDS Start-End: 549-949
agcacaacgtggagtggctgcagaatgtaaacaccactcagccacgcgcctggccaagtgcggctctgctctccccagtcccggtccgcgaccacccggagcccgctccgccggccttgcgcggcgcgcccagggaaggcatttccagcccgcccacccaggtctcttcttcggcctttctgacatggtgccagccctactggagtcagcaggagtccagcacaacagatggtggtcagtggtgacttcggcacaggcagttcgtgaggagtggttggtggccatggagtcctgactggagtaggttaaaaagaaggaggaaaatcacaagaaagagagactggaggcagccacctctcaacaacccatgaagtgtctggagctccaccctctgctcaagaggaacggcacatgacccaggcctatgccaatcagcatttcacattcctcatggttggttcaaaggaaacgggattatgaaggttatttatgctccctgctgctccctgcagaatcccgaagctctgtttttgcactgagggcctttaatgtggaactggctcaggctggttaaagactcagtctctgagaaaacaattggactgatgcgaatgcagttttggaaaaaaactgtggaagatatatactgtgacaatccaccacatcagcctgtggccattgaactatggaaggctgttaaaagacataatctgactaaaagatggcttatgaaaatcgtcgatgaaagagaaaaaaatctggatgacaaagcatatcgtaatatcaaggaactggaaaattatgctgaaaacacacagagctctcttctttacttaacactagaaatattgggtataaaggatcttcatgcagatcatgctgcaagtcatattggaaaagcacaaggcattgtcacttgcttgagagcaacaccatatcatgggagcag

SEQ ID NO: 157635 - DNA, 561 bp, Homo sapiens
  Payload ID: 10893
  Gene Symbol: NDUFAF6
  Gene Name: NADH dehydrogenase (ubiquinone) complex I, assembly factor 6
  ENST ID: ENST00000518608
  CDS Start-End: 1-175
gtgctgccgccggccgcctctgggtctgtacgcgcgcatgcggcggctgcccgggccggaggtgtctgggcggagcgtggctgcggccagcggaccgggcgcctggggcactgaccactactgcctggagctgctgcggttaaagactcagtctctgagaaaacaattggactgatgcgaatgcagttttggaaaaaaactgtggaagatatatactgtgacaatccaccacatcagcctgtggccattgaactatggaaggctgttaaaagacataatctgactaaaagatggcttatgaaaatcgtcgatgaaagaagtctcactcttgtcgcccaggctggagtacaatggcacgaccttggctcactacaacctccacctcccgggttcaagtgattctcctgcctcagcttcccgagtagctgggattacaggaaaaaaatctggatgacaaagcatatcgtaatatcaaggaactggaaaattatgctgaaaacacacagagctctcttctttacttaacactagaaatattgggtataaaggatcttcatgcag

SEQ ID NO: 157636 - DNA, 845 bp, Homo sapiens
  Payload ID: 10893
  Gene Symbol: NDUFAF6
  Gene Name: NADH dehydrogenase (ubiquinone) complex I, assembly factor 6
  ENST ID: ENST00000520632
  CDS Start-End: 1-282
gtctgggggccgttgcggcttggcatccccggcctgtgctgccgccggccgcctctgggtctgtacgcgcgcatgcggcggctgcccgggccggaggtgtctgggcggagcgtggctgcggccagcggaccgggcgcctggggcactgaccactactgcctggagctgctgcggaaacgggattatgaaggttatttatgctccctgctgctccctgcagaatcccgaagctctgtttttgcactgagggcctttaatgtggaactggctcaggctggttaaagactcagtctctgagaaaacaattggactgatgcgaatgcagttttggaaaaaaactgtggaagatatatactgtgacaatccaccacatcagcctgtggccattgaactatggaaggtctgcacaccagcagaggcaggcccagtttctgggccccagattgacttcacagagccccagtaaagatggaaagccagaaccccccaactggggattgagaagaaaaagtggatgggaagctgctgttaaaagacataatctgactaaaagatggcttatgaaaatcgtcgatgaaagaagtctcactcttgtcgcccaggctggagtacaatggcacgaccttggctcactacaacctccacctcccgggttcaagtgattctcctgcctcagcttcccgagtagctgggattacaggaaaaaaatctggatgacaaagcatatcgtaatatcaaggaactggaaaattatgctgaaaacacacagagctctcttctttacttaacactagaaatattgggtataaaggatcttcatgcagatcatgctgcaagtcatattg

SEQ ID NO: 157637 - DNA, 1373 bp, Homo sapiens
  Payload ID: 10893
  Gene Symbol: NDUFAF6
  Gene Name: NADH dehydrogenase (ubiquinone) complex I, assembly factor 6
  Uniprot ID: Q330K2
  ENST ID: ENST00000518258
  CDS Start-End: 16-381
cgcagtgccggcgtcatggcggcctccgcgcacggctctgtctgggggccgttgcggcttggcatccccggcctgtgctgccgccggccgcctctgggtctgtacgcgcgcatgcggcggctgcccgggccggaggtgtctgggcggagcgtggctgcggccagcggaccgggcgcctggggcactgaccactactgcctggagctgctgcggaaacgggattatgaaggttatttatgctccctgctgctccctgcagaatcccgaagctctgtttttgcactgagggcctttaatgtggaactggctcaggctggattactcttgctgctgtcttgctgtactgtatgccactgggatctgaacactaaacattgctaagaaacccacccaccaccaggatatttggaagtaacttcacatatggaaaagttaaagactcagtctctgagaaaacaattggactgatgcgaatgcagttttggaaaaaaactgtggaagatatatactgtgacaatccaccacatcagcctgtggccattgaactatggaaggttgtcccagctttggacagcggaaactccttcacagcggctgctatgtccttgtgacacgcttccgtcattttttggagcactttcttattttctgacacaataagatattctaggatccttttgaatctctcccctgcctcacctttggaatcgcccatttctcgagagccctgattcctttaaggagaatggtagtagagacaagtgtctgggcactaggctgttaaaagacataatctgactaaaagatggcttatgaaaatcgtcgatgaaagagaaaaaaatctggatgacaaagcatatcgtaatatcaaggaactggaaaattatgctgaaaacacacagagctctcttctttacttaacactagaaatattgggtataaaggatcttcatgcagatcatgctgcaagtcatattggaaaagcacaaggcattgtcacttgcttgagagcaacaccatatcatgggagcagaagaaaggtgttccttcccatggatatttgtatgctgcatggtgtttcacaagaggactttctacggaggaaccaagataaaaatgtgagagatgtaatatatgacattgccagtcaagcacacttgcacctaaagcatgctaggtcctttcacaaaactgttcctgtgaaagcatttcctgcttttcttcagacggtttctctagaggactttctaaagaaaattcagcgagtggattttgatatattccacccatctttacagcagaagaatacattacttccattatatttgtatattcagtcatggagaaaaacatattaaaataatttcatggca

SEQ ID NO: 157638 - DNA, 796 bp, Homo sapiens
  Payload ID: 10893
  Gene Symbol: NDUFAF6
  Gene Name: NADH dehydrogenase (ubiquinone) complex I, assembly factor 6
  Uniprot ID: Q330K2
  ENST ID: ENST00000523337
  CDS Start-End: 4-369
gtcatggcggcctccgcgcacggctctgtctgggggccgttgcggcttggcatccccggcctgtgctgccgccggccgcctctgggtctgtacgcgcgcatgcggcggctgcccgggccggaggtgtctgggcggagcgtggctgcggccagcggaccgggcgcctggggcactgaccactactgcctggagctgctgcggaaacgggattatgaaggttatttatgctccctgctgctccctgcagaatcccgaagctctgtttttgcactgagggcctttaatgtggaactggctcaggctggattactcttgctgctgtcttgctgtactgtatgccactgggatctgaacactaaacattgctaagaaacccacccaccaccaggatatttggaagtaacttcacatatggaaaagttaaagactcagtctctgagaaaacaattggactgatgcgaatgcagttttggaaaaaaactgtggaagatatatactgtgacaatccaccacatcagcctgtggccattgaactatggaaggctgttaaaagacataatctgactaaaagatggcttatgaaaatcgtcgatgaaagagaaaaaaatctggatgacaaagcatatcgtaatatcaaggaactggaaaattatgctgaaaacacacagagctctcttctttacttaacactagaaatattgggtataaaggatcttcatgcagatcatgctgcaagtcatattggaaaagcacaaggcattgtcacttgcttgagagcaacaccatatcatgggag

SEQ ID NO: 157639 - DNA, 816 bp, Homo sapiens
  Payload ID: 10893
  Gene Symbol: NDUFAF6
  Gene Name: NADH dehydrogenase (ubiquinone) complex I, assembly factor 6
  ENST ID: ENST00000519136
  CDS Start-End: 532-816
ctccccagtcccggtccgcgaccacccggagcccgctccgccggccttgcgcggcgcgcccagggaaggcatttccagcccgcccacccaggtctcttcttcggcctttctgacatggtgccagccctactggagtcagcaggagtccagcacaacagatggtggtcagtggtgacttcggcacaggcagttcgtgaggagtggttggtggccatggagtcctgactggagtaggttaaaaagaaggaggaaaatcacaagaaagagagactggaggaaacgggattatgaaggttatttatgctccctgctgctccctgcagaatcccgaagctctgtttttgcactgagggcctttaatgtggaactggctcaggctggattactcttgctgctgtcttgctgtactgtatgccactgggatctgaacactaaacattgctaagaaacccacccaccaccaggatatttggaagtaacttcacatatggaaaagttaaagactcagtctctgagaaaacaattggactgatgcgaatgcagttttggaaaaaaactgtggaagatatatactgtgacaatccaccacatcagcctgtggccattgaactatggaaggctgttaaaagacataatctgactaaaagatggcttatgaaaatcgtcgatgaaagagaaaaaaatctggatgacaaagcatatcgtaatatcaaggaactggaaaattatgctgaaaacacacagagctctcttctttacttaacactagaaatattgggtataaaggatcttcatgcagatcatgctgcaagtcat

SEQ ID NO: 157640 - DNA, 1196 bp, Homo sapiens
  Payload ID: 10893
  Gene Symbol: NDUFAF6
  Gene Name: NADH dehydrogenase (ubiquinone) complex I, assembly factor 6
  ENST ID: ENST00000517976
  CDS Start-End: 1-294
gcgcacggctctgtctgggggccgttgcggcttggcatccccggcctgtgctgccgccggccgcctctgggtctgtacgcgcgcatgcggcggctgcccgggccggaggtgtctgggcggagcgtggctgcggccagcggaccgggcgcctggggcactgaccactactgcctggagctgctgcggaaacgggattatgaaggttatttatgctccctgctgctccctgcagaatcccgaagctctgtttttgcactgagggcctttaatgtggaactggctcaggctggttaaagactcagtctctgagaaaacaattggactgatgcgaatgcagttttggaaaaaaactgtggaagatatatactgtgacaatccaccacatcagcctgtggccattgaactatggaagtgattgccaaaagagggtttctgtaacaggagccacccacagacctgacagtggtacacctcttctcaggtctgcacaccagcagaggcaggcccagtttctgggccccagattgacttcacagagccccagtaaagatggaaagccagaaccccccaactggggattgagaagaaaaagtggatgggaagctgctgttaaaagacataatctgactaaaagatggcttatgaaaatcgtcgatgaaagagaaaaaaatctggatgacaaagcatatcgtaatatcaaggaactggaaaattatgctgaaaacacacagagctctcttctttacttaacactagaaatattgggtataaaggatcttcatgcagatcatgctgcaagtcatattggaaaagcacaaggcattgtcacttgcttgagagcaacaccatatcatgggagcagaagaaaggtgttccttcccatggatatttgtatgctgcatggtgtttcacaagaggactttctacggaggaaccaagataaaaatgtgagagatgtaatatatgacattgccagtcaagcacacttgcacctaaagcatgctaggtcctttcacaaaactgttcctgtgaaagcatttcctgcttttcttcagacggtttctctagaggactttctaaagaaaattcagcgagtggattttgatatattccacccatctttacagcagaagaatacattacttccattatatttgtatattcagtcatggagaaaaacatattaaaataatttc

SEQ ID NO: 157641 - DNA, 419 bp, Homo sapiens
  Payload ID: 10893
  Gene Symbol: NDUFAF6
  Gene Name: NADH dehydrogenase (ubiquinone) complex I, assembly factor 6
  ENST ID: ENST00000519804
  CDS Start-End: 112-419
cgtaatattacctaagtggtctgtgtcctcttcagagtcagaaggaggcatgaaatatccgtctgactcccagcagttaaagactcagtctctgagaaaacaattggactgatgcgaatgcagttttggaaaaaaactgtggaagatatatactgtgacaatccaccacatcagcctgtggccattgaactatggaaggctgttaaaagacataatctgactaaaagatggcttatgaaaatcgtcgatgaaagagaaaaaaatctggatgacaaagcatatcgtaatatcaaggaactggaaaattatgctgaaaacacacagagctctcttctttacttaacactagaaatattgggtataaaggatcttcatgcagatcatgctgcaagtcatattggaaaagcacaaggcattgt

SEQ ID NO: 157642 - DNA, 1474 bp, Homo sapiens
  Payload ID: 10893
  Gene Symbol: NDUFAF6
  Gene Name: NADH dehydrogenase (ubiquinone) complex I, assembly factor 6
  ENST ID: ENST00000520757
  CDS Start-End: 1-427
gtgctgccgccggccgcctctgggtctgtacgcgcgcatgcggcggctgcccgggccggaggtgtctgggcggagcgtggctgcggccagcggaccgggcgcctggggcactgaccactactgcctggagctgctgcggaaacgggattatgaaggttatttatgctccctgctgctccctgcagaatcccgaagctctgtttttgcactgagggcctttaatgtggaactggctcaggttaaagactcagtctctgagaaaacaattggactgatgcgaatgcagttttggaaaaaaactgtggaagatatatactgtgacaatccaccacatcagcctgtggccattgaactatggaaggtctgcacaccagcagaggcaggcccagtttctgggccccagattgacttcacagagccccagtaaagatggaaagccagaaccccccaactggggattgagaagaaaaagtggatgggaagctgctgttaaaagacataatctgactaaaagatggcttatgaaaatcgtcgatgaaagagaaaaaaatctggatgacaaagcatatcgtaatatcaaggaactggaaaattatgctgaaaacacacagagctctcttctttacttaacactagaaatattgggtataaaggatcttcatgcagatcatgctgcaagtcatattggaaaagcacaaggcattgtcacttgcttgagagcaacaccatatcatgggagcagaagaaaggtgttccttcccatggatatttgtatgctgcatggtgtttcacaagaggactttctacggaggaaccaagataaaaatgtgagagatgtaatatatgacattgccagtcaagcacacttgcacctaaagcatgctaggtcctttcacaaaactgttcctgtgaaagcatttcctgcttttcttcagacggaaattaaggatgcagacactcagggcgtgtgtcttgcacagccagccagcctgggaaaatgaagccaactgggagagagatttgaaggactctggttctaggcatgcgcacttctccaggtacttgagcttggaaaccttcttgcttaactagctctaggccaatcttgcttcactcgaacacgcacacacttctccttgcgctattttgaattaccagaggagaatctttgacaaacacaggtcgatgttagtgtgagccagactgggcaactacacaaaatcaaaatcaggaaaggagagccactttgctggaatctcccagaaggctggtggggtggactccggggctttgaaatctctaaagagtggtgactcacctctcctagaaattgccctggttatatcataaaagggctcaatttttacatgaggtctcaatggtctttttacttaatgtgacatcattagaaaaatcaacctttgaccagaaagaggcagttccctccttcctcacacaattcacaattttctgg

SEQ ID NO: 157643 - DNA, 582 bp, Homo sapiens
  Payload ID: 10893
  Gene Symbol: NDUFAF6
  Gene Name: NADH dehydrogenase (ubiquinone) complex I, assembly factor 6
  ENST ID: ENST00000522683
  CDS Start-End: 1-309
ctgtgctgccgccggccgcctctgggtctgtacgcgcgcatgcggcggctgcccgggccggaggtgtctgggcggagcgtggctgcggccagcggaccgggcgcctggggcactgaccactactgcctggagctgctgcggaaacgggattatgaaggttatttatgctccctgctgctccctgcagaatcccgaagctctgtttttgcactgagggcctttaatgtggaactggctcaggctggattactcttgctgctgtcttgctgtactgtatgccactgggatctgaacactaaacattgctaagaaacccacccaccaccaggatatttggaagtaacttcacatatggaaaagttaaagactcagtctctgagaaaacaattggactgatgcgaatgcagttttggaaaaaaactgtggaagatatatactgtgacaatccaccacatcagcctgtggccattgaactatggaagtgattgccaaaagagggtttctgtaacaggagccacccacagacctgacagtggtacacctcttctcaggtctgcacaccagcagaggcaggcccagttt

SEQ ID NO: 157644 - DNA, 2176 bp, Homo sapiens
  Payload ID: 10894
  Gene Symbol: NDUFAF7
  Gene Name: NADH dehydrogenase (ubiquinone) complex I, assembly factor 7
  Uniprot ID: Q7L592
  ENST ID: ENST00000002125
  CDS Start-End: 41-1366
cccagctcctggcggagcgagctagcctgcgaatttcagcatgagtgtactgctgaggtcaggtttggggccgttgtgtgccgtggcgcgcgcagccattccttttatttggagagggaaatacttcagctccgggaatgagcctgcagaaaacccggtgacgccgatgctgcggcatcttatgtacaaaataaagtctactggtcccatcactgtggccgagtacatgaaggaggtgttgactaatccagccaagggttattatgtgtaccgtgacatgctaggcgaaaaaggagatttcattacttcacctgaaataagtcaaatctttggggagctactaggtatatggttcattagtgaatggatggccactggaaaaagcacagctttccagctggtggaactgggcccaggtaggggaaccctcgtgggagatattttgagggtgttcactcaacttggatctgtgctgaaaaattgtgacatttcagtacatctggtagaggtaagccaaaaattaagtgagattcaagcattgacactgactaaagagaaggtcccgttagagcgaaatgctggatccccagtgtatatgaaaggtgtcactaagtctgggattccaatttcctggtaccgagatctgcacgatgttccaaaagggtacagcttttatcttgcacatgaattttttgatgttcttcctgtgcataaatttcagaaaacaccacagggatggcgagaagtatttgttgacattgatccacaggtttctgataaactgaggtttgttttggcaccttctgccaccccagcagaagccttcatacaacatgacgaaacaagggatcatgttgaagtgtgtcctgatgctggtgttatcatcgaggaactttctcaacgcattgcattaactggaggtgctgcactggttgctgattatggtcatgatggaacaaagacagataccttcagagggttttgcgaccacaagcttcatgatgtcttaattgccccaggaacagcagatctaacagctgatgtggacttcagttatttgcgaagaatggcacagggaaaagtagcctctctgggcccaataaaacaacacacatttttaaaaaatatgggtattgatgtccggctgaaggttcttttagataaatcaaatgagccatcagtgaggcagcagttacttcaaggatatgatatgttaatgaatccaaagaagatgggagagagatttaacttttttgccttgctacctcatcagagacttcaaggtggaagatatcagaggaatgcacgtcagtcaaaaccctttgcatccgttgtagctgggtttagtgaacttgcttggcagtgatatttcagcttggacattttacccttcagtcggcccaagaaatcaaaataaaggaaacacatttcatatactgcaggtaacaaaagtcaaagtattttatcttttcacagcaagaacagtccatgttgtatataatacaaccaacattatagaacttttagggttgtgactggctttggtgcaaatgtgtgctcaagctaataagttattgtgaaactgagtttcctttaacttacaaagctagttgccatatttctattttattttaaaaagtaaacatgcggctgggcgtggtggctcatgcctgtaatcccagcactttgggaggctgaggtgggcatatcacctgaggtcagcagttaaagaccagcctgaccaaaatggagaaaccccatctctactaaaaatacaaaactagccgggtatggtggtacatgcctgtaatcccagctactcaggaggctgagacaggagaatcacttgaacctgggaggtggaggttgcggtgagctgagatcgtgccactgcactccagcctgggcaacaagagcaaaaatccctctcaaaaaaaaaagtaaacatgggcactgattgttttaataaaaatgggaaacagactaaatggctattcacaggaaactgataagatatatgttatttttttaaatgagctagggcaatatgttttgacagaaaactctctaagatttagtaagtgaaaaaaagtaggatgcaagagtttttatagttgattccatttttgttgaaggagaaaaactaaataaatacgagtaatttcatagaaacgaa

SEQ ID NO: 157645 - DNA, 1869 bp, Homo sapiens
  Payload ID: 10894
  Gene Symbol: NDUFAF7
  Gene Name: NADH dehydrogenase (ubiquinone) complex I, assembly factor 7
  Uniprot ID: Q7L592
  ENST ID: ENST00000336237
  CDS Start-End: 28-1059
ggagcgagctagcctgcgaatttcagcatgagtgtactgctgaggtcaggtttggggccgttgtgtgccgtggcgcgcgcagccattccttttatttggagagggaaatacttcagctccgggaatgagcctgcagaaaacccggtgacgccgatgctgcggcatcttatgtacaaaataaagtctactggtcccatcactgtggccgagtacatgaaggaggtgttgactaatccagccaagctactaggtatatggttcattagtgaatggatggccactggaaaaagcacagctttccagctggtggaactgggcccaggtaggggaaccctcgtgggagatattttgagggtgttcactcaacttggatctgtgctgaaaaattgtgacatttcagtacatctggtagagaaaacaccacagggatggcgagaagtatttgttgacattgatccacaggtttctgataaactgaggtttgttttggcaccttctgccaccccagcagaagccttcatacaacatgacgaaacaagggatcatgttgaagtgtgtcctgatgctggtgttatcatcgaggaactttctcaacgcattgcattaactggaggtgctgcactggttgctgattatggtcatgatggaacaaagacagataccttcagagggttttgcgaccacaagcttcatgatgtcttaattgccccaggaacagcagatctaacagctgatgtggacttcagttatttgcgaagaatggcacagggaaaagtagcctctctgggcccaataaaacaacacacatttttaaaaaatatgggtattgatgtccggctgaaggttcttttagataaatcaaatgagccatcagtgaggcagcagttacttcaaggatatgatatgttaatgaatccaaagaagatgggagagagatttaacttttttgccttgctacctcatcagagacttcaaggtggaagatatcagaggaatgcacgtcagtcaaaaccctttgcatccgttgtagctgggtttagtgaacttgcttggcagtgatatttcagcttggacattttacccttcagtcggcccaagaaatcaaaataaaggaaacacatttcatatactgcaggtaacaaaagtcaaagtattttatcttttcacagcaagaacagtccatgttgtatataatacaaccaacattatagaacttttagggttgtgactggctttggtgcaaatgtgtgctcaagctaataagttattgtgaaactgagtttcctttaacttacaaagctagttgccatatttctattttattttaaaaagtaaacatgcggctgggcgtggtggctcatgcctgtaatcccagcactttgggaggctgaggtgggcatatcacctgaggtcagcagttaaagaccagcctgaccaaaatggagaaaccccatctctactaaaaatacaaaactagccgggtatggtggtacatgcctgtaatcccagctactcaggaggctgagacaggagaatcacttgaacctgggaggtggaggttgcggtgagctgagatcgtgccactgcactccagcctgggcaacaagagcaaaaatccctctcaaaaaaaaaagtaaacatgggcactgattgttttaataaaaatgggaaacagactaaatggctattcacaggaaactgataagatatatgttatttttttaaatgagctagggcaatatgttttgacagaaaactctctaagatttagtaagtgaaaaaaagtaggatgcaagagtttttatagttgattccatttttgttgaaggagaaaaactaaataaatacgagtaatttcatagaaacgaa

SEQ ID NO: 157646 - DNA, 934 bp, Homo sapiens
  Payload ID: 10894
  Gene Symbol: NDUFAF7
  Gene Name: NADH dehydrogenase (ubiquinone) complex I, assembly factor 7
  ENST ID: ENST00000439218
  CDS Start-End: 132-934
agctcttcagttgagggtaccgggggatcaagggctcgggggctcacttccaccttgaagccattccttttatttggagagggaaatacttcagctccgggaatgagcctgcagaaaacccggtgacgccgatgctgcggcatcttatgtacaaaataaagtctactggtcccatcactgtggccgagtacatgaaggaggtgttgactaatccagccaagggttattatgtgtaccgtgacatgctaggcgaaaaaggagatttcattacttcacctgaaataagtcaaatctttggggagctactaggtatatggttcattagtgaatggatggccactggaaaaagcacagctttccagctggtggaactgggcccaggtaggggaaccctcgtgggagatattttgagggtgttcactcaacttggatctgtgctgaaaaattgtgacatttcagtacatctggtagaggtaagccaaaaattaagtgagattcaagcattgacactgactaaagagaaggtcccgttagagcgaaatgctggatccccagtgtatatgaaaggtgtcactaagtctgggattccaatttcctggtaccgagatctgcacgatgttccaaaagggtacagcttttatcttgcacatgaattttttgatgttcttcctgtgcataaatttcagaaaacaccacagggatggcgagaagtatttgttgacattgatccacaggtttctgataaactgaggtttgttttggcaccttctgccaccccagcagaagccttcatacaacatgacgaaacaagggatcatgttgaagtgtgtcctgatgctggtgttatcatcgaggaactttctcaacgcattgcattaactggaggtgctgcactggttgctgattatggtcatgatggaacaaagacagatac

SEQ ID NO: 157647 - DNA, 783 bp, Homo sapiens
  Payload ID: 10894
  Gene Symbol: NDUFAF7
  Gene Name: NADH dehydrogenase (ubiquinone) complex I, assembly factor 7
  ENST ID: ENST00000431821
  CDS Start-End: 94-783
agcctgcgaatttcagcatgagtgtactgctgaggtcaggtttggggccgttgtgtgccgtggcgcgcgcagggttattatgtgtaccgtgacatgctaggcgaaaaaggagatttcattacttcacctgaaataagtcaaatctttggggagctactaggtatatggttcattagtgaatggatggccactggaaaaagcacagctttccagctggtggaactgggcccaggtaggggaaccctcgtgggagatattttgagggtgttcactcaacttggatctgtgctgaaaaattgtgacatttcagtacatctggtagaggtaagccaaaaattaagtgagattcaagcattgacactgactaaagagaaggtcccgttagagcgaaatgctggatccccagtgtatatgaaaggtgtcactaagtctgggattccaatttcctggtaccgagatctgcacgatgttccaaaagggtacagcttttatcttgcacatgaattttttgatgttcttcctgtgcataaatttcagaaaacaccacagggatggcgagaagtatttgttgacattgatccacaggtttctgataaactgaggtttgttttggcaccttctgccaccccagcagaagccttcatacaacatgacgaaacaagggatcatgttgaagtgtgtcctgatgctggtgttatcatcgaggaactttctcaacgcattgcattaactggaggtgctgcactggttgctgattatggtcatgatggaacaaagacagat

SEQ ID NO: 157648 - DNA, 663 bp, Homo sapiens
  Payload ID: 10894
  Gene Symbol: NDUFAF7
  Gene Name: NADH dehydrogenase (ubiquinone) complex I, assembly factor 7
  ENST ID: ENST00000432075
  CDS Start-End: 220-663
ggggatcaagggctcgggggctcacttccaccttgaaggtaccctgggctggaaacgggtccggtacaaacgcaatagggctgcgtagtcgtgggcaagtgggtgctgtctctgcgccccgtgggcgtgctaagcacagtagcccgcgccattccttttatttggagagggaaatacttcagctccgggaatgagcctgcagaaaacccggtgacgccgatgctgcggcatcttatgtacaaaataaagtctactggtcccatcactgtggccgagtacatgaaggaggtgttgactaatccagccaagggttattatgtgtaccgtgacatgctaggcgaaaaaggagatttcattacttcacctgaaataagtcaaatctttggggagctactaggtatatggttcattagtgaatggatggccactggaaaaagcacagctttccagctggtggaactgggcccaggtaggggaaccctcgtgggagatattttgagggtgttcactcaacttggatctgtgctgaaaaattgtgacatttcagtacatctggtagaggtaagccaaaaattaagtgagattcaagcattgacactgactaaagagaaggtcccgttagagcgaaatgctggatccccagtgtatatgaaaggtgtcact

SEQ ID NO: 157649 - DNA, 473 bp, Homo sapiens
  Payload ID: 10894
  Gene Symbol: NDUFAF7
  Gene Name: NADH dehydrogenase (ubiquinone) complex I, assembly factor 7
  ENST ID: ENST00000416653
  CDS Start-End: 141-473
gtcagtcccctcgaagcccggttgccgtggaagccgcgtggggcgccttcctcagctcttcagttgaggccattccttttatttggagagggaaatacttcagctccgggaatgagcctgcagaaaacccggtgacgccgatgctgcggcatcttatgtacaaaataaagtctactggtcccatcactgtggccgagtacatgaaggaggtgttgactaatccagccaagggttattatgtgtaccgtgacatgctaggcgaaaaaggagatttcattacttcacctgaaataagtcaaatctttggggagctactaggtatatggttcattagtgaatggatggccactggaaaaagcacagctttccagctggtggaactgggcccaggtaggggaaccctcgtgggagatattttgagggtgttcactcaacttggatctgtgctgaaaaattgtgacatttcagtacat

SEQ ID NO: 157650 - DNA, 661 bp, Homo sapiens
  Payload ID: 10894
  Gene Symbol: NDUFAF7
  Gene Name: NADH dehydrogenase (ubiquinone) complex I, assembly factor 7
  ENST ID: ENST00000441905
  CDS Start-End: 1-267
gggttttgcgaccacaagcttcatgatgtcttaattgccccaggaacagcagatctaacagctgatgtggacttcagttatttgcgaagaatggcacagggaaaagtagcctctctgggcccaataaaacaacacacatttttaaaaaatatgggtattgatgtccggctgaagagacttcaaggtggaagatatcagaggaatgcacgtcagtcaaaaccctttgcatccgttgtagctgggtttagtgaacttgcttggcagtgatatttcagcttggacattttacccttcagtcggcccaagaaatcaaaataaaggaaacacatttcatatactgcagcactgcagatgacaatctacaaagaacaagttacacagcaaaatatcagtccataaaatgaaatccttccttatttaggttagctcagtgattaaggatcttcttccatatcatctggattaggagccataatgaagtgctttgggtatacaaggttatgtgtgtatgcatgtatttcccagcgagcatcatcactttcatgtgtaatgtaacgttctccaatgcgagtttcaaattctctaaggtcaagccaagtctgatagtcctaggagaaaatgaaattgtaatgatgaaacaaaagaaacaaaatactgtcaa

SEQ ID NO: 157651 - DNA, 946 bp, Homo sapiens
  Payload ID: 10894
  Gene Symbol: NDUFAF7
  Gene Name: NADH dehydrogenase (ubiquinone) complex I, assembly factor 7
  ENST ID: ENST00000455230
  CDS Start-End: 76-489
gtcggggcgtgtcttctcccggaaatggtctaagccccagctcctggcggagcgagctagcctgcgaatttcagcatgagtgtactgctgaggtcaggtttggggccgttgtgtgccgtggcgcgcgcagccattccttttatttggagagggaaatacttcagctccgggaatgagcctgcagaaaacccggtgacgccgatgctgcggcatcttatgtacaaaataaagtctactggtcccatcactgtggccgagtacatgaaggaggtgttgactaatccagccaagggttattatgtgtaccgtgacatgctaggcgaaaaaggagatttcattacttcacctgaaataagtcaaatctttggggagctactaggtatatggttcattagtgaatggatggccactggaaaaagcacagctttccagctggtggaactgggcccaggtgttcactcaacttggatctgtgctgaaaaattgtgacatttcagtacatctggtagagggtacagcttttatcttgcacatgaattttttgatgttcttcctgtgcataaatttcagaaaacaccacagggatggcgagaagtatttgttgacattgatccacaggtttctgataaactgaggtttgttttggcaccttctgccaccccagcagaagccttcatacaacatgacgaaacaagggatcatgttgaagtgtgtcctgatgctggtgttatcatcgaggaactttctcaacgcattgcattaactggaggtgctgcactggttgctgattatggtcatgatggaacaaagacagataccttcagagggttttgcgaccacaagcttcatgatgtcttaattgccccaggaacagcagatctaacagctgatgtggacttcagttatttgcgaagaatggcacagggaaaagtagcctctctgggcc

SEQ ID NO: 157652 - DNA, 11819 bp, Homo sapiens
  Payload ID: 10895
  Gene Symbol: NDUFS1
  Gene Name: NADH dehydrogenase (ubiquinone) Fe-S protein 1, 75kDa (NADH-coenzyme Q reductase)
  Uniprot ID: P28331
  ENST ID: ENST00000233190
  CDS Start-End: 268-2451
cacttccggcggaactgcgggtccaagttgtccttcccgcctccgggctgggccgacctcagctccgccctctggtcggctgacggaaattgccgacaaacttgtcgaatgcaaggattctagtccctccgggctttccgttctccaggcccggctgacagagttagccgaggccgccatattgaataagcgacccggcctcctagggggtcgtcgtggtccagacagtttagcagaacagcctccgcggctccggggagaagcaatatgttaaggatacctgtaagaaaggccttagtaggcctttctaagtctcctaaaggatgtgttcgaacaactgccacagcagcaagcaacttgattgaagtatttgttgatggtcagtctgtcatggtggaaccgggaacgaccgtcctccaagcttgtgagaaggttggcatgcagatccctcgattctgttatcatgaaaggttgtctgttgctggaaactgcaggatgtgccttgttgaaattgagaaagcccctaaggttgtagctgcttgtgccatgccagtaatgaagggttggaatatcctaacaaactcagaaaaatccaaaaaagccagggaaggtgtgatggagttcttattagcaaatcacccattggactgtcctatttgtgaccagggaggtgaatgtgatctgcaggaccagtccatgatgtttggaaatgataggagccgatttttagaggggaagcgtgctgtggaagacaagaacattgggccattggtaaagaccatcatgacaagatgtatacagtgtactcgctgcatcaggtttgcaagtgagattgcaggagtagatgatttgggaacaacaggcagaggaaatgatatgcaagttggcacatacattgaaaagatgttcatgtctgaactgtctgggaatatcattgatatctgccctgtaggtgccctaacctctaagccctatgcctttactgcccggccttgggaaacaagaaagacagaatccattgatgtaatggatgcggttggaagtaatattgtggttagcacaagaactggagaagtgatgaggattttgccacgtatgcatgaggacatcaatgaagagtggatctctgataaaaccagatttgcctatgatgggctaaaacgtcaaagacttaccgagccaatggtcagaaatgaaaaagggcttttaacctatacttcttgggaggatgcgctctctcgcgtagctggaatgttgcagagttttcaaggcaaagatgtggcagcaattgcaggtggcttggtggatgctgaagccctggtagctctcaaagatttgcttaatagagtggactctgacaccttatgcactgaagaggtcttccccactgcaggagctggcacagatttgcgttccaattatcttcttaatactacaattgctggtgtggaagaggcagatgttgttcttctggttggtacaaacccacgttttgaggcaccactgtttaatgctagaattcgaaagagctggctgcataatgacttaaaagtggcccttataggcagtccagtggacctcacttacacatatgaccacctgggagactcccccaaaattcttcaagacattgcttcgggaagccatccatttagccaggtcctaaaggaagctaaaaaaccaatggtggttttaggcagttctgcactccaaagaaatgatggagcagcaattcttgcagctgtttctagcattgcacaaaagattcggatgactagtggtgttactggtgattggaaagttatgaatatccttcataggattgcaagtcaagtagctgctttggaccttggctataagcctggggtggaagcaattcggaagaaccctcccaaggtgctgtttctcctgggagcagatggaggttgtatcacacgacaggatttgccaaaggattgtttcattatttatcaaggacatcatggtgatgttggggctcccatagctgatgttattctcccaggagctgcttacacagagaagtctgctacatatgtcaacactgagggtagagctcagcagactaaggtagcagtgacacctcctggcttggcaagagaagactggaaaattataagagcactctctgagattgctggaatgactcttccatatgatactctggatcaagtaaggaacagattggaagaagtctctcctaatcttgttcgatatgatgatattgaaggggctaattacttccagcaagcaaatgagctctcaaagctagtgaaccagcagcttcttgctgacccacttgttccacctcagctaactataaaagacttctacatgacagattcaattagcagagcctcacagacaatggccaaatgtgtcaaagctgtcacagagggtgcccaggcagtagaggaaccatccatatgctgaagcttctactaggatcccagttttgccgcagataattaatggacaactgtagtgcagtgatcctttacaggtttatttctttgtaaaaaaaaataataataatttgaatcatgtaatatttaaggttatactatgcctatttgaaaatgatattagttatcaactttgcagtttgaaaaacatgtattgtgtgtaaaggttaaataacaaaactatgcagatgctcttaaaagcattgataacctttgtgacgaacataaagagatccttaaattatgagttgttggcttatcttcataaataatttgtctgtaaaatggatgaaatgaaaagaggttcaattaaaacctacttttttctagtgctaaagaaaagatttaagcaccttgtcaagctgggtaaataggaaaaatacataatcatgctcagatatgtatctaggataattataattaataataatcatagtaacaatggctaatgataatttagctttattatatgtgctaagcactctggttttacatgcattatcttcttttgttcttgctacaaccctgtgagatagtagtattatctcattttactgatgaagactgaagcctaggtatattaaatagcttgcccaaggccacacagcaaaagtcaccaactcaaacctacttcttatttactccaaagcctgttgttcttaactgcaacatattatttcgtctcattaatgttgattctataggttgttacttctaaaaattagtattgagtttaatggtgaacacatttttctattttctcttgaatctgcttctataatgtcatggtgatttatgtggcttttttttttttataagttatacatgtatgcatgtatacttatgagacctcccttggaatgagggaggtctcaagagatataatttagattctcattgatgttctgtattcattatcctaacaccatctgtagtgttaaatcaactaaattatttcagcaataggagacaaaacaaccagctttcataatttttaattgtcaaaaccaaaaggaatcagaataaggatcactgagaatttaaaaaaataaaaaaggaagtaaaaattttacaattaggagataattaaaaatagataatttttttttttaatctaaggttgggtgtggtggcttacacctgtaatcccaacacttggggggccaaggtgggtggatcgcttgagcccaggcagttggagaccagtctgggcaacatggtgaaaccccatctctacaaaaaatacaaaaattagctgggtgtggtggtgtacacctatagtcccagctactcggaaggctgaggtgggaggatcacctgacccaggaggttgaggctgcagtgagccgtgattgcgccactgcattccagcctgggcaacagagcaagactttgtttcaaacaaacaaacaaaactatgttcacaatttatttgttttgtaatccttattcttttctgctttcactaaagactcagcccaagtataggatgccctttttccctttgttttttttttttttttgagatggagtcttactctgtcacccaaggctggaatgcagtggcatgatcttggctcactgcaatcaccacctccctgattcaagcgattctcctgcctcagcctccccggtagctgggattacaagcgcacgccaccacacctggctaatttttgtatttttagtagagacagggtttcaccaatttggccaggctggtcttgaactcctaacctcaggtgatctacctgccttggcctcccaaagtgctgggattacaggcgtgagccaccgcgcccagtctaggatgtcgtttttctgatacaacaaaggataaggttttagaataatagtatgttacaatatctttaaaaacagcaggtgcagtggctcacacctgtaagcccagcattttgggggttcaaggcaggaagatcagttgaggccaggagttcaagaccagcctggactgcatagcaagatcctatttgtacaaaaaaatgtaaaacttaaaattgcacaaaatttgtcacctgtaccagcttttagaactgtttatcttatcctcctcagtgatacatcatgaagttgtgtgctttgcctaaaatgcccagttacctgaaattgtataaattcttgccaaaagtgtttgaacttaatacaaacttcccatctcttacctcttagcactgtgctcatcttgaggggacatagtcccaattttgtattttatataatactgttaatgaatatgtgtagacttcatatggttgtgggtaagagaatactgcattcagatagaaaagatgctatatagctaagttgatccaggatccttgggctacctgctaggcagcttgtggtgaacaatcataatctctaaaaaataccttgtctggaccgggcgcggtggctcacacctgtaatcccagcactttggcaggctgaggcgggcagatcattgaggtcaggagtttgagaccagcctggccaacgtggtgaaaccctgtctctactaaaaatacaaaaattagccaggcatggtggcacatggctgtaatcccagctactggggaggctgaagcaggaaaatcgcttgaactgagagtcaaggcggaggtcgcggtaagccgagatcacaccattgcactgcagcctgggtgaagaaacaagcctccctctcaaaaaataaataaataaataaataatacctcctctgggataagtagtgctccgtctgtctcatgggcacatattagtgtcgtaatgccaaatactaaggttattgtaagcataaacattgaagataattgctagagaaaaatagactgaaaaagatgtaagaaaaatacacgtagatgagagtaacctgtctggtggaatcatgacattctaagcagtgaaggaatcaccaatgagaaaatctacaaaggctcaagatcaagtctctttaggtgaataaggcaatctagaaagaccttggaataataataccatttcctgaggaccttctaaataagtgccattaaagctttaaatacattaagactattcttcacaaaatctctgctaatagtaggtattaattgagactcaagaaatatcaaataacttatttatggctacacagctagatactaatggcaggagtgtttaattagaagtacttttactatcccaggttgcctcaaatgaaaacattttggacagcaatgtaaggtgaatagctgagcatgatggcacaagctatagccccagctacttgggaggctgaggcacaaggattgcttgagcaaatgagttgagtccagcatggacaactgtattcctgcagcctgcttgtattcctctcctcaaagtgctttttccttctctgccacatgactagtctgtgaattttccaaacttctacgctctgcttcccttttaaatatgttccaactttaagttatttctttgcttccatatctgattgtaggctgctagcatcagccaggccacatcttgaatgctttgctgcttagaaatttcttctgccagataccctgataccctaagtcatcactcttaagttcaaacttccacagattcctagggcctggacacaatgcacccaagctatttgctaaagcatgacatagatgtacctttattcctgttcccaataacttcctcatttccatctgagacctcatcactctggacttcaccatatgtctatcagcattttggtcacaaccacttaactagtctctaagttccaaactttccctcatctttctgtcttctgagccctccagattcttccaacctctgcctgttacccagttccaaagctgtttctacattttccaatatgtatagcagtgccccactgtcagtactaatctgttttaatctgtttgcattactgtaaaggaatatctgagattgggtaattcttgcaaaagagagatttaattggcttacagtttctgcaggctgtacacaaagcatggcaccagcagctgcttctgatgagggcctcaggaagcttacaatcatggtagaaggcaaaatgggagcgagcatatcacatggtgagagagggagcaagagagaggaggaggtcccagactctaaacaaccaaatttcacatgaactaagatctcactcatcaccaaggtgatggtgccaagccattcatgaaggatttgccccatgattctatacctcccacgaggccctacctccagcattgggggttacatttcaacatgagatttggaagtgacagccatccaaaccatatcagcaacataacaagacccccaactcttaaaaaaaaaagttgaatatatatccaaaaatatcttgaattccatatggaaagcctcccccctcaaatttgtagtaaattgtattataatgaatacattaattaaaaatatacttggcctggcacagtagctcaagcctgtaatcccagcactttgggaggccgaggcaggcggatcacctgaggtcaggagttttcgagaccagcctgtccgacatggtgaaactctgtctctactaaaaatacaaaattagccagccatggtggcatatgcctgtaatcccagctactcactcaggaggctgaggcaggagaatcacttaaacccaggagacggaggttgcagtgagtcaagattgcaccgttgcactccagcctgggtgacagagtgagactctgtctgaaaaaaagtaaaaattaaaaaatatatttgacaatacccagtaccaatttattgtttgttgttgacattaacattttctttaagagtatttcttcatctgtaaaatgaggataaaaattgtaaaattgtacctacttccagcctcatagaattgttttgatgattacatcagaaagcttgtaaaaaccttaggcctgtttcctgacatatactaaatgccccatgtgctaactgaggatgatcattgtaggaaaatttcatagactatgagggaaagccatgcctaaaataatctccagcttattaagaagtgcattcctttttgtttctttgttttatcttagattgagtctcactgtattgccagtctggagtgcagtggcgcaatctcagctcactgcaacctccacctcctgggttcaagcgatcctcctgcctcagcctcctgagtagctgggactacaggagcacaccaccacgcccagctaatttttgtgtttttagtagaggcggggtttcaccatgttgggcaggatggtctcaaactcctgacctcaggtgatccacccgcctcaacctcccagagtgctgggattacaggcgtgagctatccgtgcccagtcaatttttgtatttttagtagagatgaggtttcaccatattggtcaggctggtcttgaacccctgacctcaggtgattcacccgcctcagcctcccaaagtgctgggattccagatgtgagccagcgcacccagcctggccatcttttataaaaagatgaagatgtcagaattccctaataagattctggctctgttacccagactggagtgcaatgcatggcatgatctcagcacactgcaacctccatctcctgggctcaagccatcctcccacttcagtctcccaagtggctgggactacaggcacacgccaccacacctggctaatttttgtattttttgtagagacgaggtttcgccatgttacccaggctggtcttaaactcctgagttcaagtgatccacctgcctcagcctcccaaagtgctgggattacaggcatgagccactgtacccggcccctaataagttttaaataaccaatattttaaaatattttaatagttacatagcactttagtttgctgatttaatttatcccaagggacaaggatgttaatgagaaaactgactagatttcagatcacagattttaagagaacaaggatctcaaaaccaaataccctctgcttaaagtgttttttgtgtttttcactactgaaaatgtttagagattgacttacctattgctgatactcaaaacatctgatatcttaatatttttaaataactcactaaaagcatatgttgaaaatggcaatgtatagtctgagactggtgattagactggactaaaagcatatgttggaaatggcaaatatatgatctgagactggtgattaatttacagtattggcacctaaagagatactgagatgaataacttattaatttccttcttaaaatcataattttggatctgtaaaggactatacaaaaaaaaattttagtattatacctgcattttataattgtggaaatggaggccagaaagaataagaggcaagttaggggcagatcttgggtttggatcagctcttctgatgcctggttctgtgacattacaaagcctgaaattcagctccaacatctattaaacatttgcagagtatcagctgggtgcggtggctctcataaggccaggagttcaagaccagcctggccaagatagtgaaaccccatctctactaaaaatacaaaaattagccgggcatggtggcaagacacctgtaatcccagctactctggaggctgagtcagagaattgcttaaacctgggaggcggaggttgcagtgatcccagatcgcgccactgcgctctagcatgggcgacaaagcgagaccccatctcaaaaagaaaaacaaaatttttttgcagagtatctactgtgtgtcaagtacattacccaagactacaaagagaaatacaatttagctaatgtcctcaagaagctaacagtatactaaaagagatatgtaggcatcaattatagtaatgacataacatattctaatagaggtaagtacataacacagtgggcatgtctagttgtctttgtttctgctgttaaaacagaatatcacagactgggtgatgggttgattgattgactgattgaggcaactctgtcacccaggctggggttcagtggcatgatcacagttcactgcagcctcaacctccctggatcaagcaatcctcctgcctcagcctcctgaacagctggaactacaggtgtgagccaccatgccccactaatttttatttatttattttttttttctgagacggagtctcagtttgtcgcccaggctgaagtgcagtggcacaatctcagctcactgcaacctccacctcccgggttcagttttcctgcctcaatctactaggatctagctaggattacaggtgtgcgccaccatgcccagctaatttttgtatttttagtagagacggggtttcaccatgttggtcaggctggtctcaaactcctgacctcatgatctgcccacctcggcctcccaaagtgctgggattacaggcgtaagccaccgcgcccagctaatttttaaaaatattttatagagacaggtctcactatgttgcccaggctcgtcttgaacccctgggcccaggcgctcctcccaccttgacctcccaaagttctggaattacacatgtgagccaacacaccaggcccagactgggtaatttataaagaaatttacttctgcccacaccgccccgcctccccgcgcgagtggctgaggcgtagcgctgccatccccgcacccctgggaacatggcgctgcgagtggtgcggagcgtgcgggccgtgctctgcagcctgcacgtggtcctggcacctgccgcgccctgcctatcgaggccctggcagcttgggatgggcgccgtctggttactgtaatctgcctgaagttgggacaaaattgaacaaacaagatgagtttggtgctttggagagtgtgaaagctgctagtgaactctattctcctttatcaggagaagtaaccgaaattaatgaagctcttgcagaaaatccaggacttgtaaacaaatctcgttatgaagatggttggctgatcaagatgacactgagtaacccttcataactagatgaacttatgagtgaagaagcatatgagaaatacataaaatctattgaggagtgaaaatggaaccactaaataagctagtatgaaataacgcaacccagcagagttgtcctaaattagtggtggatagaagacttagaatagcaacttttagcattacccatgggaaaaaaaaactactgttaacactgctaatgaaagaagatgccttttaactttctaatgattgtagataaacataatatgtgtctttttcacaacatcctatgatttttagactaggctctagtattcatgaaattatccatgaaattatccatggtaaaaattagttacaaaaattacataattcaaagataatgttgttattcttaagccttatataatattgtaacttgtgtatgtccatacctggacttgggatgaaatacttaatgatctttccattggaaataactgggagtgaagaagtttttgttgcttgtacagtgtcagatgaagaacaacactatcttaattttgcaatacactgcatttgctggtgctgtttttatatagtgaagcaacagctgtacagcaaaataataaaatactcacttcttcgttaaaaaaaaaaaaaatttacttcttacaattctggaggccaggaagaccatgatcaggtgccagcatctgggaagggccttcttgctgtcctcccatggcagaagatggaagggcaagggagagctaacatgctcccgcaaaccctttttataatggcatcaatcaaatatgaggccagagtccttgtgacctaatcatctcccagaaggctccgcctcccaaccctgttgcattgggattaagtttccaacacatgaattgtggagacaacacattcaaaacatagcattccacaccttgggctccccagattcatgtcctcacatgcaaaataaattcattccatcccaatagcccctaaaaagtcttaacttgttccagcatcaactttaaagtcaaagtccaaagtctcatctaaatcagatatgagtgagactcaaggcatgattcatcatgagacaaaggatgtacatttgcaatgtttgtcatgtcagacaaaacaaaaatatgtaaatatccatcaatagggaactgctgaaaaatttttttgtataatcataaaatgaaacatgcagatgtttaaaccaatgagctagatctcaacgtgctgatatggaaagtgcttcagaatgtattaaggacataaattaagtgtacaataatgtgtgtgtgtgtatatatgtatatgcttacgtgtgtatggaaagtatctcagcagatacaataaaaacttaattgtgatta

SEQ ID NO: 157653 - DNA, 569 bp, Homo sapiens
  Payload ID: 10895
  Gene Symbol: NDUFS1
  Gene Name: NADH dehydrogenase (ubiquinone) Fe-S protein 1, 75kDa (NADH-coenzyme Q reductase)
  ENST ID: ENST00000454195
  CDS Start-End: 179-569
gacgtagtcttctgttgtccttgactgggcgccgcctcccgccccgccgcctcggaagcccctgagagccggcagatggggggcttttagccacggtctctggtctgatgaagcagaaaagaagatgaggatcagggggtcctcgggaacgctgtcacgaatgtaggcttgcagcaatatgttaaggatacctgtaagaaaggccttagtaggcctttctaagtctcctaaaggatgtgttcgaacaactgccacagcagcaagcaacttgattgaagtatttgttgatggtcagtctgtcatggtggaaccgggaacgaccgtcctccaagcttgtgagaaggttggcatgcagatccctcgattctgttatcatgaaaggttgtctgttgctggaaactgcaggatgtgccttgttgaaattgagaaagcccctaaggttgtagctgcttgtgccatgccagtaatgaagggttggaatatcctaacaaactcagaaaaatccaaaaaagccagggaaggtgtgatggagttcttattagcaaatcacccattggactgtcctattt

SEQ ID NO: 157654 - DNA, 3361 bp, Homo sapiens
  Payload ID: 10895
  Gene Symbol: NDUFS1
  Gene Name: NADH dehydrogenase (ubiquinone) Fe-S protein 1, 75kDa (NADH-coenzyme Q reductase)
  Uniprot ID: P28331
  ENST ID: ENST00000455934
  CDS Start-End: 62-2287
gagagccggcagatggggggcttttagccacggtctctggtctgatgaagcagaaaagaagatgaggatcagggggtcctcgggaacgctgtcacgaatcaatatgttaaggatacctgtaagaaaggccttagtaggcctttctaagtctcctaaaggatgtgttcgaacaactgccacagcagcaagcaacttgattgaagtatttgttgatggtcagtctgtcatggtggaaccgggaacgaccgtcctccaagcttgtgagaaggttggcatgcagatccctcgattctgttatcatgaaaggttgtctgttgctggaaactgcaggatgtgccttgttgaaattgagaaagcccctaaggttgtagctgcttgtgccatgccagtaatgaagggttggaatatcctaacaaactcagaaaaatccaaaaaagccagggaaggtgtgatggagttcttattagcaaatcacccattggactgtcctatttgtgaccagggaggtgaatgtgatctgcaggaccagtccatgatgtttggaaatgataggagccgatttttagaggggaagcgtgctgtggaagacaagaacattgggccattggtaaagaccatcatgacaagatgtatacagtgtactcgctgcatcaggtttgcaagtgagattgcaggagtagatgatttgggaacaacaggcagaggaaatgatatgcaagttggcacatacattgaaaagatgttcatgtctgaactgtctgggaatatcattgatatctgccctgtaggtgccctaacctctaagccctatgcctttactgcccggccttgggaaacaagaaagacagaatccattgatgtaatggatgcggttggaagtaatattgtggttagcacaagaactggagaagtgatgaggattttgccacgtatgcatgaggacatcaatgaagagtggatctctgataaaaccagatttgcctatgatgggctaaaacgtcaaagacttaccgagccaatggtcagaaatgaaaaagggcttttaacctatacttcttgggaggatgcgctctctcgcgtagctggaatgttgcagagttttcaaggcaaagatgtggcagcaattgcaggtggcttggtggatgctgaagccctggtagctctcaaagatttgcttaatagagtggactctgacaccttatgcactgaagaggtcttccccactgcaggagctggcacagatttgcgttccaattatcttcttaatactacaattgctggtgtggaagaggcagatgttgttcttctggttggtacaaacccacgttttgaggcaccactgtttaatgctagaattcgaaagagctggctgcataatgacttaaaagtggcccttataggcagtccagtggacctcacttacacatatgaccacctgggagactcccccaaaattcttcaagacattgcttcgggaagccatccatttagccaggtcctaaaggaagctaaaaaaccaatggtggttttaggcagttctgcactccaaagaaatgatggagcagcaattcttgcagctgtttctagcattgcacaaaagattcggatgactagtggtgttactggtgattggaaagttatgaatatccttcataggattgcaagtcaagtagctgctttggaccttggctataagcctggggtggaagcaattcggaagaaccctcccaaggtgctgtttctcctgggagcagatggaggttgtatcacacgacaggatttgccaaaggattgtttcattatttatcaaggacatcatggtgatgttggggctcccatagctgatgttattctcccaggagctgcttacacagagaagtctgctacatatgtcaacactgagggtagagctcagcagactaaggtagcagtgacacctcctggcttggcaagagaagactggaaaattataagagcactctctgagattgctggaatgactcttccatatgatactctggatcaagtaaggaacagattggaagaagtctctcctaatcttgttcgatatgatgatattgaaggggctaattacttccagcaagcaaatgagctctcaaagctagtgaaccagcagcttcttgctgacccacttgttccacctcagctaactataaaagacttctacatgacagattcaattagcagagcctcacagacaatggccaaatgtgtcaaagctgtcacagagggtgcccaggcagtagaggaaccatccatatgctgaagcttctactaggatcccagttttgccgcagataattaatggacaactgtagtgcagtgatcctttacaggtttatttctttgtaaaaaaaaataataataatttgaatcatgtaatatttaaggttatactatgcctatttgaaaatgatattagttatcaactttgcagtttgaaaaacatgtattgtgtgtaaaggttaaataacaaaactatgcagatgctcttaaaagcattgataacctttgtgacgaacataaagagatccttaaattatgagttgttggcttatcttcataaataatttgtctgtaaaatggatgaaatgaaaagaggttcaattaaaacctacttttttctagtgctaaagaaaagatttaagcaccttgtcaagctgggtaaataggaaaaatacataatcatgctcagatatgtatctaggataattataattaataataatcatagtaacaatggctaatgataatttagctttattatatgtgctaagcactctggttttacatgcattatcttcttttgttcttgctacaaccctgtgagatagtagtattatctcattttactgatgaagactgaagcctaggtatattaaatagcttgcccaaggccacacagcaaaagtcaccaactcaaacctacttcttatttactccaaagcctgttgttcttaactgcaacatattatttcgtctcattaatgttgattctataggttgttacttctaaaaattagtattgagtttaatggtgaacacatttttctattttctcttgaatctgcttctataatgtcatggtgatttatgtggcttttttttttttataagttatacatgtatgcatgtatacttatgagacctcccttggaatgagggaggtctcaagagatataatttagattctcattgatgttctgtattcattatcctaacaccatctgtagtgttaaatcaactaaattatttcagcaataggagacaaaacaaccagctttcataatttttaattgtcaaaaccaaaaggaatcagaataaggatcactgagaattt

SEQ ID NO: 157655 - DNA, 563 bp, Homo sapiens
  Payload ID: 10895
  Gene Symbol: NDUFS1
  Gene Name: NADH dehydrogenase (ubiquinone) Fe-S protein 1, 75kDa (NADH-coenzyme Q reductase)
  ENST ID: ENST00000456284
  CDS Start-End: 90-365
atattgaataagcgacccggcctcctagggggtcgtcgtggtccagacagtttagcagaacagcctccgcggctccggggagaagcaatatgttaaggatacctgtaagaaaggccttagtaggcctttctaagtctcctaaaggatgtgttcgaacaactgccacagcagcaagcaacttgattgaagtatttgttgatggtcagtctgtcatggtggaaccgggaacgaccgtcctccaagcttgtgagaaggttggcatgcagatccctcgattctgttatcatgaaaggttgtctgttgctggaaactgcaggatgtgccttgttgaaattgagaaagcccctaaggtacttgatacctaaaattctacaccatgctgtagaaggttgtagctgcttgtgccatgccagtaatgaagggttggaatatcctaacaaactcagaaaaatccaaaaaagccagggaaggtgtgatggagttcttattagcaaatcacccattggactgtcctatttgtgaccagggaggtgaatgtgatctgcaggaccagtccatgatgt

SEQ ID NO: 157656 - DNA, 2631 bp, Homo sapiens
  Payload ID: 10895
  Gene Symbol: NDUFS1
  Gene Name: NADH dehydrogenase (ubiquinone) Fe-S protein 1, 75kDa (NADH-coenzyme Q reductase)
  Uniprot ID: P28331
  ENST ID: ENST00000423725
  CDS Start-End: 253-2265
gacaaacttgtcgaatgcaaggattctagtccctccgggctttccgttctccaggcccggctgacagagttagccgaggccgccatattgaataagcgacccggcctcctagggggtcgtcgtggtccagacagtttagcagaacagcctccgcggctccggggagaagcaatatgttaaggatacctgtaagaaaggccttagtaggcctttctaagtctcctaaaggatgtggcttgtgagaaggttggcatgcagatccctcgattctgttatcatgaaaggttgtctgttgctggaaactgcaggatgtgccttgttgaaattgagaaagcccctaaggttgtagctgcttgtgccatgccagtaatgaagggttggaatatcctaacaaactcagaaaaatccaaaaaagccagggaaggtgtgatggagttcttattagcaaatcacccattggactgtcctatttgtgaccagggaggtgaatgtgatctgcaggaccagtccatgatgtttggaaatgataggagccgatttttagaggggaagcgtgctgtggaagacaagaacattgggccattggtaaagaccatcatgacaagatgtatacagtgtactcgctgcatcaggtttgcaagtgagattgcaggagtagatgatttgggaacaacaggcagaggaaatgatatgcaagttggcacatacattgaaaagatgttcatgtctgaactgtctgggaatatcattgatatctgccctgtaggtgccctaacctctaagccctatgcctttactgcccggccttgggaaacaagaaagacagaatccattgatgtaatggatgcggttggaagtaatattgtggttagcacaagaactggagaagtgatgaggattttgccacgtatgcatgaggacatcaatgaagagtggatctctgataaaaccagatttgcctatgatgggctaaaacgtcaaagacttaccgagccaatggtcagaaatgaaaaagggcttttaacctatacttcttgggaggatgcgctctctcgcgtagctggaatgttgcagagttttcaaggcaaagatgtggcagcaattgcaggtggcttggtggatgctgaagccctggtagctctcaaagatttgcttaatagagtggactctgacaccttatgcactgaagaggtcttccccactgcaggagctggcacagatttgcgttccaattatcttcttaatactacaattgctggtgtggaagaggcagatgttgttcttctggttggtacaaacccacgttttgaggcaccactgtttaatgctagaattcgaaagagctggctgcataatgacttaaaagtggcccttataggcagtccagtggacctcacttacacatatgaccacctgggagactcccccaaaattcttcaagacattgcttcgggaagccatccatttagccaggtcctaaaggaagctaaaaaaccaatggtggttttaggcagttctgcactccaaagaaatgatggagcagcaattcttgcagctgtttctagcattgcacaaaagattcggatgactagtggtgttactggtgattggaaagttatgaatatccttcataggattgcaagtcaagtagctgctttggaccttggctataagcctggggtggaagcaattcggaagaaccctcccaaggtgctgtttctcctgggagcagatggaggttgtatcacacgacaggatttgccaaaggattgtttcattatttatcaaggacatcatggtgatgttggggctcccatagctgatgttattctcccaggagctgcttacacagagaagtctgctacatatgtcaacactgagggtagagctcagcagactaaggtagcagtgacacctcctggcttggcaagagaagactggaaaattataagagcactctctgagattgctggaatgactcttccatatgatactctggatcaagtaaggaacagattggaagaagtctctcctaatcttgttcgatatgatgatattgaaggggctaattacttccagcaagcaaatgagctctcaaagctagtgaaccagcagcttcttgctgacccacttgttccacctcagctaactataaaagacttctacatgacagattcaattagcagagcctcacagacaatggccaaatgtgtcaaagctgtcacagagggtgcccaggcagtagaggaaccatccatatgctgaagcttctactaggatcccagttttgccgcagataattaatggacaactgtagtgcagtgatcctttacaggtttatttctttgtaaaaaaaaataataataatttgaatcatgtaatatttaaggttatactatgcctatttgaaaatgatattagttatcaactttgcagtttgaaaaacatgtattgtgtgtaaaggttaaataacaaaactatgcagatgctcttaaaagcattgataacctttgtgacgaacataaagagatccttaaattatgagttgttggcttatcttcataaataatttgtctgtaaaatggatgaaatgaaaagaggttcaattaaaacctacttttttctagtgct

SEQ ID NO: 157657 - DNA, 2371 bp, Homo sapiens
  Payload ID: 10895
  Gene Symbol: NDUFS1
  Gene Name: NADH dehydrogenase (ubiquinone) Fe-S protein 1, 75kDa (NADH-coenzyme Q reductase)
  Uniprot ID: P28331
  ENST ID: ENST00000449699
  CDS Start-End: 104-2287
gagagccggcagatggggggcttttagccacggtctctggtctgatgaagcagaaaagaagatgaggatcagggggtcctcgggaacgctgtcacgaatcaatatgttaaggatacctgtaagaaaggccttagtaggcctttctaagtctcctaaaggatgtgttcgaacaactgccacagcagcaagcaacttgattgaagtatttgttgatggtcagtctgtcatggtggaaccgggaacgaccgtcctccaagcttgtgagaaggttggcatgcagatccctcgattctgttatcatgaaaggttgtctgttgctggaaactgcaggatgtgccttgttgaaattgagaaagcccctaaggttgtagctgcttgtgccatgccagtaatgaagggttggaatatcctaacaaactcagaaaaatccaaaaaagccagggaaggtgtgatggagttcttattagcaaatcacccattggactgtcctatttgtgaccagggaggtgaatgtgatctgcaggaccagtccatgatgtttggaaatgataggagccgatttttagaggggaagcgtgctgtggaagacaagaacattgggccattggtaaagaccatcatgacaagatgtatacagtgtactcgctgcatcaggtttgcaagtgagattgcaggagtagatgatttgggaacaacaggcagaggaaatgatatgcaagttggcacatacattgaaaagatgttcatgtctgaactgtctgggaatatcattgatatctgccctgtaggtgccctaacctctaagccctatgcctttactgcccggccttgggaaacaagaaagacagaatccattgatgtaatggatgcggttggaagtaatattgtggttagcacaagaactggagaagtgatgaggattttgccacgtatgcatgaggacatcaatgaagagtggatctctgataaaaccagatttgcctatgatgggctaaaacgtcaaagacttaccgagccaatggtcagaaatgaaaaagggcttttaacctatacttcttgggaggatgcgctctctcgcgtagctggaatgttgcagagttttcaaggcaaagatgtggcagcaattgcaggtggcttggtggatgctgaagccctggtagctctcaaagatttgcttaatagagtggactctgacaccttatgcactgaagaggtcttccccactgcaggagctggcacagatttgcgttccaattatcttcttaatactacaattgctggtgtggaagaggcagatgttgttcttctggttggtacaaacccacgttttgaggcaccactgtttaatgctagaattcgaaagagctggctgcataatgacttaaaagtggcccttataggcagtccagtggacctcacttacacatatgaccacctgggagactcccccaaaattcttcaagacattgcttcgggaagccatccatttagccaggtcctaaaggaagctaaaaaaccaatggtggttttaggcagttctgcactccaaagaaatgatggagcagcaattcttgcagctgtttctagcattgcacaaaagattcggatgactagtggtgttactggtgattggaaagttatgaatatccttcataggattgcaagtcaagtagctgctttggaccttggctataagcctggggtggaagcaattcggaagaaccctcccaaggtgctgtttctcctgggagcagatggaggttgtatcacacgacaggatttgccaaaggattgtttcattatttatcaaggacatcatggtgatgttggggctcccatagctgatgttattctcccaggagctgcttacacagagaagtctgctacatatgtcaacactgagggtagagctcagcagactaaggtagcagtgacacctcctggcttggcaagagaagactggaaaattataagagcactctctgagattgctggaatgactcttccatatgatactctggatcaagtaaggaacagattggaagaagtctctcctaatcttgttcgatatgatgatattgaaggggctaattacttccagcaagcaaatgagctctcaaagctagtgaaccagcagcttcttgctgacccacttgttccacctcagctaactataaaagacttctacatgacagattcaattagcagagcctcacagacaatggccaaatgtgtcaaagctgtcacagagggtgcccaggcagtagaggaaccatccatatgctgaagcttctactaggatcccagttttgccgcagataattaatggacaactgtagtgcagtgatcctttacaggtttatttctttgt

SEQ ID NO: 157658 - DNA, 2171 bp, Homo sapiens
  Payload ID: 10895
  Gene Symbol: NDUFS1
  Gene Name: NADH dehydrogenase (ubiquinone) Fe-S protein 1, 75kDa (NADH-coenzyme Q reductase)
  ENST ID: ENST00000457011
  CDS Start-End: 96-1931
atattgaataagcgacccggcctcctagggggtcgtcgtggtccagacagtttagcagaacagcctccgcggctccggggagaagggaaggtgtgatggagttcttattagcaaatcacccattggactgtcctatttgtgaccagggaggtgaatgtgatctgcaggaccagtccatgatgtttggaaatgataggagccgatttttagaggggaagcgtgctgtggaagacaagaacattgggccattggtaaagaccatcatgacaagatgtatacagtgtactcgctgcatcaggtttgcaagtgagattgcaggagtagatgatttgggaacaacaggcagaggaaatgatatgcaagttggcacatacattgaaaagatgttcatgtctgaactgtctgggaatatcattgatatctgccctgtaggtgccctaacctctaagccctatgcctttactgcccggccttgggaaacaagaaagacagaatccattgatgtaatggatgcggttggaagtaatattgtggttagcacaagaactggagaagtgatgaggattttgccacgtatgcatgaggacatcaatgaagagtggatctctgataaaaccagatttgcctatgatgggctaaaacgtcaaagacttaccgagccaatggtcagaaatgaaaaagggcttttaacctatacttcttgggaggatgcgctctctcgcgtagctggaatgttgcagagttttcaaggcaaagatgtggcagcaattgcaggtggcttggtggatgctgaagccctggtagctctcaaagatttgcttaatagagtggactctgacaccttatgcactgaagaggtcttccccactgcaggagctggcacagatttgcgttccaattatcttcttaatactacaattgctggtgtggaagaggcagatgttgttcttctggttggtacaaacccacgttttgaggcaccactgtttaatgctagaattcgaaagagctggctgcataatgacttaaaagtggcccttataggcagtccagtggacctcacttacacatatgaccacctgggagactcccccaaaattcttcaagacattgcttcgggaagccatccatttagccaggtcctaaaggaagctaaaaaaccaatggtggttttaggcagttctgcactccaaagaaatgatggagcagcaattcttgcagctgtttctagcattgcacaaaagattcggatgactagtggtgttactggtgattggaaagttatgaatatccttcataggattgcaagtcaagtagctgctttggaccttggctataagcctggggtggaagcaattcggaagaaccctcccaaggtgctgtttctcctgggagcagatggaggttgtatcacacgacaggatttgccaaaggattgtttcattatttatcaaggacatcatggtgatgttggggctcccatagctgatgttattctcccaggagctgcttacacagagaagtctgctacatatgtcaacactgagggtagagctcagcagactaaggtagcagtgacacctcctggcttggcaagagaagactggaaaattataagagcactctctgagattgctggaatgactcttccatatgatactctggatcaagtaaggaacagattggaagaagtctctcctaatcttgttcgatatgatgatattgaaggggctaattacttccagcaagcaaatgagctctcaaagctagtgaaccagcagcttcttgctgacccacttgttccacctcagctaactataaaagacttctacatgacagattcaattagcagagcctcacagacaatggccaaatgtgtcaaagctgtcacagagggtgcccaggcagtagaggaaccatccatatgctgaagcttctactaggatcccagttttgccgcagataattaatggacaactgtagtgcagtgatcctttacaggtttatttctttgtaaaaaaaaataataataatttgaatcatgtaatatttaaggttatactatgcctatttgaaaatgatattagttatcaactttgcagtttgaaaaacatgtattgtgtgtaaaggttaaataacaaaactatgcagatgctcttaaaagcattgat

SEQ ID NO: 157659 - DNA, 2080 bp, Homo sapiens
  Payload ID: 10895
  Gene Symbol: NDUFS1
  Gene Name: NADH dehydrogenase (ubiquinone) Fe-S protein 1, 75kDa (NADH-coenzyme Q reductase)
  Uniprot ID: P28331
  ENST ID: ENST00000432169
  CDS Start-End: 146-1996
atattgaataagcgacccggcctcctagggggtcgtcgtggtccagacagtttagcagaacagcctccgcggctccggggagaagcaatatgttaaggatacctgtaagaaaggccttagtaggcctttctaagtctcctaaaggatgtgggaaggtgtgatggagttcttattagcaaatcacccattggactgtcctatttgtgaccagggaggtgaatgtgatctgcaggaccagtccatgatgtttggaaatgataggagccgatttttagaggggaagcgtgctgtggaagacaagaacattgggccattggtaaagaccatcatgacaagatgtatacagtgtactcgctgcatcaggtttgcaagtgagattgcaggagtagatgatttgggaacaacaggcagaggaaatgatatgcaagttggcacatacattgaaaagatgttcatgtctgaactgtctgggaatatcattgatatctgccctgtaggtgccctaacctctaagccctatgcctttactgcccggccttgggaaacaagaaagacagaatccattgatgtaatggatgcggttggaagtaatattgtggttagcacaagaactggagaagtgatgaggattttgccacgtatgcatgaggacatcaatgaagagtggatctctgataaaaccagatttgcctatgatgggctaaaacgtcaaagacttaccgagccaatggtcagaaatgaaaaagggcttttaacctatacttcttgggaggatgcgctctctcgcgtagctggaatgttgcagagttttcaaggcaaagatgtggcagcaattgcaggtggcttggtggatgctgaagccctggtagctctcaaagatttgcttaatagagtggactctgacaccttatgcactgaagaggtcttccccactgcaggagctggcacagatttgcgttccaattatcttcttaatactacaattgctggtgtggaagaggcagatgttgttcttctggttggtacaaacccacgttttgaggcaccactgtttaatgctagaattcgaaagagctggctgcataatgacttaaaagtggcccttataggcagtccagtggacctcacttacacatatgaccacctgggagactcccccaaaattcttcaagacattgcttcgggaagccatccatttagccaggtcctaaaggaagctaaaaaaccaatggtggttttaggcagttctgcactccaaagaaatgatggagcagcaattcttgcagctgtttctagcattgcacaaaagattcggatgactagtggtgttactggtgattggaaagttatgaatatccttcataggattgcaagtcaagtagctgctttggaccttggctataagcctggggtggaagcaattcggaagaaccctcccaaggtgctgtttctcctgggagcagatggaggttgtatcacacgacaggatttgccaaaggattgtttcattatttatcaaggacatcatggtgatgttggggctcccatagctgatgttattctcccaggagctgcttacacagagaagtctgctacatatgtcaacactgagggtagagctcagcagactaaggtagcagtgacacctcctggcttggcaagagaagactggaaaattataagagcactctctgagattgctggaatgactcttccatatgatactctggatcaagtaaggaacagattggaagaagtctctcctaatcttgttcgatatgatgatattgaaggggctaattacttccagcaagcaaatgagctctcaaagctagtgaaccagcagcttcttgctgacccacttgttccacctcagctaactataaaagacttctacatgacagattcaattagcagagcctcacagacaatggccaaatgtgtcaaagctgtcacagagggtgcccaggcagtagaggaaccatccatatgctgaagcttctactaggatcccagttttgccgcagataattaatggacaactgtagtgcagtgatcctttacaggtttatttctttgt

SEQ ID NO: 157660 - DNA, 2394 bp, Homo sapiens
  Payload ID: 10895
  Gene Symbol: NDUFS1
  Gene Name: NADH dehydrogenase (ubiquinone) Fe-S protein 1, 75kDa (NADH-coenzyme Q reductase)
  Uniprot ID: P28331
  ENST ID: ENST00000440274
  CDS Start-End: 90-2165
atattgaataagcgacccggcctcctagggggtcgtcgtggtccagacagtttagcagaacagcctccgcggctccggggagaagcaatatgttaaggatacctgtaagaaaggccttagtaggcctttctaagtctcctaaaggatgtgttcgaacaactgccacagcagcaagcaacttgattgaagtatttgttgatggtcagtctgtcatggtggaaccgggaacgaccgtcctccaagttgtagctgcttgtgccatgccagtaatgaagggttggaatatcctaacaaactcagaaaaatccaaaaaagccagggaaggtgtgatggagttcttattagcaaatcacccattggactgtcctatttgtgaccagggaggtgaatgtgatctgcaggaccagtccatgatgtttggaaatgataggagccgatttttagaggggaagcgtgctgtggaagacaagaacattgggccattggtaaagaccatcatgacaagatgtatacagtgtactcgctgcatcaggtttgcaagtgagattgcaggagtagatgatttgggaacaacaggcagaggaaatgatatgcaagttggcacatacattgaaaagatgttcatgtctgaactgtctgggaatatcattgatatctgccctgtaggtgccctaacctctaagccctatgcctttactgcccggccttgggaaacaagaaagacagaatccattgatgtaatggatgcggttggaagtaatattgtggttagcacaagaactggagaagtgatgaggattttgccacgtatgcatgaggacatcaatgaagagtggatctctgataaaaccagatttgcctatgatgggctaaaacgtcaaagacttaccgagccaatggtcagaaatgaaaaagggcttttaacctatacttcttgggaggatgcgctctctcgcgtagctggaatgttgcagagttttcaaggcaaagatgtggcagcaattgcaggtggcttggtggatgctgaagccctggtagctctcaaagatttgcttaatagagtggactctgacaccttatgcactgaagaggtcttccccactgcaggagctggcacagatttgcgttccaattatcttcttaatactacaattgctggtgtggaagaggcagatgttgttcttctggttggtacaaacccacgttttgaggcaccactgtttaatgctagaattcgaaagagctggctgcataatgacttaaaagtggcccttataggcagtccagtggacctcacttacacatatgaccacctgggagactcccccaaaattcttcaagacattgcttcgggaagccatccatttagccaggtcctaaaggaagctaaaaaaccaatggtggttttaggcagttctgcactccaaagaaatgatggagcagcaattcttgcagctgtttctagcattgcacaaaagattcggatgactagtggtgttactggtgattggaaagttatgaatatccttcataggattgcaagtcaagtagctgctttggaccttggctataagcctggggtggaagcaattcggaagaaccctcccaaggtgctgtttctcctgggagcagatggaggttgtatcacacgacaggatttgccaaaggattgtttcattatttatcaaggacatcatggtgatgttggggctcccatagctgatgttattctcccaggagctgcttacacagagaagtctgctacatatgtcaacactgagggtagagctcagcagactaaggtagcagtgacacctcctggcttggcaagagaagactggaaaattataagagcactctctgagattgctggaatgactcttccatatgatactctggatcaagtaaggaacagattggaagaagtctctcctaatcttgttcgatatgatgatattgaaggggctaattacttccagcaagcaaatgagctctcaaagctagtgaaccagcagcttcttgctgacccacttgttccacctcagctaactataaaagacttctacatgacagattcaattagcagagcctcacagacaatggccaaatgtgtcaaagctgtcacagagggtgcccaggcagtagaggaaccatccatatgctgaagcttctactaggatcccagttttgccgcagataattaatggacaactgtagtgcagtgatcctttacaggtttatttctttgtaaaaaaaaataataataatttgaatcatgtaatatttaaggttatactatgcctatttgaaaatgatattagttatcaactttgcagtttgaaaaacatgtattgtgtgtaaaggttaaataacaaaactatgcagatgctctta

SEQ ID NO: 157661 - DNA, 2042 bp, Homo sapiens
  Payload ID: 10896
  Gene Symbol: NDUFS2
  Gene Name: NADH dehydrogenase (ubiquinone) Fe-S protein 2, 49kDa (NADH-coenzyme Q reductase)
  Uniprot ID: O75306
  ENST ID: ENST00000367993
  CDS Start-End: 449-1840
gccccaggagaggcagagagtgagggaaagggcctggccggcatgcacagataggatcacggtcctgggagaattcctgctcttatagtctaacctaccatggcttctcttttctcaaggctccctcatgctgccctttggccctagtggctggtttccagggctgaggggactgagtgagctgcctgagaaaagagggtagggaacagaaaagccagccaggagctgtgggaggaaacgccctcagtaaagatgaccgcggtcactgttatctaaacgcaagtgaagccgagtcacaggacccggatgttgtcagttcgacggtaaacgaccctgccagcttccaagagggcggcttcactgtgcgaataggtgagaagccaagaaggaggcgcgctggagttacttccgcccggttctccttcccgcagtctgcagccggagtaagatggcggcgctgagggctttgtgcggcttccggggcgtcgcggcccaggtgctgcggcctggggctggagtccgattgccgattcagcccagcagaggtgttcggcagtggcagccagatgtggaatgggcacagcagtttgggggagctgttatgtacccaagcaaagaaacagcccactggaagcctccaccttggaatgatgtggaccctccaaaggacacaattgtgaagaacattaccctgaactttgggccccaacacccagcagcgcatggtgtcctgcgactagtgatggaattgagtggggagatggtgcggaagtgtgatcctcacatcgggctcctgcaccgaggcactgagaagctcattgaatacaagacctatcttcaggcccttccatactttgaccggctagactatgtgtccatgatgtgtaacgaacaggcctattctctagctgtggagaagttgctaaacatccggcctcctcctcgggcacagtggatccgagtgctgtttggagaaatcacacgtttgttgaaccacatcatggctgtgaccacacatgccctggaccttggggccatgacccctttcttctggctgtttgaagaaagggagaagatgtttgagttctacgagcgagtgtctggagcccgaatgcatgctgcttatatccggccaggaggagtgcaccaggacctaccccttgggcttatggatgacatttatcagttttctaagaacttctctcttcggcttgatgagttggaggagttgctgaccaacaataggatctggcgaaatcggacaattgacattggggttgtaacagcagaagaagcacttaactatggttttagtggagtgatgcttcggggctcaggcatccagtgggacctgcggaagacccagccctatgatgtttacgaccaggttgagtttgatgttcctgttggttctcgaggggactgctatgataggtacctgtgccgggtggaggagatgcgccagtccctgagaattatcgcacagtgtctaaacaagatgcctcctggggagatcaaggttgatgatgccaaagtgtctccacctaagcgagcagagatgaagacttccatggagtcactgattcatcactttaagttgtatactgagggctaccaagttcctccaggagccacatatactgccattgaggctcccaagggagagtttggggtgtacctggtgtctgatggcagcagccgcccttatcgatgcaagatcaaggctcctggttttgcccatctggctggtttggacaagatgtctaagggacacatgttggcagatgtcgttgccatcataggtacccaagatattgtatttggagaagtagatcggtgagcaggggagcagcgtttgatcccccctgcctatcagcttcttctgtggagcctgttcctcactggaaattggcctctgtgtgtgtgtgtgtgtgtgtgtgtgtgtgtatgttcatgtacacttggctgtcaggctttctgtgcatgtactaaaaaaggagaaattataataaattagccgtcttgcggcccctaggcctaaa

SEQ ID NO: 157662 - DNA, 2064 bp, Homo sapiens
  Payload ID: 10896
  Gene Symbol: NDUFS2
  Gene Name: NADH dehydrogenase (ubiquinone) Fe-S protein 2, 49kDa (NADH-coenzyme Q reductase)
  Uniprot ID: O75306
  ENST ID: ENST00000392179
  CDS Start-End: 240-1613
aaaagccagccaggagctgtgggaggaaacgccctcagtaaagatgaccgcggtcactgttatctaaacgcaagtgaagccgagtcacaggacccggatgttgtcagttcgacggtaaacgaccctgccagcttccaagagggcggcttcactgtgcgaataggtgagaagccaagaaggaggcgcgctggagttacttccgcccggttctccttcccgcagtctgcagccggagtaagatggcggcgctgagggctttgtgcggcttccggggcgtcgcggcccaggtgctgcggcctggggctggagtccgattgccgattcagcccagcagaggtgttcggcagtggcagccagatgtggaatgggcacagcagtttgggggagctgttatgtacccaagcaaagaaacagcccactggaagcctccaccttggaatgatgtggaccctccaaaggacacaattgtgaagaacattaccctgaactttgggccccaacacccagcagcgcatggtgtcctgcgactagtgatggaattgagtggggagatggtgcggaagtgtgatcctcacatcgggctcctgcaccgaggcactgagaagctcattgaatacaagacctatcttcaggcccttccatactttgaccggctagactatgtgtccatgatgtgtaacgaacaggcctattctctagctgtggagaagttgctaaacatccggcctcctcctcgggcacagtggatccgagtgctgtttggagaaatcacacgtttgttgaaccacatcatggctgtgaccacacatgccctggaccttggggccatgacccctttcttctggctgtttgaagaaagggagaagatgtttgagttctacgagcgagtgtctggagcccgaatgcatgctgcttatatccggccaggaggagtgcaccaggacctaccccttgggcttatggatgacatttatcagttttctaagaacttctctcttcggcttgatgagttggaggagttgctgaccaacaataggatctggcgaaatcggacaattgacattggggttgtaacagcagaagaagcacttaactatggttttagtggagtgatgcttcggggctcaggcatccagtgggacctgcggaagacccagccctatgatgtttacgaccaggttgagtttgatgttcctgttggttctcgaggggactgctatgataggtacctgtgccgggtggaggagatgcgccagtccctgagaattatcgcacagtgtctaaacaagatgcctcctggggagatcaaggttgatgatgccaaagtgtctccacctaagcgagcagagatgaagacttccatggagtcactgattcatcactttaagttgtatactgagggctaccaagttcctccaggagccacatatactgccattgaggctcccaagggagagtttggggtgtacctggtgtctgatggcagcagccgcccttatcgatgcaagatcaaggctcctggttttgcccatctggctggtttggacaagatgtctaagggacacatgttggcagatgtcgttgccatcataggtacgaggcctattgtgtagtagaggtatcctagacaaaggagttcgggacgcccactggggacagaaggagaacacttcctgttcaccataggccatggcatggactcgggtcctcaatcttttgagcacagtaatgggttctggatcttgggtaacaccactttttttgtttgttttgcctcacaacaggaagataagtaacatcacttttttcctccatcctctcacctaggtacccaagatattgtatttggagaagtagatcggtgagcaggggagcagcgtttgatcccccctgcctatcagcttcttctgtggagcctgttcctcactggaaattggcctctgtgtgtgtgtgtgtgtgtgtgtgtgtgtgtatgttcatgtacacttggctgtcaggctttctgtgcatgtactaaaaaaggagaaattataataaattagccgtcttgcggcccctaggcct

SEQ ID NO: 157663 - DNA, 958 bp, Homo sapiens
  Payload ID: 10897
  Gene Symbol: NDUFS3
  Gene Name: NADH dehydrogenase (ubiquinone) Fe-S protein 3, 30kDa (NADH-coenzyme Q reductase)
  Uniprot ID: O75489
  ENST ID: ENST00000263774
  CDS Start-End: 83-877
acacttccgtttccggtccgtgcccttggggctccgtgtcctgctgtctttccgtccgctgcctagtctgcatctgagtaacatggcggcggcggcggtagccaggctgtggtggcgcgggatcttgggggcctcggcgctgaccagggggactgggcgaccctccgttctgttgctgccggtgaggcgggagagcgccggggccgacacgcgccccactgtcagaccacggaatgatgtggcccacaagcagctctcagcttttggagagtatgtggctgaaatcttgcccaagtatgtccaacaagttcaggtgtcctgcttcaatgagttagaggtctgtatccatcctgatggcgtcatcccagtgctgactttcctcagggatcacaccaatgcacagttcaaatctctggttgacttgacagcagtggacgtcccaactcggcaaaaccgttttgagattgtctacaacctgttgtctctgcgcttcaactcacggatccgtgtgaagacctacacagatgagctgacgcccattgagtctgctgtctctgtgttcaaggcagccaactggtatgaaagggagatctgggacatgtttggagtcttctttgctaaccaccctgatctaagaaggatcctgacagattatggcttcgagggacatcctttccggaaagactttcctctatctggctatgttgagttacgttatgatgatgaagtgaagcgggtggtggcagagccggtggagttggcccaagagttccgcaaatttgacctgaacagcccctgggaggctttcccagtctatcgccaacccccggagagtctcaagcttgaagccggagacaagaagcctgatgccaagtagctccagggaacgcatgtggatcctagacagcgccttatctatgattgagtgtccgtgtaaataaattcctacttagactta

SEQ ID NO: 157664 - DNA, 253 bp, Homo sapiens
  Payload ID: 10897
  Gene Symbol: NDUFS3
  Gene Name: NADH dehydrogenase (ubiquinone) Fe-S protein 3, 30kDa (NADH-coenzyme Q reductase)
  ENST ID: ENST00000530295
  CDS Start-End: 21-253
ctagtctgcatctgagtaacatggcggcggcggcggtagccaggctgtggtggcgcgggatcttgggggcctcggcgctgaccagggccactgtcagaccacggaatgatgtggcccacaagcagctctcagcttttggagagtatgtggctgaaatcttgcccaagtatgtccaacaagttcaggtgtcctgcttcaatgagttagaggtctgtatccatcctgatggcgtcatcccagtgctgactttcct

SEQ ID NO: 157665 - DNA, 561 bp, Homo sapiens
  Payload ID: 10897
  Gene Symbol: NDUFS3
  Gene Name: NADH dehydrogenase (ubiquinone) Fe-S protein 3, 30kDa (NADH-coenzyme Q reductase)
  ENST ID: ENST00000528192
  CDS Start-End: 53-538
gctccgtgtcctgctgtctttccgtccgctgcctagtctgcatctgagtaacatggcggcggcggcggtagccaggctgtggtggcgcgggatcttgggggcctcggcgctgaccagggggactgggcgaccctccgttctgttgctgccggtgaggcgggagagcgccggggccgacacgcgccccactgtcagaccacggaatgatgtggcccacaagcagctctcagcttttggagagtatgtggctgaaatcttgcccaagtatgtccaacaagttcaggtgtcctgcttcaatgagttagaggtctgtatccatcctgatggcgtcatcccagtgctgactttcctcagggatcacaccaatgcacagttcaaatctctggttgacttgacagcagtggacgtcccaactcggcaaaaccgttttgagacggaatcttgctctgtcgccaggctggagtgcagtggcatgatcttggctcactgcaacctccgtctcccaggttcaagcgattcccctgcctcagccccttgagtagctgggactacaggtgcatg

SEQ ID NO: 157666 - DNA, 583 bp, Homo sapiens
  Payload ID: 10897
  Gene Symbol: NDUFS3
  Gene Name: NADH dehydrogenase (ubiquinone) Fe-S protein 3, 30kDa (NADH-coenzyme Q reductase)
  ENST ID: ENST00000534208
  CDS Start-End: 21-386
ctagtctgcatctgagtaacatggcggcggcggcggtagccaggctgtggtggcgcgggatcttgggggcctcggcgctgaccagggggactgggcgaccctccgttctgttgctgccggtgaggcgggagagcgccggggccgacacgcgccccactgtcagaccacggaatgatgtggcccacaagcagctctcagcttttggagagtatgtggctgaaatcttgcccaagtatgtccaacaagttcaggtaatacttactaatgttatttgggtctgggtcaagaaagaaccatgttcgcagggcatgtgggagtgggcagacttgtttcaaagaaactacagattcctccatcccaagcttggacttttctctcagcattaaaccaggtgactccagctgaagttagctgttccctcagtagctctttgttccctctcccctcactttcatgtgtgcaggtgtcctgcttcaatgagttagaggtctgtatccatcctgatggcgtcatcccagtgctgactttcctcagggatcacaccaatgcacagttcaaatctctggttgacttgacagcagtg

SEQ ID NO: 157667 - DNA, 558 bp, Homo sapiens
  Payload ID: 10897
  Gene Symbol: NDUFS3
  Gene Name: NADH dehydrogenase (ubiquinone) Fe-S protein 3, 30kDa (NADH-coenzyme Q reductase)
  ENST ID: ENST00000529276
  CDS Start-End: 64-267
gtgcccttggggctccgtgtcctgctgtctttccgtccgctgcctagtctgcatctgagtaacatggcggcggcggcggtagccaggctgtggtggcgcgggatcttgggggcctcggcgctgaccagggggactgggcgaccctccgttctgttgctgccggtgaggcgggagagcgccggggccgacacgcgccgtgagtatgtgcgggcagcgctcttctctgaactatcggcggggccccttagatgcctgtccttgccctaggatgcccttccctacgtcctcctggcaaatcttggagatctgacttgcagtggtcttcaccctgcatgcagaatcgagccctccctgtgcccttaggcctgttatggccctgattgttccttgtccatttcaatcatcccctttttgtctgattaaactgtcagctctttgaaagcaagcaatataacctttaggcctcagagccctgtaataatagtacctagcgttaattgagtgcttaatgtgtgcctggaacctcgctaagcgttttagtgaatgatcttatttcgt

SEQ ID NO: 157668 - DNA, 1263 bp, Homo sapiens
  Payload ID: 10897
  Gene Symbol: NDUFS3
  Gene Name: NADH dehydrogenase (ubiquinone) Fe-S protein 3, 30kDa (NADH-coenzyme Q reductase)
  Uniprot ID: O75489
  ENST ID: ENST00000534716
  CDS Start-End: 19-417
agtctgcatctgagtaacatggcggcggcggcggtagccaggctgtggtggcgcgggatcttgggggcctcggcgctgaccagggggactgggcgaccctccgttctgttgctgccggtgaggcgggagagcgccggggccgacacgcgccccactgtcagaccacggaatgatgtggcccacaagcagctctcagcttttggagagtatgtggctgaaatcttgcccaagtatgtccaacaagttcaggtgtcctgcttcaatgagttagaggtctgtatccatcctgatggcgtcatcccagtgctgactttcctcagggatcacaccaatgcacagttcaaatctctggttgacttgacagcagtggacgtcccaactcggcaaaaccgttttgaggtcagttgggagatctgagaaggttttgggggtaaggatattaatttcagtttgtaacatacaatagaacacagcagttaaactggaacttcagagtcaagtagatctgaagttggatcttggttctgccactaaatggctgtgggacctcagataactcaaatattttgtttaattttttttttttttagacggaatcttgctctgtcgccaggctggagtgcagtggcatgatcttggctcactgcaacctccgtctcccaggttcaagcgattcccctgcctcagccccttgagtagctgggactacaggtgcatgccaccacgcccggctaattttttgtatttttttagtgaagactgggtttcaccatgttggccaggatggtctcaatttcctgacctcgtgatctgcctgccttggcctcccaaagtgctgggattacaggcatgagccaccatgcccggcccttgtttaatctttctgagctttcattttcttaccgggaaaataaatataaagctgtccttatcttatagaatggttataaggatccaatgagatagttcaagtaaattgcttgcacacagtgttttcaatacatttagctattaatattttactgattatctactgtttgccagactctgggatggagagagaaataacatgaagtatttgtcctccaggagtcccctacactctagtgaaggagaaagacacctaaacagcttactgtagtaacatataatacaaaggatattagagggatgctttaagaaagcaggaggggcacttggccctgtctgggaggcttctttgaaaagagagaatgtttgtgctgaatctaaaatatgagtagg

SEQ ID NO: 157669 - DNA, 675 bp, Homo sapiens
  Payload ID: 10898
  Gene Symbol: NDUFS4
  Gene Name: NADH dehydrogenase (ubiquinone) Fe-S protein 4, 18kDa (NADH-coenzyme Q reductase)
  Uniprot ID: O43181
  ENST ID: ENST00000296684
  CDS Start-End: 29-556
tttcatcctggcgtttgcctgcagcaagatggcggcggtgtcaatgtcagtggtactgaggcagacgttgtggcggagaagggcagtggctgtagctgccctttccgtttccagggttccgaccaggtcgttgaggacttccacatggagattggcacaggaccagactcaagacacacaactcataacagttgatgaaaaattggatatcactactttaactggagttccagaagagcatataaaaactagaaaagtcaggatctttgttcctgctcgcaataacatgcagtctggagtaaacaacacaaagaaatggaagatggagtttgataccagagagcgatgggaaaatcctttgatgggttgggcatcaacggctgatcccttatccaacatggttctaaccttcagtactaaagaagatgcagtttcctttgcagaaaaaaatggatggagctatgacattgaagagaggaaggttccaaaacccaagtccaagtcttatggtgcaaacttttcttggaacaaaagaacaagagtatccacaaaataggttggcactgactatatctctgcttgactgtgaataaagtcagctgtgcagtatttatagtccatgtataataaatacatctcttaatctcctaataaattggacctttaaactacaga

SEQ ID NO: 157670 - DNA, 562 bp, Homo sapiens
  Payload ID: 10898
  Gene Symbol: NDUFS4
  Gene Name: NADH dehydrogenase (ubiquinone) Fe-S protein 4, 18kDa (NADH-coenzyme Q reductase)
  ENST ID: ENST00000502423
  CDS Start-End: 29-250
tttcatcctggcgtttgcctgcagcaagatggcggcggtgtcaatgtcagtggtactgaggcagacgttgtggcggagaagggcagtggctgtagctgccctttccgtttccagggttccgaccaggtcgttgaggacttccacatggagattggcacaggaccagactcaagacacacaactcataacagttgatgaaaaattggcatttggagttcctgttcactctacctggatgcattttaactaatcctgaggacttcatccggtcaccatctacctattcttcaaatggatatcactactttaactggagttccagaagagcatataaaaactagaaaagtcaggatctttgttcctgctcgcaataacatgcagtctggagtaaacaacacaaagaaatggaagatggagtttgataccagagagcgatgggaaaatcctttgatgggttgggcatcaacggctgatcccttatccaacatggttctaaccttcagtactaaagaagatgcagtttcctttgcagaaaaaaatggatggagctatgacattgaag

SEQ ID NO: 157671 - DNA, 559 bp, Homo sapiens
  Payload ID: 10898
  Gene Symbol: NDUFS4
  Gene Name: NADH dehydrogenase (ubiquinone) Fe-S protein 4, 18kDa (NADH-coenzyme Q reductase)
  ENST ID: ENST00000506765
  CDS Start-End: 1-351
tcaatgtcagtggtactgaggcagacgttgtggcggagaagggcagtggctgtagctgccctttccgtttccagggttccgaccaggtcgttgaggacttccacatggagattggcacaggaccagactcaagacacacaactcataacagttgatgaaaaattggatatcactactttaactggagttccagaagagcatataaaaactagaaaagtcaggatctttgttcctgctcgcaataacatgcagtctggagtaaacaacacaaagaaatggaagatggagtttgataccagagagcgatgggaaaatcctttgatgggttgggcatcaacgatggagctatgacattgaagagaggaaggttccaaaacccaagtccaagtcttatggtgcaaacttttcttggaacaaaagaacaagagtatccacaaaataggttggcactgactatatctctgcttgactgtgaataaagtcagctgtgcagtatttatagtccatgtataataaatacatctcttaatctcctaataaattggacctttaaactaca

SEQ ID NO: 157672 - DNA, 680 bp, Homo sapiens
  Payload ID: 10898
  Gene Symbol: NDUFS4
  Gene Name: NADH dehydrogenase (ubiquinone) Fe-S protein 4, 18kDa (NADH-coenzyme Q reductase)
  ENST ID: ENST00000507026
  CDS Start-End: 31-180
cctttcatcctggcgtttgcctgcagcaagatggcggcggtgtcaatgtcagtggtactgaggcagacgttgtggcggagaagggcagtggctgtagctgccctttccgtttccagggttccgaccagagacagggccttgctctgtcatccaggctggagtgcagtggtgcaatcatagctcactacatccctgagctcctgggcttaagcagtcctcccacctcagcctcccaggcagctgcgactataggtcgttgaggacttccacatggagattggcacaggaccagactcaagacacacaactcataacagttgatgaaaaattggatatcactactttaactggagttccagaagagcatataaaaactagaaaagtcaggatctttgttcctgctcgcaataacatgcagtctggagtaaacaacacaaagaaatggaagatggagtttgataccagagagcgatgggaaaatcctttgatgggttgggcatcaacggctgatcccttatccaacatggttctaaccttcagtactaaagaagatgcagtttcctttgcagaaaaaaatggatggagctatgacattgaagagaggaaggttccaaaacccaagtccaagtcttatggtgcaaacttttcttggaacaaaagaacaagagtatccacaaaat

SEQ ID NO: 157673 - DNA, 833 bp, Homo sapiens
  Payload ID: 10898
  Gene Symbol: NDUFS4
  Gene Name: NADH dehydrogenase (ubiquinone) Fe-S protein 4, 18kDa (NADH-coenzyme Q reductase)
  ENST ID: ENST00000506974
  CDS Start-End: 17-412
gtttgcctgcagcaagatggcggcggtgtcaatgtcagtggtactgaggcagacgttgtggcggagaagggcagtggctgtagctgccctttccgtttccagggttccgaccaggtcgttgaggacttccacatggagattggcacaggaccagactcaagacacacaactcataacagttgatgaaaaattggtttatcttgtaccactgtgttttacattctgtggtctagccacaccaagcctggaacttgctactctttttcctgcttcaaggcatttggagttcctgttcactctacctggatgcattttaactaatcctgaggacttcatccggtcaccatctacctattcttcaaatggatatcactactttaactggagttccagaagagcatataaaaactagaaaagtcaggatctttgttcctgctcgcaataacatgcagtctggagtaaacaacacaaagaaatggaagatggagtttgataccagagagcgatgggaaaatcctttgatgggttgggcatcaacggctgatcccttatccaacatggttctaaccttcagtactaaagaagatgcagtttcctttgcagaaaaaaatggatggagctatgacattgaagagaggaaggttccaaaacccaagtccaagtcttatggtgcaaacttttcttggaacaaaagaacaagagtatccacaaaataggttggcactgactatatctctgcttgactgtgaataaagtcagctgtgcagtatttatagtccatgtataataaatacatctcttaatctcctaataaattggacctttaaactaca

SEQ ID NO: 157674 - DNA, 544 bp, Homo sapiens
  Payload ID: 10899
  Gene Symbol: NDUFS5
  Gene Name: NADH dehydrogenase (ubiquinone) Fe-S protein 5, 15kDa (NADH-coenzyme Q reductase)
  Uniprot ID: O43920
  ENST ID: ENST00000372967
  CDS Start-End: 84-404
atcctttacggcaggcgtccgcgtcgctagctagtcgttctgaagcggcggccagagaagagtcaagggcacgagcatcggccatgcctttcttggacatccagaaaaggttcggccttaacatagatcgatggttgacaatccagagtggtgaacagccctacaagatggctggtcgatgccatgcttttgaaaaagaatggatagaatgtgcacatggaatcggttatactcgggcagagaaagagtgcaagatagaatatgatgatttcgtagagtgtttgcttcggcagaaaacgatgagacgtgcaggtaccatcaggaagcagcgggataagctgataaaggaaggaaagtacacccctccacctcaccacattggcaagggggagcctcggccctgaacagagcagctgctgatgtctggaggctgattttcctgttctctgttctccactggaaaggttgtttacgacaaacctccttgtcaaagtgtgtaaaaataaaggattgctccatcctatttgttctattttctcttgga

SEQ ID NO: 157675 - DNA, 548 bp, Homo sapiens
  Payload ID: 10899
  Gene Symbol: NDUFS5
  Gene Name: NADH dehydrogenase (ubiquinone) Fe-S protein 5, 15kDa (NADH-coenzyme Q reductase)
  Uniprot ID: O43920
  ENST ID: ENST00000372969
  CDS Start-End: 88-408
atcctttacggcaggcgtccgcgtcgctagctagtcgttctgaagcggcggccagagaagagtcaagggcacgagcatcgggtagccatgcctttcttggacatccagaaaaggttcggccttaacatagatcgatggttgacaatccagagtggtgaacagccctacaagatggctggtcgatgccatgcttttgaaaaagaatggatagaatgtgcacatggaatcggttatactcgggcagagaaagagtgcaagatagaatatgatgatttcgtagagtgtttgcttcggcagaaaacgatgagacgtgcaggtaccatcaggaagcagcgggataagctgataaaggaaggaaagtacacccctccacctcaccacattggcaagggggagcctcggccctgaacagagcagctgctgatgtctggaggctgattttcctgttctctgttctccactggaaaggttgtttacgacaaacctccttgtcaaagtgtgtaaaaataaaggattgctccatcctatttgttctattttctcttgga

SEQ ID NO: 157676 - DNA, 1082 bp, Homo sapiens
  Payload ID: 10900
  Gene Symbol: NDUFS6
  Gene Name: NADH dehydrogenase (ubiquinone) Fe-S protein 6, 13kDa (NADH-coenzyme Q reductase)
  Uniprot ID: O75380
  ENST ID: ENST00000274137
  CDS Start-End: 19-393
aaaggccagcggcgcaaaatggcggcggcgatgaccttctgccggctgctgaaccggtgtggcgaggcggcgcggagcctgcccctgggcgccaggtgtttcggggtgcgggtctcgccgaccggggagaaggtcacgcacactggccaggtttatgatgataaagactacaggagaattcggtttgtaggtcgtcagaaagaggtgaatgaaaactttgccattgatttgatagcagagcagcccgtgagcgaggtggagactcgggtgatagcgtgcgatggcggcgggggagctcttggccacccaaaagtgtatataaacttggacaaagaaacaaaaaccggcacatgcggttactgtgggctccagttcagacagcaccaccactagagcgtgtggcacgccgggggtcccgcagcatcctgtgagcatttccgcggggaagctgagcacgtgaagctcgctggttctgtgcgaagggtattcctggtgctgaataaagggtgttgctgtcaaggctgacaatttgtaagtttgtttctttcatagtctgggctttggaagtgaacatccacgtggacatgggtagacatgcgagtggaagcagtgcccgctccagtgagcctgagctgcctcctgccggccgctgcctgccttaccggctgcttctgtgtgtctcctcttatccttggggccacgtgggctgcaggaatgggcggggggcagggaaggagaaggagaagtgcctcttgttttgcagatgcaactgtgcttcagagagccaaggtgggtcttgaggtgcatagtgaaggagggtgcccaggcctcaactggtcctatgggaaggtcagcctctctcctgttgctggcttgcagagctggtctatccgtccgtcctagtccctatgttgaaatgtcagatcttaaaacccaagaatttaagcactggtttgaaggcatcgaaagtcacatactggccacattaaggacagtctatgtttttaaaagagtaaggattataatgtagtgtaacataaaaataaaagtagattttgagggaagagaaaggagtcttgcta

SEQ ID NO: 157677 - DNA, 550 bp, Homo sapiens
  Payload ID: 10900
  Gene Symbol: NDUFS6
  Gene Name: NADH dehydrogenase (ubiquinone) Fe-S protein 6, 13kDa (NADH-coenzyme Q reductase)
  ENST ID: ENST00000469176
  CDS Start-End: 4-522
aaaatggcggcggcgatgaccttctgccggctgctgaaccggtgtggcgaggcggcgcggagcctgcccctgggcgccaggtgtttcggggtgcgggtctcgccgaccggggagaaggtcacgcacactggccaggtttatgatgataaagactacaggagaattcggtttgtaggtcgtcagaaagaggtgaatgaaaactttgccattgatttgatagcagagcagcccgtgagcgaggtggagactcgggtgatagcgtgcgatggcggcgggggagctcttggccacccaaaagtgtatataaacttggtgcgtagctggccacctgtgcacatgttagggcagcctgctcgtcctcatactccccttcactcccagtgcctgttctttctgtcctcttctctacctgctcccgaggcggcccttacggggttcacactgctggcacattcaccctacagcgccacactacagggcctacatagagccgcctgtccgaaaaccccctttcaactgtgaagtggtgggcggcatgtttctcttctcg

SEQ ID NO: 157678 - DNA, 1039 bp, Homo sapiens
  Payload ID: 10901
  Gene Symbol: NDUFS7
  Gene Name: NADH dehydrogenase (ubiquinone) Fe-S protein 7, 20kDa (NADH-coenzyme Q reductase)
  Uniprot ID: O75251
  ENST ID: ENST00000233627
  CDS Start-End: 297-938
gggacgcgtggtgacttttgccctcctggaataacaagaaaatgagtgtcgcctctgtttttgtcggtccgccgcagacccgcggcccccacgtgcgcactccgatgacctttccgcctcgggtgatctgggggtgcacggcgcaacacgaccacggaggccgaaagcgcagcggaacctcccggctccaggttccggtttccgcatgcgctccgagccgctttgggcggcggccccgggaacccggagcgctaaggagaacggacctcagaggttgtctgaaggccgaggccaagatggcggtgctgtcagctcctggcctgcgcggcttccggatccttggtctgcgctccagcgtgggcccggctgtgcaggcacgaggtgtccatcagagcgtggccaccgatggcccaagcagcacccagcctgccctgccaaaggccagagccgtggctcccaaacccagcagccggggcgagtatgtggtggccaagctggatgacctcgtcaactgggcccgccggagttctctgtggcccatgaccttcggcctggcctgctgcgccgtggagatgatgcacatggcagcaccccgctacgacatggaccgctttggcgtggtcttccgcgccagcccgcgccagtccgacgtcatgatcgtggccggcacactcaccaacaagatggccccagcgcttcgcaaggtctacgaccagatgccggagccgcgctacgtggtctccatggggagctgcgccaacggaggaggctactaccactattcctactcggtggtgaggggctgcgaccgcatcgtgcccgtggacatctacatcccaggctgcccacctacggccgaggccctgctctacggcatcctgcagctgcagaggaagatcaagcgggagcggaggctgcagatctggtaccgcaggtagcgccgccgccgccgccgccggagcctgtcgccgtcctgtccccagcctgcttgtgtcccgtgaggttgtcaataaacctgccctcgggctgccgcctccca

SEQ ID NO: 157679 - DNA, 2818 bp, Homo sapiens
  Payload ID: 10901
  Gene Symbol: NDUFS7
  Gene Name: NADH dehydrogenase (ubiquinone) Fe-S protein 7, 20kDa (NADH-coenzyme Q reductase)
  Uniprot ID: O75251
  ENST ID: ENST00000313408
  CDS Start-End: 24-644
gttgtctgaaggccgaggccaagatggcggtgctgtcagctcctggcctgcgcggcttccggatccttggtctgcgctccagcgtgggcccggctgtgcaggcacgaggtgtccatcagagcgtggccaccgatggcccaagcagcacccagcctgccctgccaaaggccagagccgtggctcccaaacccagcagccggggcgagtatgtggtggccaagctggatgacctcgtcaactgggcccgccggagttctctgtggcccatgaccttcggcctggcctgctgcgccgtggagatgatgcacatggcagcaccccgctacgacatggaccgctttggcgtggtcttccgcgccagcccgcgccagtccgacgtcatgatcgtggccggcacactcaccaacaagatggccccagcgcttcgcaaggtctacgaccagatgccggagccgcgctacgtggtctccatggggagctgcgccaacggaggaggctactaccactattcctactcggtggtgaggggctgcgaccgcatcgtgcccgtggacatctacatcccaggtagggccgggaccgcaccgcccacgagggagctggagacagggccagcgccacacggagcccggcggcccctgtgagggagtcccacacccccagcagacggcgggctcccccatcctatggatgggccgactcggagcgctgcctcttagtggagcctgtcccctgtgagaagtcggcgatgtattcaggcatcagagggatcagagggagcaggggaagctgagtggaattcctgacacacgcctggtttacagcagtttcatatggtcctacctggcacaaaccaaagacctgcagttagaaataccaagcgagaaggttcctgggggccaaggacactgtcccgcgccctcagccttacagaagggcacgcaggactccctgggacccggggtggccggatttggcaaatgaaaacgtgggaggcttagtttgactgtgaggttagggtgaatttgaccatcaggaaaactgttagtagtaattgtttagtacgagtatatcccaacaatatttgggctatactgacactaaaaagagcattggctgcatacctgaaattcacatcgcaccgggaacattctttatatctggtgatcccgtgggactcttgcacctcacgtggtcccacgagggccatccccccgggcgttcaccttgacagtggtccacggtaggcaggcttggaggtggcgctcatgtgggacaggggacagagtcctgttcttggccaccctgtgctgcgtgcggcattagctcatgcgcagagagcccagccctgagtcccgagtctgggggtttgggcaagcgagaggcacatcctggtgcctctcaaaagtggaggaacaggctctgactttggattccgcttccctggaaagggcgttgatttgttcagcgttctgcacggttcaggtcaccccgggggcagtggagagggcagcctgggcctccctgtgacttgacagcacagagaggtccatcctggggtcaggagctctgcccatgcccctggcgtcttcccctgcagtgcagaccaatggggcaagttgcgagtgtggactgtactcctccctccttgcagactgagctcctccctccctggggaccgcgctcctccctccctgcggactgtgctccctgtctggggactgcgctcctccctccttggggaccgtgctcctccctccctccctgcggaccgcgctcctccctccctggggaccgcgctcctccctccctgcggaccgcgctcggccctccctggggaccgcgcccctccctcccagcggaccgcgctcctccctccctggggacctcgctcctccctccctccctgcggactgtgctgctccctccctgcggactgtgcttctccctcccttggagcagcctggacttgccagagctctgccaggtggggcctggccgccctttcccaggccctgcagtggccttgtcctttctcacctgtttccactcctgctgtccccgttgggccctgggcttcgtcctcttgctcaagccctttgttctgaacctgcgtggcagccgggactgggggatccccagcaaagagctctggcttggggctcagaaagagggtcatcgggtcctcgtgggatgcccgggctctgggccacctcccctccctccgcccagcctccctgcctccatctccgtccagggcagccccgggccctgctccccactgctaagtgtgtctgctgagcgctggcccccattgagtcctgagggctggggccgggggccgggttagtgaggtcagcgtcttgtccgagaggtccctgtgacagcccgggatgagccacgggtggagggcagtggggccttgcccaggggaggaccccactcttcctgcagggacctcccctgcgccggctcccagtccctggcactgcgcccacccagggctgtcagcctccaccttcagaggccggcccgggaaacccttccaaagccgagccggctgcgctgtgcacgcggtcacgcgggctccggctgcgggaagcgagactgaggcaaggtccctgcaggctgcccacctacggccgaggccctgctctacggcatcctgcagctgcagaggaagatcaagcgggagcggaggctgcagatctggtaccgcaggtagcgccgccgccgccgccgccggagcctgtcgccgtcctgtccccagcctgcttgtgtcccgtgaggttgtcaataaacctgccctcgggctgcc

SEQ ID NO: 157680 - DNA, 841 bp, Homo sapiens
  Payload ID: 10901
  Gene Symbol: NDUFS7
  Gene Name: NADH dehydrogenase (ubiquinone) Fe-S protein 7, 20kDa (NADH-coenzyme Q reductase)
  ENST ID: ENST00000414651
  CDS Start-End: 6-716
ccaagatggcggtgctgtcagctcctggcctgcgcggcttccggatccttggtctgcgctccagcgtgggcccggctgtgcaggcacgaggtgtccatcagagcgtggccaccgatggcccaagcaggcctctggcagcggccgtgggggctcgcatccgcctctgggaagcacctgcgtggctgacgcctcctgtgcccgtgtgtctctgtgccagcacccagcctgccctgccaaaggccagagccgtggctcccaaacccagcagccggggcgagtatgtggtggccaagctggatgacctcgtcaactgggcccgccggagttctctgtggcccatgaccttcggcctggcctgctgcgccgtggagatgatgcacatggcagcaccccgctacgacatggaccgctttggcgtggtcttccgcgccagcccgcgccagtccgacgtcatgatcgtggccggcacactcaccaacaagatggccccagcgcttcgcaaggtctacgaccagatgccggagccgcgctacgtggtctccatggggagctgcgccaacggaggaggctactaccactattcctactcggtggtgaggggctgcgaccgcatcgtgcccgtggacatctacatcccaggtagggccgggaccgcaccgcccacgagggagctggagacagggccagcgccacacggagcccggcggcccctgtgagggagtcccacacccccagcagacggcgggctcccccatcctatggatgggccgactcggagcgctgcctcttagtggagcctgtcccctgtgagaagtcggcgatgtattcaggcatcagaggg

SEQ ID NO: 157681 - DNA, 1060 bp, Homo sapiens
  Payload ID: 10901
  Gene Symbol: NDUFS7
  Gene Name: NADH dehydrogenase (ubiquinone) Fe-S protein 7, 20kDa (NADH-coenzyme Q reductase)
  Uniprot ID: O75251
  ENST ID: ENST00000546283
  CDS Start-End: 302-922
tttgtaaggtctcccagggcgccggagcgcagtgtcgtctctgtggcgcaatcggttagcgcgttcggctgttaaccgaaagacccgcggcccccacgtgcgcactccgatgacctttccgcctcgggtgatctgggggtgcacggcgcaacacgaccacggaggccgaaagcgcagcggaacctcccggctccaggttccggtttccgcatgcgctccgagccgctttgggcggcggccccgggaacccggagcgctaaggagaacggacctcagaggttgtctgaaggccgaggccaagatggcggtgctgtcagctcctggcctgcgcggcttccggatccttggtctgcgctccagcgtgggcccggctgtgcaggcacgaggtgtccatcagagcgtggccaccgatggcccaagcagcacccagcctgccctgccaaaggccagagccgtggctcccaaacccagcagccggggcgagtatgtggtggccaagctggatgacctcgtcaactgggcccgccggagttctctgtggcccatgaccttcggcctggcctgctgcgccgtggagatgatgcacatggcagcaccccgctacgacatggaccgctttggcgtggtcttccgcgccagcccgcgccagtccgacgtcatgatcgtggccggcacactcaccaacaagatggccccagcgcttcgcaaggtctacgaccagatgccggagccgcgctacgtggtctccatggggagctgcgccaacggaggaggctactaccactattcctactcggtggtgaggggctgcgaccgcatcgtgcccgtggacatctacatcccaggtagggccgggaccgcaccgcccacgagggagctggagacagggccagcgccacacggagcccggcggcccctgtgagggagtcccacacccccagcagacggcgggctcccccatcctatggatgggccgactcggagcgctgcctcttagtggagcctgtcccctgtgagaagtcggcgatgtattcaggcatcagagggatcagagggagca

SEQ ID NO: 157682 - DNA, 745 bp, Homo sapiens
  Payload ID: 10901
  Gene Symbol: NDUFS7
  Gene Name: NADH dehydrogenase (ubiquinone) Fe-S protein 7, 20kDa (NADH-coenzyme Q reductase)
  ENST ID: ENST00000534853
  CDS Start-End: 21-221
gtctgaaggccgaggccaagatggcggtgctctcctggcctgcgcggcttccggatccttggtctgcgctccagcgtgggcccggctgtgcaggcacgaggtgtccatcagagcgtggccaccgatggcccaagcagcacccagcctgccctgccaaaggccagagccgtggctcccaaacccagcagccggggcgagtatgtggtggccaagctggatgacctcgtcaactgggcccgccggagttctctgtggcccatgaccttcggcctggcctgctgcgccgtggagatgatgcacatggcagcaccccgctacgacatggaccgctttggcgtggtcttccgcgccagcccgcgccagtccgacgtcatgatcgtggccggcacactcaccaacaagatggccccagcgcttcgcaaggtctacgaccagatgccggagccgcgctacgtggtctccatggggagctgcgccaacggaggaggctactaccactattcctactcggtggtgaggggctgcgaccgcatcgtgcccgtggacatctacatcccaggctgcccacctacggccgaggccctgctctacggcatcctgcagctgcagaggaagatcaagcgggagcggaggctgcagatctggtaccgcaggtagcgccgccgccgccgccgccggagcctgtcgccgtcctgtccccagcctgcttgtgtcccgtgaggttgtcaataaacctgccctcggg

SEQ ID NO: 157683 - DNA, 1743 bp, Homo sapiens
  Payload ID: 10901
  Gene Symbol: NDUFS7
  Gene Name: NADH dehydrogenase (ubiquinone) Fe-S protein 7, 20kDa (NADH-coenzyme Q reductase)
  ENST ID: ENST00000539480
  CDS Start-End: 28-576
agaggttgtctgaaggccgaggccaagatggcggtgctgtcagctcctggcctgcgcggcttccggatccttggtctgcgctccagcgtgggcccggctgtgcaggcacgaggtgtccatcagagcgtggccaccgatggcccaagcagcacccagcctgccctgccaaaggccagagccgtggctcccaaacccagcagccggggcgagtatgtggtggccaagctggatgacctcgtcaactgggcccgccggagttctctgtggcccatgaccttcggcctggcctgctgcgccgtggagatgatgcacatggcagcaccccgctacgacatggaccgctttggcgtggtcttccgcgccagcccgcgccagtccgacgtcatgatcgtggccggcacactcaccaacaagatggccccagcgcttcgcaaggtctacgaccagatgccggagccgcgctacgtggtctccatggggagctgcgccaacggaggaggctactaccactattcctactcggtggtgaggggctgcgaccgcatcgtgcccgtggacatctacatcccagactgagctcctccctccctggggaccgcgctcctccctccctgcggactgtgctccctgtctggggactgcgctcctccctccttggggaccgtgctcctccctccctccctgcggaccgcgctcctccctccctggggaccgcgctcctccctccctgcggaccgcgctcggccctccctggggaccgcgcccctccctcccagcggaccgcgctcctccctccctggggacctcgctcctccctccctccctgcggactgtgctgctccctccctgcggactgtgcttctccctcccttggagcagcctggacttgccagagctctgccaggtggggcctggccgccctttcccaggccctgcagtggccttgtcctttctcacctgtttccactcctgctgtccccgttgggccctgggcttcgtcctcttgctcaagccctttgttctgaacctgcgtggcagccgggactgggggatccccagcaaagagctctggcttggggctcagaaagagggtcatcgggtcctcgtgggatgcccgggctctgggccacctcccctccctccgcccagcctccctgcctccatctccgtccagggcagccccgggccctgctccccactgctaagtgtgtctgctgagcgctggcccccattgagtcctgagggctggggccgggggccgggttagtgaggtcagcgtcttgtccgagaggtccctgtgacagcccgggatgagccacgggtggagggcagtggggccttgcccaggggaggaccccactcttcctgcagggacctcccctgcgccggctcccagtccctggcactgcgcccacccagggctgtcagcctccaccttcagaggccggcccgggaaacccttccaaagccgagccggctgcgctgtgcacgcggtcacgcgggctccggctgcgggaagcgagactgaggcaaggtccctgcaggctgcccacctacggccgaggccctgctctacggcatcctgcagctgcagaggaagatcaagcgggagcggaggctgcagatctggtaccgcaggtagcgccgccgccgccgccgccggagcctgtcgccgtcctgtccccagcctgcttgtgtcccgtgaggttgtcaataaacctgccctcgggctgccgcctccca

SEQ ID NO: 157684 - DNA, 869 bp, Homo sapiens
  Payload ID: 10901
  Gene Symbol: NDUFS7
  Gene Name: NADH dehydrogenase (ubiquinone) Fe-S protein 7, 20kDa (NADH-coenzyme Q reductase)
  ENST ID: ENST00000546172
  CDS Start-End: 10-135
gaggccaagatggcggtgctgtcagatggagtctccctctgtcacccaagctggagtgcagtggcgcagcctctgctcactgcaacctctacctcccgggttcaagtgattctcctgcctcagcctctcgagtagctgggattacagctcctggcctgcgcggcttccggatccttggtctgcgctccagcgtgggcccggctgtgcaggcacgaggtgtccatcagagcgtggccaccgatggcccaagcagcacccagcctgccctgccaaaggccagagccgtggctcccaaacccagcagccggggcgagtatgtggtggccaagctggatgacctcgtcaactgggcccgccggagttctctgtggcccatgaccttcggcctggcctgctgcgccgtggagatgatgcacatggcagcaccccgctacgacatggaccgctttggcgtggtcttccgcgccagcccgcgccagtccgacgtcatgatcgtggccggcacactcaccaacaagatggccccagcgcttcgcaaggtctacgaccagatgccggagccgcgctacgtggtctccatggggagctgcgccaacggaggaggctactaccactattcctactcggtggtgaggggctgcgaccgcatcgtgcccgtggacatctacatcccaggctgcccacctacggccgaggccctgctctacggcatcctgcagctgcagaggaagatcaagcgggagcggaggctgcagatctggtaccgcaggtagcgccgccgccgccgccgccggagcctgtcgccgtcctgtccccagcctgcttgtgtcccgtgaggttgtcaataaacctgccctcgggctgccgcc

SEQ ID NO: 157685 - DNA, 688 bp, Homo sapiens
  Payload ID: 10901
  Gene Symbol: NDUFS7
  Gene Name: NADH dehydrogenase (ubiquinone) Fe-S protein 7, 20kDa (NADH-coenzyme Q reductase)
  ENST ID: ENST00000618074
  CDS Start-End: 44-688
aaggagaacggacctcagaggttgtctgaaggccgaggccaagatggcggtgctgtcagctcctggcctgcgcggcttccggatccttggtctgcgctccagcgtgggcccggctgtgcaggcacgaggtgtccatcagagcgtggccaccgatggcccaagcagcacccagcctgccctgccaaaggccagagccgtggctcccaaacccagcagccggggcgagtatgtggtggccaagctggatgacctcgtcaactgggcccgccggagttctctgtggcccatgaccttcggcctggcctgctgcgccgtggagatgatgcacatggcagcaccccgctacgacatggaccgctttggcgtggtcttccgcgccagcccgcgccagtccgacgtcatgatcgtggccggcacactcaccaacaagatggccccagcgcttcgcaagccgcccagccgcccccagaatgccggagccgcgctacgtggtctccatggggagctgcgccaacggaggaggctactaccactattcctactcggtggtgaggggctgcgaccgcatcgtgcccgtggacatctacatcccaggctgcccaccgccgaggccctgctctacggcatcctgcagctgcagaggaagatcaagcgggagcggaggctgcagatctggtaccgcaggtag

SEQ ID NO: 157686 - DNA, 754 bp, Homo sapiens
  Payload ID: 10901
  Gene Symbol: NDUFS7
  Gene Name: NADH dehydrogenase (ubiquinone) Fe-S protein 7, 20kDa (NADH-coenzyme Q reductase)
  ENST ID: ENST00000620479
  CDS Start-End: 10-654
gaggccaagatggcggtgctgtcagctcctggcctgcgcggcttccggatccttggtctgcgctccagcgtgggcccggctgtgcaggcacgaggtgtccatcagagcgtggccaccgatggcccaagcagcacccagcctgccctgccaaaggccagagccgtggctcccaaacccagcagccggggcgagtatgtggtggccaagctggatgacctcgtcaactgggcccgccggagttctctgtggcccatgaccttcggcctggcctgctgcgccgtggagatgatgcacatggcagcaccccgctacgacatggaccgctttggcgtggtcttccgcgccagcccgcgccagtccgacgtcatgatcgtggccggcacactcaccaacaagatggccccagcgcttcgcaagtcttccctacgaccagatgccggagccgcgctacgtggtctccatggggagctgcgccaacggaggaggctactaccactattcctactcggtggtgaggggctgcgaccgcatcgtgcccgtggacatctacatcccaggctgcccaccacggccgaggccctgctctacggcatcctgcagctgcagaggaagatcaagcgggagcggaggctgcagatctggtaccgcaggtagcgccgccgccgccgccgccggagcctgtcgccgtcctgtccccagcctgcttgtgtcccgtgaggttgtcaataaacctgccctcgggctgccgcctccc

SEQ ID NO: 157687 - DNA, 791 bp, Homo sapiens
  Payload ID: 10902
  Gene Symbol: NDUFS8
  Gene Name: NADH dehydrogenase (ubiquinone) Fe-S protein 8, 23kDa (NADH-coenzyme Q reductase)
  Uniprot ID: O00217
  ENST ID: ENST00000313468
  CDS Start-End: 108-740
acagaaaagggggaacccgctggcccaatggcagcgtcctacagtgtagcctccgcctcccgattgactggcctgcttggcaaggcaagtagcggcggcgcttcaagatgcgctgcctgaccacgcctatgctgctgcgggccctggcccaggctgcacgtgcaggacctcctggtggccggagcctccacagcagtgcagtggcagccacctacaagtatgtgaacatgcaggatcccgagatggacatgaagtcagtgactgaccgggcagcccgcaccctgctgtggactgagctcttccgaggcctgggcatgaccctgagctacctgttccgggaaccggccaccatcaactacccgttcgagaagggcccgctgagccctcgcttccgtggggagcatgcgctgcgccggtacccatccggggaggagcgttgcattgcctgcaagctctgcgaggccatctgccccgcccaggccatcaccatcgaggctgagccaagagctgatggcagccgccggaccacccgctatgacatcgacatgaccaagtgcatctactgcggcttctgccaggaggcctgtcccgtggatgccatcgtcgagggccccaactttgagttctccacggagacccatgaggagctgctgtacaacaaggagaagttgctcaacaacggggacaagtgggaggccgagatcgccgccaacatccaggctgactacttgtatcggtgacgccccaccggcccgcagcccctgctgcccaataaaaccactccgacccca

SEQ ID NO: 157688 - DNA, 620 bp, Homo sapiens
  Payload ID: 10902
  Gene Symbol: NDUFS8
  Gene Name: NADH dehydrogenase (ubiquinone) Fe-S protein 8, 23kDa (NADH-coenzyme Q reductase)
  ENST ID: ENST00000453471
  CDS Start-End: 248-620
ctacagtgtagcctccgcctcccgattgactggcctgcttggcaaggcaagtagcggcggcgcttcaagggacggggttccaccatgttagccaggctggtctcaaactcctgacctcaggtgatccacctgcctcagcctcccaaagtgctgggattacaggcgtgagccaccacacccagccctagcgagtcactcaacaaactgagtcccagcgccttatttgtgcctccctcgtggagtccttatgcgctgcctgaccacgcctatgctgctgcgggccctggcccaggctgcacgtgcaggacctcctggtggccggagcctccacagcagtgcagtggcagccacctacaagtatgtgaacatgcaggatcccgagatggacatgaagtcagtgactgaccgggcagcccgcaccctgctgtggactgagctcttccgaggcctgggcatgaccctgagctacctgttccgggaaccggccaccatcaactacccgttcgagaagggcccgctgagccctcgcttccgtggggagcatgcgctgcgccggtacccatccggggaggagcgttgcattgcctgcaagctctgcgaggccatctgccccgcccagg

SEQ ID NO: 157689 - DNA, 606 bp, Homo sapiens
  Payload ID: 10902
  Gene Symbol: NDUFS8
  Gene Name: NADH dehydrogenase (ubiquinone) Fe-S protein 8, 23kDa (NADH-coenzyme Q reductase)
  ENST ID: ENST00000529645
  CDS Start-End: 1-123
ctgaccacgcctatgctgctgcgggccctggcccaggctgcacgtgcaggacctcctggtggccggagcctccacagcagtgcagtggcagccacctacagtgagtacctgggtggcctctagcctcaggtgttcctgactggtcctgctggagtaggggaagagacctgagttccagtcctggctttgtcaggggcgttcttctctgagcctgtttccacttttaaaatgattatggtgatggagactgactctgattcacaggggcagggtccatcattgccgagagtatgtgaacatgcaggatcccgagatggacatgaagtcagtgactgaccgggcagcccgcaccctgctgtggactgagctcttccgaggcctgggcatgaccctgagctacctgttccgggaaccggccaccatcaactacccgttcgagaagggcccgctgagccctcgcttccgtggggagcatgcgctgcgccggtacccatccggggaggagcgttgcattgcctgcaagctctgcgaggccatctgccccgcccagggtgagacccttagggcagcgggtgctacactgaacaaagcggtgaacagccccct

SEQ ID NO: 157690 - DNA, 353 bp, Homo sapiens
  Payload ID: 10902
  Gene Symbol: NDUFS8
  Gene Name: NADH dehydrogenase (ubiquinone) Fe-S protein 8, 23kDa (NADH-coenzyme Q reductase)
  ENST ID: ENST00000528492
  CDS Start-End: 113-307
gattgactggcctgcttggcaaggcaagtagcggcggcgcttcaaggccatcaccatcgaggctgagccaagagctgatggcagccgccggaccacccgctatgacatcgacatgaccaagtgcatctactgcggcttctgccaggaggcctgtcccgtggatgccatcgtcgagggccccaactttgagttctccacggagacccatgaggagctgctgtacaacaaggagaagttgctcaacaacggggacaagtgggaggccgagatcgccgccaacatccaggctgactacttgtatcggtgacgccccaccggcccgcagcccctgctgcccaataaaaccactccga

SEQ ID NO: 157691 - DNA, 515 bp, Homo sapiens
  Payload ID: 10902
  Gene Symbol: NDUFS8
  Gene Name: NADH dehydrogenase (ubiquinone) Fe-S protein 8, 23kDa (NADH-coenzyme Q reductase)
  ENST ID: ENST00000525628
  CDS Start-End: 186-515
ggaaggtgctgggttgggtccctggaactgcagtcagtgatccaaaggagtgggcctgttagggggttcacaggtcgtgggatgagctcttatgagcgccggctaagtgccgggctctggggtgcccttggcatgtacgggctcccctaattcccaagaccaaccgcccccaacccacttcatagatgcgctgcctgaccacgcctatgctgctgcgggccctggcccaggctgcacgtgcaggacctcctggtggccggagcctccacagcagtgcagtggcagccacctacaagtatgtgaacatgcaggatcccgagatggacatgaagtcagtgactgaccgggcagcccgcaccctgctgtggactgagctcttccgaggcctgggcatgaccctgagctacctgttccgggaaccggccaccatcaactacccgttcgagaagggcccgctgagccctcgcttccgtggggagcatgcgctgcgccggtacccatccggggaggagcgt

SEQ ID NO: 157692 - DNA, 531 bp, Homo sapiens
  Payload ID: 10902
  Gene Symbol: NDUFS8
  Gene Name: NADH dehydrogenase (ubiquinone) Fe-S protein 8, 23kDa (NADH-coenzyme Q reductase)
  ENST ID: ENST00000531228
  CDS Start-End: 165-377
cacgttttggccgtgaaagtcgggcttgggcagcgtggcgtcgggggcgagtgtggtgtccccgttggcgccgccagctctgcgcctgggcttcccctcggctcactcaggatccgcggcctccgtgtccttcaggtgcagcggggagccggctctcagggcgcatgcgccgcccgctctgcgccaccggcctagttagggtcggagatcactgggaagatgcgctgcctgaccacgcctatgctgctgcgggccctggcccaggctgcacgtgcaggacctcctggtggccggagcctccacagcagtgcagtggcagccacctacaagtatgtgaacatgcaggatcccgagatggacatgaagtcagtgactgaccgggcagcccgcaccctgctgtggactgagctcttccgaggcctgggcatgaccctgagctacctgttccgggaaccggccaccatcaactacccgttcgagaagggcccgctgagccctcgcttccgtggggagcatgcgctgcgccggtac

SEQ ID NO: 157693 - DNA, 561 bp, Homo sapiens
  Payload ID: 10902
  Gene Symbol: NDUFS8
  Gene Name: NADH dehydrogenase (ubiquinone) Fe-S protein 8, 23kDa (NADH-coenzyme Q reductase)
  ENST ID: ENST00000525419
  CDS Start-End: 148-561
agtcgggcttgggcagcgtggcgtcgggggcgagtgtggtgtccccgttggcgccgccagctctgcgcctgggcttcccctcggctcactcaggatccgcggcctccgtgtccttcaggtgcagcggggagccggctctcagggcgcatgcgccgcccgctctgcgccaccggcctagttagggtcggagatcactgggaagagtatgtgaacatgcaggatcccgagatggacatgaagtcagtgactgaccgggcagcccgcaccctgctgtggactgagctcttccgaggcctgggcatgaccctgagctacctgttccgggaaccggccaccatcaactacccgttcgagaagggcccgctgagccctcgcttccgtggggagcatgcgctgcgccggtacccatccggggaggagcgttgcattgcctgcaagctctgcgaggccatctgccccgcccaggccatcaccatcgaggctgagccaagagctgatggcagccgccggaccacccgctatgacatcgacatgaccaagtgcatctactgcggcttctgc

SEQ ID NO: 157694 - DNA, 814 bp, Homo sapiens
  Payload ID: 10902
  Gene Symbol: NDUFS8
  Gene Name: NADH dehydrogenase (ubiquinone) Fe-S protein 8, 23kDa (NADH-coenzyme Q reductase)
  ENST ID: ENST00000526446
  CDS Start-End: 51-182
tcccgattgactggcctgcttggcaaggcaagtagcggcggcgcttcaagatgcgctgcctgaccacgcctatgctgctgcgggccctggcccaggctgcacgtgcaggacctcctggtggccggagcctccacagcagtgcagtggcagccacctacagtgagtacctgggtggcctctagcctcaggtgttcctgactggtcctgctggagtaggggaagagacctgagttccagtcctggctttgtcaggggcgttcttctctgagcctgtttccacttttaaaatgattatggtgatggagactgactctgattcacaggggcagggtccatcattgccgagagtatgtgaacatgcaggatcccgagatggacatgaagtcagtgactgaccgggcagcccgcaccctgctgtggactgagctcttccgaggcctgggcatgaccctgagctacctgttccgggaaccggccaccatcaactacccgttcgagaagggcccgctgagccctcgcttccgtggggagcatgcgctgcgccggtacccatccggggaggagcgttgcattgcctgcaagctctgcgaggccatctgccccgcccaggccatcaccatcgaggctgagccaagagctgatggcagccgccggaccacccgctatgacatcgacatgaccaagtgcatctactgcggcttctgccaggaggcctgtcccgtggatgccatcgtcgagggccccaactttgagttctccacggagacccatgaggagctgctgtacaacaaggagaagttgctcaacaacgggg

SEQ ID NO: 157695 - DNA, 616 bp, Homo sapiens
  Payload ID: 10902
  Gene Symbol: NDUFS8
  Gene Name: NADH dehydrogenase (ubiquinone) Fe-S protein 8, 23kDa (NADH-coenzyme Q reductase)
  ENST ID: ENST00000524810
  CDS Start-End: 1-281
gggaaccggccaccatcaactacccgttcgagaagggcccgctgagccctcgcttccgtggggagcatgcgctgcgccggtacccatccggggaggagcgttgcattgcctgcaagctctgcgaggccatctgccccgcccagggtgagacccttagggcagcgggtgctacactgaacaaagcggtgaacagccccctcgtgagagggggttcttggcagatgacgccagcagctgacaaacaggcaaggcaggccgggcacggtggctcacgcttgtaatcccagcactttgggagtccaaggccatcaccatcgaggctgagccaagagctgatggcagccgccggaccacccgctatgacatcgacatgaccaagtgcatctactgcggcttctgccaggaggcctgtcccgtggatgccatcgtcgagggccccaactttgagttctccacggagacccatgaggagctgctgtacaacaaggagaagttgctcaacaacggggacaagtgggaggccgagatcgccgccaacatccaggctgactacttgtatcggtgacgccccaccggcccgcagcccctgctgcccaataaaaccactccgacccca

SEQ ID NO: 157696 - DNA, 689 bp, Homo sapiens
  Payload ID: 10902
  Gene Symbol: NDUFS8
  Gene Name: NADH dehydrogenase (ubiquinone) Fe-S protein 8, 23kDa (NADH-coenzyme Q reductase)
  ENST ID: ENST00000526339
  CDS Start-End: 136-689
cacgttttggccgtgaaagtcgggcttgggcagcgtggcgtcgggggcgagtgtggtgtccccgttggcgccgccagctctgcgcctgggcttcccctcggctcactcaggatccgcggcctccgtgtccttcagatgcgctgcctgaccacgcctatgctgctgcgggccctggcccaggctgcacgtgcaggacctcctggtggccggagcctccacagcagtgcagtggcagccacctacaagtatgtgaacatgcaggatcccgagatggacatgaagtcagtgactgaccgggcagcccgcaccctgctgtggactgagctcttccgaggcctgggcatgaccctgagctacctgttccgggaaccggccaccatcaactacccgttcgagaagggcccgctgagccctcgcttccgtggggagcatgcgctgcgccggtacccatccggggaggagcgttgcattgcctgcaagctctgcgaggccatctgccccgcccaggccatcaccatcgaggctgagccaagagctgatggcagccgccggaccacccgctatgacatcgacatgaccaagtgcatctactgcggcttctgccaggaggcctgtcccgtggatgccatcgtcgagggccccaactttgagttctccacggagacccatgaggagctgctgtacaacaa

SEQ ID NO: 157697 - DNA, 1596 bp, Homo sapiens
  Payload ID: 10903
  Gene Symbol: NDUFV1
  Gene Name: NADH dehydrogenase (ubiquinone) flavoprotein 1, 51kDa
  Uniprot ID: P49821
  ENST ID: ENST00000322776
  CDS Start-End: 154-1548
gaagttgaaggggcgcagcgataccggtgcgcggcgctggcgtcgggcgcgtgacgtctttcctgcgcgccacctagcgtctctatcgcgccagttcctcagcctcagtgctatgaaggtgacagcgtgaggtgacccatctggcccgccgcgatgctggcaacacggcggctgctcggctggtcgcttcccgcgcgggtatctgtgcgtttcagcggcgacacgacagcacccaagaaaacctcatttggctcgctgaaggatgaagaccggattttcaccaacctgtacggccgccatgactggaggctgaaaggttccctgagtcgaggtgactggtacaagacaaaggagatcctgctgaaggggcccgactggatcctgggcgagatcaagacatcgggtttgaggggccgtggaggcgctggcttccccactggcctcaagtggagcttcatgaataagccctcagatggcaggcccaagtatctggtggtgaacgcagacgagggggagccgggcacctgcaaggaccgggagatcttacgccatgatcctcacaagctgctggaaggctgcctggtggggggccgggccatgggcgcccgcgctgcctatatctacatccgaggggaattctacaatgaggcctccaatctgcaggtggccatccgagaggcctatgaggcaggtctgattggcaagaatgcttgtggctctggctatgattttgacgtgtttgtggtgcgcggggctggggcctacatctgtggagaggagacagcgctcatcgagtccattgagggcaagcagggcaagccccgcctgaagccccccttccccgcagacgtgggagtgtttggctgccccacaactgtggccaacgtggagacagtggcagtgtcccccacaatctgccgccgtggaggtacctggtttgctggctttggcagagaacgcaactcaggcaccaaactattcaacatctctggccatgtcaaccacccttgcactgtggaggaggagatgtctgtgcccttgaaagaactgattgagaagcatgctgggggtgtcacgggcggctgggacaacctccttgctgtgatccctggcggctcgtctaccccactgatccccaagtctgtgtgtgagacggtgctgatggacttcgatgcgctggtgcaggcacagacaggcctgggcacagctgcggtgatcgtcatggaccgctcgacggacatcgtgaaagccatcgcccgcctcattgagttctataagcacgagagctgtggccagtgtaccccatgccgtgagggtgtggactggatgaacaaggtgatggcacgtttcgtgaggggggatgcccggccggccgagatcgactccctgtgggagatcagcaagcagatagaaggccatacgatttgtgctctgggtgacggggccgcctggcctgtgcagggtctgatccgccactttcggccggagctcgaggagcggatgcagcggtttgcccagcagcatcaggcccggcaggctgcctcttagcccaccaccctggcctgctgtcctgcgtctatccatgtggaatgctgg

SEQ ID NO: 157698 - DNA, 1512 bp, Homo sapiens
  Payload ID: 10903
  Gene Symbol: NDUFV1
  Gene Name: NADH dehydrogenase (ubiquinone) flavoprotein 1, 51kDa
  ENST ID: ENST00000415352
  CDS Start-End: 62-1435
agttcctcagcctcagtgctatgaaggtgacagcgtgaggtgacccatctggcccgccgcgatgctggcaacacggcggctgctcggctggtcgcttcccgcgcgggtatctacagcacccaagaaaacctcatttggctcgctgaaggatgaagaccggattttcaccaacctgtacggccgccatgactggaggctgaaaggttccctgagtcgaggtgactggtacaagacaaaggagatcctgctgaaggggcccgactggatcctgggcgagatcaagacatcgggtttgaggggccgtggaggcgctggcttccccactggcctcaagtggagcttcatgaataagccctcagatggcaggcccaagtatctggtggtgaacgcagacgagggggagccgggcacctgcaaggaccgggagatcttacgccatgatcctcacaagctgctggaaggctgcctggtggggggccgggccatgggcgcccgcgctgcctatatctacatccgaggggaattctacaatgaggcctccaatctgcaggtggccatccgagaggcctatgaggcaggtctgattggcaagaatgcttgtggctctggctatgattttgacgtgtttgtggtgcgcggggctggggcctacatctgtggagaggagacagcgctcatcgagtccattgagggcaagcagggcaagccccgcctgaagccccccttccccgcagacgtgggagtgtttggctgccccacaactgtggccaacgtggagacagtggcagtgtcccccacaatctgccgccgtggaggtacctggtttgctggctttggcagagaacgcaactcaggcaccaaactattcaacatctctggccatgtcaaccacccttgcactgtggaggaggagatgtctgtgcccttgaaagaactgattgagaagcatgctgggggtgtcacgggcggctgggacaacctccttgctgtgatccctggcggctcgtctaccccactgatccccaagtctgtgtgtgagacggtgctgatggacttcgatgcgctggtgcaggcacagacaggcctgggcacagctgcggtgatcgtcatggaccgctcgacggacatcgtgaaagccatcgcccgcctcattgagttctataagcacgagagctgtggccagtgtaccccatgccgtgagggtgtggactggatgaacaaggtgatggcacgtttcgtgaggggggatgcccggccggccgagatcgactccctgtgggagatcagcaagcagatagaaggccatacgatttgtgctctgggtgacggggccgcctggcctgtgcagggtctgatccgccactttcggccggagctcgaggagcggatgcagcggtttgcccagcagcatcaggcccggcaggctgcctcttagcccaccaccctggcctgctgtcctgcgtctatccatgtggaatgctggacaataaagcgagtgctgcccaccctcca

SEQ ID NO: 157699 - DNA, 620 bp, Homo sapiens
  Payload ID: 10903
  Gene Symbol: NDUFV1
  Gene Name: NADH dehydrogenase (ubiquinone) flavoprotein 1, 51kDa
  ENST ID: ENST00000532343
  CDS Start-End: 334-620
agttcctcagcctcagtgctatgaaggtgacagcgtgaggtgacccatctggcccgccgcgatgctggcaacacggcggctgctcggctggtcgcttcccgcgcggcacccaagaaaacctcatttggctcgctgaaggatgaagaccggattttcaccaacctgtacggccgccatgactggaggctgaaaggttccctgagtcgaggtgactggtacaagacaaaggagatcctgctgaaggggcccgactggatcctgggcgagatcaagacatcgggtttgaggggccgtggaggcgctggcttccccactggcctcaagtggagcttcatgaataagccctcagatggcaggcccaagtatctggtggtgaacgcagacgagggggagccgggcacctgcaaggaccgggagatcttacgccatgatcctcacaagctgctggaaggctgcctggtggggggccgggccatgggcgcccgcgctgcctatatctacatccgaggggaattctacaatgaggcctccaatctgcaggtggccatccgagaggcctatgaggcaggtctgattggcaagaatgcttgtggctctggctatgattttgacgtgtttgt

SEQ ID NO: 157700 - DNA, 1493 bp, Homo sapiens
  Payload ID: 10903
  Gene Symbol: NDUFV1
  Gene Name: NADH dehydrogenase (ubiquinone) flavoprotein 1, 51kDa
  ENST ID: ENST00000532303
  CDS Start-End: 326-1417
gcgtgacgtctttcctgcgcgccacctagcgtctctatcgcgccagttcctcagcctcagtgctatgaaggtgacagcgtgaggtgacccatctggcccgccgcgatgctggcaacacggcggctgctcggctggtcgcttcccgcgcgggtatctgtgcgtttcagcggcgacacggctgaaaggttccctgagtcgaggtgactggtacaagacaaaggagatcctgctgaaggggcccgactggatcctgggcgagatcaagacatcgggtttgaggggccgtggaggcgctggcttccccactggcctcaagtggagcttcatgaataagccctcagatggcaggcccaagtatctggtggtgaacgcagacgagggggagccgggcacctgcaaggaccgggagatcttacgccatgatcctcacaagctgctggaaggctgcctggtggggggccgggccatgggcgcccgcgctgcctatatctacatccgaggggaattctacaatgaggcctccaatctgcaggtggccatccgagaggcctatgaggcaggtctgattggcaagaatgcttgtggctctggctatgattttgacgtgtttgtggtgcgcggggctggggcctacatctgtggagaggagacagcgctcatcgagtccattgagggcaagcagggcaagccccgcctgaagccccccttccccgcagacgtgggagtgtttggctgccccacaactgtggccaacgtggagacagtggcagtgtcccccacaatctgccgccgtggaggtacctggtttgctggctttggcagagaacgcaactcaggcaccaaactattcaacatctctggccatgtcaaccacccttgcactgtggaggaggagatgtctgtgcccttgaaagaactgattgagaagcatgctgggggtgtcacgggcggctgggacaacctccttgctgtgatccctggcggctcgtctaccccactgatccccaagtctgtgtgtgagacggtgctgatggacttcgatgcgctggtgcaggcacagacaggcctgggcacagctgcggtgatcgtcatggaccgctcgacggacatcgtgaaagccatcgcccgcctcattgagttctataagcacgagagctgtggccagtgtaccccatgccgtgagggtgtggactggatgaacaaggtgatggcacgtttcgtgaggggggatgcccggccggccgagatcgactccctgtgggagatcagcaagcagatagaaggccatacgatttgtgctctgggtgacggggccgcctggcctgtgcagggtctgatccgccactttcggccggagctcgaggagcggatgcagcggtttgcccagcagcatcaggcccggcaggctgcctcttagcccaccaccctggcctgctgtcctgcgtctatccatgtggaatgctggacaataaagcgagtgctgcccaccctcc

SEQ ID NO: 157701 - DNA, 679 bp, Homo sapiens
  Payload ID: 10903
  Gene Symbol: NDUFV1
  Gene Name: NADH dehydrogenase (ubiquinone) flavoprotein 1, 51kDa
  ENST ID: ENST00000527355
  CDS Start-End: 1-384
tgccccacaactgtggccaacgtggagacagtggcagtgtcccccacaatctgccgccgtggaggtacctggtttgctggctttggcagagaacgcaactcaggcaccaaactattcaacatctctggccatgtcaaccacccttgcactgtggaggaggagatgtctgtgcccttgaaagaactgattgagaagcatgctgggggtgtcacgggcggctgggacaacctccttgctgtgatccctggcggctcgtctaccccactgatccccaagtctgtgtgtgagacggtgctgatggacttcgatgcgctggtgcaggcacagacaggcctgggcacagctgcggtgatcgtcatggaccgctcggtgtggactggatgaacaaggtgatggcacgtttcgtgaggggggatgcccggccggccgagatcgactccctgtgggagatcagcaagcagatagaaggccatacgatttgtgctctgggtgacggggccgcctggcctgtgcagggtctgatccgccactttcggccggagctcgaggagcggatgcagcggtttgcccagcagcatcaggcccggcaggctgcctcttagcccaccaccctggcctgctgtcctgcgtctatccatgtggaatgctggacaataaagcgagtgctgcccaccctcca

SEQ ID NO: 157702 - DNA, 582 bp, Homo sapiens
  Payload ID: 10903
  Gene Symbol: NDUFV1
  Gene Name: NADH dehydrogenase (ubiquinone) flavoprotein 1, 51kDa
  ENST ID: ENST00000529867
  CDS Start-End: 48-582
agtgctatgaaggtgacagcgtgaggtgacccatctggcccgccgcgatgctggcaacacggcggctgctcggctggtcgcttcccgcgcgggtatctgtgcgtttcagcggcgacacggatgaagaccggattttcaccaacctgtacggccgccatgactggaggctgaaaggttccctgagtcgaggtgactggtacaagacaaaggagatcctgctgaaggggcccgactggatcctgggcgagatcaagacatcgggtttgaggggccgtggaggcgctggcttccccactggcctcaagtggagcttcatgaataagccctcagatggcaggcccaagtatctggtggtgaacgcagacgagggggagccgggcacctgcaaggaccgggagatcttacgccatgatcctcacaagctgctggaaggctgcctggtggggggccgggccatgggcgcccgcgctgcctatatctacatccgaggggaattctacaatgaggcctccaatctgcaggtggccatccgagaggcctatgaggcaggtctgattggcaagaatgcttgtggctctggct

SEQ ID NO: 157703 - DNA, 544 bp, Homo sapiens
  Payload ID: 10903
  Gene Symbol: NDUFV1
  Gene Name: NADH dehydrogenase (ubiquinone) flavoprotein 1, 51kDa
  ENST ID: ENST00000530103
  CDS Start-End: 48-179
agtgctatgaaggtgacagcgtgaggtgacccatctggcccgccgcgatgctggcaacacggcggctgctcggctggtcgcttcccgcgcgggtatctgtgcgtttcagcggcgacacgtcctcggcctggcggaagttttgcagacagcacccaagaaaacctcatttggctcgctgaaggatgaagaccggattttcaccaacctgtacggccgccatgactggaggctgaaaggttccctgagtcgaggtgactggtacaagacaaaggagatcctgctgaaggggcccgactggatcctgggcgagatcaagacatcgggtttgaggggccgtggaggcgctggcttccccactggcctcaagtggagcttcatgaataagccctcagatggcaggcccaagtatctggtggtgaacgcagacgagggggagccgggcacctgcaaggaccgggagatcttacgccatgatcctcacaagctgctggaaggctgcctggtggggggccgggccatgggcgcccgcgctgcctatatctac

SEQ ID NO: 157704 - DNA, 559 bp, Homo sapiens
  Payload ID: 10903
  Gene Symbol: NDUFV1
  Gene Name: NADH dehydrogenase (ubiquinone) flavoprotein 1, 51kDa
  ENST ID: ENST00000528314
  CDS Start-End: 402-559
aaaaaaaaaaaaatgcttactaagtggcagtggtatctatgatgctatagatgcttccctagccctagcccagcccctcctaaatagggagacccaagattctgtagcttctggcccaatccctcatggccccagagcactctgggcctcctgaccctttgtctccctagacagcacccaagaaaacctcatttggctcgctgaaggatgaagaccggattttcaccaacctgtacggccgccatgactggaggctgaaaggttccctgagtcgaggtgactggtacaagacaaaggagatcctgctgaaggggcccgactggatcctgggcgagatcaagacatcgggtttgaggggccgtggaggcgctggcttccccactggcctcaagtggagcttcatgaataagccctcagatggcaggcccaagtatctggtggtgaacgcagacgagggggagccgggcacctgcaaggaccgggagatcttacgccatgatcctcacaagctgctggaaggctgcctggtggggggccgggccatgggcgcccgcgctgc

SEQ ID NO: 157705 - DNA, 774 bp, Homo sapiens
  Payload ID: 10903
  Gene Symbol: NDUFV1
  Gene Name: NADH dehydrogenase (ubiquinone) flavoprotein 1, 51kDa
  ENST ID: ENST00000533919
  CDS Start-End: 1-402
gaggcctatgaggcaggtctgattggcaagaatgcttgtggctctggctatgattttgacgtgtttgtggtgcgcggggctggggcctacatctgtggagaggagacagcgctcatcgagtccattgagggcaagcagggcaagccccgcctgaagccccccttccccgcagacgtgggagtgtttggctgccccacaactgtggccaacgtggagacagtggcagtgtcccccacaatctgccgccgtggaggtacctggtttgctggctttggcagagaacgcaactcaggcaccaaactattcaacatctctggccatgtcaaccacccttgcactgtggaggaggagatgtctgtgcccttgaaagaactgattgagaagcatgctgtctgtgtgtgagacggtgctgatggacttcgatgcgctggtgcaggcacagacaggcctgggcacagctgcggtgatcgtcatggaccgctcgacggacatcgtgaaagccatcgcccgcctcattgagttctataagcacgagagctgtggccagtgtaccccatgccgtgagggtgtggactggatgaacaaggtgatggcacgtttcgtgaggggggatgcccggccggccgagatcgactccctgtgggagatcagcaagcagatagaaggccatacgatttgtgctctgggtgacggggccgcctggcctgtgcagggtctgatccgccactttcggccggagctcgaggagcggatgcagcggtttgcccagcagca

SEQ ID NO: 157706 - DNA, 786 bp, Homo sapiens
  Payload ID: 10903
  Gene Symbol: NDUFV1
  Gene Name: NADH dehydrogenase (ubiquinone) flavoprotein 1, 51kDa
  ENST ID: ENST00000532244
  CDS Start-End: 378-786
agcgtctctatcgcgccagttcctcagcctcagtgctatgaaggtgacagcgtgaggtgacccatctggcccgccgcgatgctggcaacacggcggctgctcggctggtcgcttcccgcgcgggtatctgtgcgtttcagcggcgacacgcacccaagaaaacctcatttggctcgctgaaggatgaagaccggattttcaccaacctgtacggccgccatgactggaggctgaaaggttccctgagtcgaggtgactggtacaagacaaaggagatcctgctgaaggggcccgactggatcctgggcgagatcaagacatcgggtttgaggggccgtggaggcgctggcttccccactggcctcaagtggagcttcatgaataagccctcagatggcaggcccaagtatctggtggtgaacgcagacgagggggagccgggcacctgcaaggaccgggagatcttacgccatgatcctcacaagctgctggaaggctgcctggtggggggccgggccatgggcgcccgcgctgcctatatctacatccgaggggaattctacaatgaggcctccaatctgcaggtggccatccgagaggcctatgaggcaggtctgattggcaagaatgcttgtggctctggctatgattttgacgtgtttgtggtgcgcggggctggggcctacatctgtggagaggagacagcgctcatcgagtccattgagggcaagcagggcaagccccgcctgaagccccccttccccgcagacgtgggtaaggcctggc

SEQ ID NO: 157707 - DNA, 1503 bp, Homo sapiens
  Payload ID: 10903
  Gene Symbol: NDUFV1
  Gene Name: NADH dehydrogenase (ubiquinone) flavoprotein 1, 51kDa
  Uniprot ID: P49821
  ENST ID: ENST00000529927
  CDS Start-End: 66-1433
cgccagttcctcagcctcagtgctatgaaggtgacagcgtgaggtgacccatctggcccgccgcgatgctggcaacacggcggctgctcggctggtcgcttcccgcgcggacagcacccaagaaaacctcatttggctcgctgaaggatgaagaccggattttcaccaacctgtacggccgccatgactggaggctgaaaggttccctgagtcgaggtgactggtacaagacaaaggagatcctgctgaaggggcccgactggatcctgggcgagatcaagacatcgggtttgaggggccgtggaggcgctggcttccccactggcctcaagtggagcttcatgaataagccctcagatggcaggcccaagtatctggtggtgaacgcagacgagggggagccgggcacctgcaaggaccgggagatcttacgccatgatcctcacaagctgctggaaggctgcctggtggggggccgggccatgggcgcccgcgctgcctatatctacatccgaggggaattctacaatgaggcctccaatctgcaggtggccatccgagaggcctatgaggcaggtctgattggcaagaatgcttgtggctctggctatgattttgacgtgtttgtggtgcgcggggctggggcctacatctgtggagaggagacagcgctcatcgagtccattgagggcaagcagggcaagccccgcctgaagccccccttccccgcagacgtgggagtgtttggctgccccacaactgtggccaacgtggagacagtggcagtgtcccccacaatctgccgccgtggaggtacctggtttgctggctttggcagagaacgcaactcaggcaccaaactattcaacatctctggccatgtcaaccacccttgcactgtggaggaggagatgtctgtgcccttgaaagaactgattgagaagcatgctgggggtgtcacgggcggctgggacaacctccttgctgtgatccctggcggctcgtctaccccactgatccccaagtctgtgtgtgagacggtgctgatggacttcgatgcgctggtgcaggcacagacaggcctgggcacagctgcggtgatcgtcatggaccgctcgacggacatcgtgaaagccatcgcccgcctcattgagttctataagcacgagagctgtggccagtgtaccccatgccgtgagggtgtggactggatgaacaaggtgatggcacgtttcgtgaggggggatgcccggccggccgagatcgactccctgtgggagatcagcaagcagatagaaggccatacgatttgtgctctgggtgacggggccgcctggcctgtgcagggtctgatccgccactttcggccggagctcgaggagcggatgcagcggtttgcccagcagcatcaggcccggcaggctgcctcttagcccaccaccctggcctgctgtcctgcgtctatccatgtggaatgctggacaataaagcgagtgctgccca

SEQ ID NO: 157708 - DNA, 477 bp, Homo sapiens
  Payload ID: 10903
  Gene Symbol: NDUFV1
  Gene Name: NADH dehydrogenase (ubiquinone) flavoprotein 1, 51kDa
  ENST ID: ENST00000528328
  CDS Start-End: 251-477
tctatcgcgccagttcctcagcctcagtgctatgaaggtgacagcgtgaggtgacccatctggcccgccgcgatgctggcaacacggcggctgctcggctggtcgcttcccgcgcgggtatctgtgcgtttcagcggcgacacgccttgtagggcgtgaaggggtcattgccccatttagggatgcgcacctcctgatttcccgtccactgctctgcgccctgaagtggctgaaaagtgctcttaaaaggatgggaatcccgtcgccctcagctgcacccaagaaaacctcatttggctcgctgaaggatgaagaccggattttcaccaacctgtacggccgccatgactggaggctgaaaggttccctgagtcgaggtgactggtacaagacaaaggagatcctgctgaaggggcccgactggatcctgggcgagatcaagacatcgggtttgaggggccgtggaggcgctggctt

SEQ ID NO: 157709 - DNA, 582 bp, Homo sapiens
  Payload ID: 10903
  Gene Symbol: NDUFV1
  Gene Name: NADH dehydrogenase (ubiquinone) flavoprotein 1, 51kDa
  ENST ID: ENST00000530638
  CDS Start-End: 150-582
gctatgaaggtgacagcgtgaggtgacccatctggcccgccgcgatgctggcaacacggcggctgctcggctggtcgcttcccgcgcgggtatctgtgcgtttcagcggcgacacgcacccaagaaaacctcatttggctcgctgaaggatgaagaccggattttcaccaacctgtacggccgccatgactggaggttccctgagtcgaggtgactggtacaagacaaaggagatcctgctgaaggggcccgactggatcctgggcgagatcaagacatcgggtttgaggggccgtggaggcgctggcttccccactggcctcaagtggagcttcatgaataagccctcagatggcaggcccaagtatctggtggtgaacgcagacgagggggagccgggcacctgcaaggaccgggagatcttacgccatgatcctcacaagctgctggaaggctgcctggtggggggccgggccatgggcgcccgcgctgcctatatctacatccgaggggaattctacaatgaggcctccaatctgcaggtggccatccgagaggcctatgaggcaggtctgattggca

SEQ ID NO: 157710 - DNA, 582 bp, Homo sapiens
  Payload ID: 10903
  Gene Symbol: NDUFV1
  Gene Name: NADH dehydrogenase (ubiquinone) flavoprotein 1, 51kDa
  ENST ID: ENST00000533075
  CDS Start-End: 48-582
agtgctatgaaggtgacagcgtgaggtgacccatctggcccgccgcgatgctggcaacacggcggctgctcggctggtcgcttcccgcgcgggtatctgtgcgtttcagcggcgacacgacagcacccaagaaaacctcatttggctcgctgaaggatgaagaccggattttcaccaacctgctgaaaggttccctgagtcgaggtgactggtacaagacaaaggagatcctgctgaaggggcccgactggatcctgggcgagatcaagacatcgggtttgaggggccgtggaggcgctggcttccccactggcctcaagtggagcttcatgaataagccctcagatggcaggcccaagtatctggtggtgaacgcagacgagggggagccgggcacctgcaaggaccgggagatcttacgccatgatcctcacaagctgctggaaggctgcctggtggggggccgggccatgggcgcccgcgctgcctatatctacatccgaggggaattctacaatgaggcctccaatctgcaggtggccatccgagaggcctatgaggcaggtctgattggcaagaatg

SEQ ID NO: 157711 - DNA, 930 bp, Homo sapiens
  Payload ID: 10904
  Gene Symbol: NDUFV2
  Gene Name: NADH dehydrogenase (ubiquinone) flavoprotein 2, 24kDa
  Uniprot ID: P19404
  ENST ID: ENST00000318388
  CDS Start-End: 115-864
gcgtgccgtccgggtcgcctaggcctggggtcgggagcgcgcacgctgtgcgccctgggcgcgctcgggattctcgcctggcgcggctggggaaggtgaacagtgtggcccgccatgttcttctccgcggcgctccgggcccgggcggctggcctcaccgcccactggggaagacatgtaaggaatttgcataagacagttatgcaaaatggagctggaggagctttatttgtgcacagagatactcctgagaataaccctgatactccatttgatttcacaccagaaaactataagaggatagaggcaattgtaaaaaactatccagaaggccataaagcagcagctgttcttccagtcctggatttagcccaaaggcagaatgggtggttgcccatctctgctatgaacaaggttgcagaagttttacaagtacctccaatgagagtatatgaagtagcaactttttatacaatgtataatcgaaagccagttggaaagtatcacattcaggtctgcactactacaccctgcatgcttcgaaactctgacagcatactggaggccattcagaaaaagcttggaataaaggttggggagactacacctgacaaacttttcactcttatagaagtggaatgtttaggggcctgtgtgaacgcaccaatggttcaaataaatgacaattactatgaggatttgacagctaaggatattgaagaaattattgatgagctcaaggctggcaaaatcccaaaaccagggccaaggagtggacgcttctcttgtgagccagctggaggtcttacctctttgactgaaccacccaagggacctggatttggtgtacaagcaggcctttaatttatattgaactgtaaatatgtcactagagaaataaaatatggacttccaatctacgtaaactta

SEQ ID NO: 157712 - DNA, 942 bp, Homo sapiens
  Payload ID: 10904
  Gene Symbol: NDUFV2
  Gene Name: NADH dehydrogenase (ubiquinone) flavoprotein 2, 24kDa
  ENST ID: ENST00000400033
  CDS Start-End: 118-876
caaggtgcataagatttttcctgaaggtaatactaacagattgggcatggggtccgagggtattctaggtggaaaggacaacttaaagtcttgttggcaagaaaaagatcggtatgtatgagaagccaccctctgctgttggagaccttacagacaatttgtttctacaaaaatggaaagggaagacatgtaaggaatttgcataagacagttatgcaaaatggagctggaggagctttatttgtgcacagagatactcctgagaataaccctgatactccatttgatttcacaccagaaaactataagaggatagaggcaattgtaaaaaactatccagaaggccataaagcagcagctgttcttccagtcctggatttagcccaaaggcagaatgggtggttgcccatctctgctatgaacaaggttgcagaagttttacaagtacctccaatgagagtatatgaagtagcaactttttatacaatgtataatcgaaagccagttggaaagtatcacattcaggtctgcactactacaccctgcatgcttcgaaactctgacagcatactggaggccattcagaaaaagcttggaataaaggttggggagactacacctgacaaacttttcactcttatagaagtggaatgtttaggggcctgtgtgaacgcaccaatggttcaaataaatgacaattactatgaggatttgacagctaaggatattgaagaaattattgatgagctcaaggctggcaaaatcccaaaaccagggccaaggagtggacgcttctcttgtgagccagctggaggtcttacctctttgactgaaccacccaagggacctggatttggtgtacaagcaggcctttaatttatattgaactgtaaatatgtcactagagaaataaaatatggacttccaatctacgtaaactta

SEQ ID NO: 157713 - DNA, 854 bp, Homo sapiens
  Payload ID: 10904
  Gene Symbol: NDUFV2
  Gene Name: NADH dehydrogenase (ubiquinone) flavoprotein 2, 24kDa
  ENST ID: ENST00000577703
  CDS Start-End: 115-234
gcgtgccgtccgggtcgcctaggcctggggtcgggagcgcgcacgctgtgcgccctgggcgcgctcgggattctcgcctggcgcggctggggaaggtgaacagtgtggcccgccatgttcttctccgcggcgctccgggcccgggcggctggcctcaccgcccactgggtaaggaggctcaagctgagcccggcgctgccgccgcccttctcttgctctccgtgtctcccttagttttgggcgcaggagagccctgggctctgcacgggcctgcaggcggcggcaaggacactgcggccttagccctcttagggaggccgctgcagccccaccgtgagaagccccgagggagggttgccatactgggaagtgtactcctagtttggtcgaggaggacagaaaagaggggctgcttggtgatatatatatatatgtttgtttgtttttgctgttttgctgtagcgcagaatctaggcctgctctggccagatcagtttcgaagaccgtcgctccgaaggaggcacctctcgtttcaagcctagtgacctcgatgcttttaggttgcagcatactggagagctctggcttgcttcgtgaaggcttagggagaacttcattagggctggaaaagggtggccaatgtttgatttactgcagttgtgctttgcatatcggaaatgctggctaaataaacggtatcaaactaactctgaaagaacggcgccgcaaataacagcacccaattaaagaaccacaggattttagagattaaatgatctttttgagatccaagtacatctcatgggaagacatgtaaggaatttgcataagacagttatgcaaaatggagctgg

SEQ ID NO: 157714 - DNA, 868 bp, Homo sapiens
  Payload ID: 10904
  Gene Symbol: NDUFV2
  Gene Name: NADH dehydrogenase (ubiquinone) flavoprotein 2, 24kDa
  ENST ID: ENST00000497577
  CDS Start-End: 50-115
cgggattctcgcctggcgcggctggggaaggtgaacagtgtggcccgccatgttcttctccgcggcgctccgggcccgggcggctggcctcaccgcccactggcgcagaatctaggcctgctctggccagatcagtttcgaagaccgtcgctccgaaggaggcacctctcgtttcaagcctagtgacctcgatgcttttaggttgcagcatactggagagctctggcttgcttcgtgaaggcttagggagaacttcattagggctggaaaagggtggccaatgtttgatttactgcagttgtgctttgcatatcggaaatgctggctaaataaacggtatcaaactaactctgaaagaacggcgccgcaaataacagcacccaattaaagaaccacaggattttagagattaaatgatctttttgagatccaagtacatctcatggtaggcaaggaaattgaattgcagagaagttgaaacactccttcacgttaatctaaaaatgcagatttccagaaatgtcgattataacaacagggcctgttacacaagtaatactggaaagaagccttagttttgtttgttttctaagagtgaaataggttaagtcagttctcagcaagagggagctagtgtatattcattgagaatgaattcagggctttagagttagactcgagtttggatgttagcttaactgccttttgtggctctatgactttgtgctgttaatcttcctcagtttcttcagttgtaaaatgggaatattcctttttgcagagttcagtctttcaataaacatttgaagtcttactgtacgtcatgcactgctgagctctagttaacagtgtggataataatgatagt

SEQ ID NO: 157715 - DNA, 4676 bp, Homo sapiens
  Payload ID: 10905
  Gene Symbol: NDUFV3
  Gene Name: NADH dehydrogenase (ubiquinone) flavoprotein 3, 10kDa
  Uniprot ID: P56181
  ENST ID: ENST00000340344
  CDS Start-End: 67-393
ggctgttcaggcgcgggtgcgcgcgcagctgctgtggccctgcttggtgcgcccgctgtcaccgccatggctgccccgtgtttgctgcggcaaggacgagccggggcgctgaagactatgctccaggaagcccaggtgtttcgaggacttgcttctacggtttctttgtctgcggaatcagggaagagtgaaaagggtcagccacagaattccaagaagcaaagtccaccaaaaaagccagccccagtgcctgctgagccgtttgacaacactacctacaagaacctgcagcatcatgactacagcacgtacaccttcttagacctcaacctcgaactctcaaaattcaggatgcctcagccctcctcaggccgggagtcacctcgacactgagggccctcggtgtgaagatgaaccttccaccgtcttcactgcatcctggagtgcaaaaataaaatccactcaagagtcacaaggcccgctgtgcataatcggtttcacttttacctttttttttttttttttttttttgagacagggtctcactctgtcacccaggctggagtgcagtggcacattctcggctcactgcaacttccgcctcctgggttcaagtgattctcccacctcagcctcccaagtaggtgggattacaggtactcaccaccaggtccagctaacttttgtatttttagtagagacagggtttcaccatgttggccaggctggtctcgaactcctgacctcagatggtctgcccacctccgcctcccaaagtgctgggattacaggcgtgagccactgcgcccggccactttcacactttttacagtgagtggtgaattagcaacagtaacactgattatccaacatatattttggaatatctactatgtgcaaggaatttttcttaaactctaaggttatgaatcactgggcaaatccatataattagagaattttaagtgctttagagcggtgtgattctactgtgctcagcctagtcaatttcgcattaaactgattatcagctgagtatcaataatgtaatagtgacttcttttattttttttgagatggagtctctgtttcccaggctggagtccagcggcacaatctaaactcactgcaacctccgcctcctgggttcaagtgattctcctgccttacttagcctcttgagtagctggtactacaggctcacgccaccatgcctggctaattttttttgtatttttagtagagatggggtttcaccatcttggccaggctggtcttaaactcctgacctcatgatctacctgcctcagcctcccaaaatgctggcattataggcgtgagccactgcacccagccagtaatagtgacttctaatcctacagccctggtttttgatcattagaaacaggagttttggccaggtgcagtggataattcctgtaatcccagcgctttgggagggcgaggcgggtggagcacctgaggtcaggagttgagaccggcctggccaacatagtgaaaccccatctctactaaaaatacaaaaatcagccaggcatgctagtgggtacctgtaatcccagctactcaggaagctgaggcaggagaatcatttgaacctgggaggcggaggttgcagtgagcaagatcgtgccattgtactccagcctgggcaacaggagtgaaactcaatcaaaaaaaaggaacaggaatgttactaattttaactactgcattgcaaacaaattgtattgcagtattttaccatcagaaaaggaagggaattgttttgtttgcctctgttagatattttatataaacttgaggacattttcattggtgagattcggaagaggtgaagtttcttgcagtacagggacgaagtaggaagaggtgaagtttcgtgcagtacagggacggagtaggaagaggtgaagtttcgtgcagtacagggacggagtaggaagaggtgaagtttcgtgcggtgcagggacggagtaggaagaggtgaagtttcgtgcggtgcagggacggagtaggaagaggtgaagtttcgtgcggtgcagggacggagtaggaagaggtgaagttttgtgcggtgcagggacgaagttgctccccgctggccacaggcactcaatgagctattttacctatttagggtttctgggttggccaagtaacctcccatcccttgtgatagataactttaagtcacacctttgggggcaatgtggggggctcctgtgcatcacatggagcacgctcccccagcactctgcagagacagacccccagtctgacttagagaaagtaaccaatgtaggtgagggccagggcacggtggcttacgcctgtaatcccagcactttgggaagccaaggcggatggatcacttgaggtcaggagtttgagaccagcctggccaacatggtgaaaccctgtgtctactaaaaatacaaaaattagccaactgtggtggtgcgtgcctgtaatcccagctattcaagaggctgaggcaggagaatcgcttgaacccgggaggcggggtttgcagtaagccgagatcatgccattgcattcagtctgggtgacagcgtgagactgcatctcaaaaaaaaatttttttttttaaatatcaaaattgaaaactagtattgtggtcatctgcctcaaattgtgttaccacacgggagacttagcaactcagccagattcttctaaacacattttttataataaaagtggtaaaactacattaccaaaaagaaaatagtaaacttacctaaaatccactatgctaacccaccctttttttttttttttttttttttttttttttgagacagcctcactcttgcccggaggagtggtgcgatctcagctcactgcagcctcgtcctcccaggcccaagcaatcctcccatctcagcccactttgtagctgggactgtaggcactggccaccatgtccgcctaatttttctattttttgtagagacagggttcaagagatctgcctgcctcggccccagaaagttctgggattgcaggcgtgagcccccattcccagccattaacatcttacaggattccccagtggtggtggtaggtgtaaccattttaatgtacctacaacttttctatcctgctatttgcattttttggtttttcatttaatagttctcaagctgggatccgtggaactactgtgatgggcggtgatgctttggaaatggaaattcccttaatattaaaatgaacatgaatatattttgatttgcatatatttttaagataaagcatgagacttgtataaagttctttcctggctgggcgcggtggctcatgcctgtaatccctgcactttggaaggctgaggcagatggatcacctgaggttgggagtttgagaccagcctgactaacatggtgaaaccccctctctactaaaattacaaaattagccgggcgtgttggtgcatgcctgtaatcccagctactcaagaggctgaggcaggaaaatcacttgaacccaggaggcagaggctgcagtgagtggagattgcagcatcgcactacagcctgggcaacaacagcaaaactccgtctcaaaaaaataaagttcttcccttagaactagtcctgttgggctagtctttctgggattttggtttactctcctccacccattggaagggcttaaaaccgaatagccagcaccaagcacagctctgcattttgtagctatcactgcagatgatttcttgatagtccatctggtggcaatacagtggtcacccaaggggccattgtttgggtctatgtgatttcccacgttctgttggaggccgggcgcagtgcctcacgcctgtaatcccagcactttgggaggctgaggtgggcagatcacgaggtcaggagatcgagaccgtcctggctaacacggtgaaaccctgtctctactaaaaatacaaaaaattggccaggtgcggtggctcacgcctgtaatcccagcactttgggaggctgaggtgggcagatctcgaggtcaggagatcgagaccatcctggataacacggtgaaaccccgtctctattaaaaatacaaaaaattagccgggcatggtagcgggcgcctgtagtcccagctacttgggaggctgaggcaggagaatggcgtgaacccaggaggcggagcttgcagtgaaccgagatagcctcactgcactccagcctgggcgaaagagcaagactccgtctcaaaaaaaaaaaacaaaaaaaaaattagccgggcgtggtggtgggcgcctgtagtcccagctactcgggaggctgagacaggagaatgatgtgaacccgggaggcagagcttgcagtgagccgagattgtgccactgcactccagcctgggcgacagagcaagactccgtctcaaaaaataaattaattaattaaattaaataagtgggtgttttaagtgctcagcttccttggttctaccaccttctctccctgaccctccttccctttccccctgaccttggcctttattctagaacggatctgaagcaataggatataaaaaattcacaactgctaaaacagtgttccttctagtgtaattttcacccttagagacctgtctgtaataaacattatttgaaatgcctacta

SEQ ID NO: 157716 - DNA, 1575 bp, Homo sapiens
  Payload ID: 10905
  Gene Symbol: NDUFV3
  Gene Name: NADH dehydrogenase (ubiquinone) flavoprotein 3, 10kDa
  Uniprot ID: P56181
  ENST ID: ENST00000354250
  CDS Start-End: 70-1491
ggcggctgttcaggcgcgggtgcgcgcgcagctgctgtggccctgcttggtgcgcccgctgtcaccgccatggctgccccgtgtttgctgcggcaaggacgagccggggcgctgaagactatgctccaggaagcccaggtgtttcgaggacttgcttctacggtttctttgtctgcggaatcagggaagagtgaaaagggtcagccacagaattccaagaagcaaagtccaccaaaaaatgtagtggaaccaaaggagaggggcaagctcctagccacccagacagcagctgaattgtctaaaaacttatcttcacccagttcttacccgccagctgtgaataagggcaggaaggtagctagtcccagtcccagtggcagcgtgctattcacagatgaaggggttccgaaatttttgtcaagaaagactttggtagagtttccacagaaagttctgtctccattcagaaaacagggctctgattcagaagctcgtcaggtgggtcggaaagtgacgtcgccttcgtcttcatcctcttccagctcctctgattctgaatctgatgatgaggctgacgtttcagaggtcactcctcgagtggtgagcaaaggcagaggggggcttcgaaaaccagaggcctctcattcctttgaaaacagagccccccgagttacagtatcagcaaaagagaaaaccttgctgcagaagccgcatgtggacattactgatccagagaagccccaccagccaaagaagaaagggtcccctgctaagccatcagaaggcagggaaaatgcgagaccaaaaaccacaatgcccagatctcaagtagatgaagagtttttgaagcaaagtttaaaggaaaaacaattgcagaaaacatttagattaaatgaaatagataaagaaagccaaaagccatttgaagttaaaggacccttacctgtccacacaaaatcagggttgtctgcgccaccgaagggcagcccagcgcctgctgtgttggcagaagaggccagagcagaggggcagctgcaagccagtcctcctggggcggcagaggggcatctggaaaaacccgtgccagagccccagcgcaaggcggcccctcccctgcccagaaaggaaacctcagggacgcagggaatagaaggccacctgaagggtggacaggcaatcgtggaagatcagataccaccaagcaatttggagacagttcctgttgagaataaccacggtttccatgaaaagacagcagcgctgaagcttgaggccgagggcgaggccatggaagatgcagccgcgccaggggacgaccgaggcggcacacaggagccagccccagtgcctgctgagccgtttgacaacactacctacaagaacctgcagcatcatgactacagcacgtacaccttcttagacctcaacctcgaactctcaaaattcaggatgcctcagccctcctcaggccgggagtcacctcgacactgagggccctcggtgtgaagatgaaccttccaccgtcttcactgcatcctggagtgcaaaaataaaatccactcaagagtcacaagg

SEQ ID NO: 157717 - DNA, 621 bp, Homo sapiens; identical to SEQ ID NO: 157458
  Payload ID: 10906
  Gene Symbol: NDUFA10
  Gene Name: NADH dehydrogenase [ubiquinone] 1 alpha subcomplex subunit 10, mitochondrial
  ENST ID: ENST00000627686
  CDS Start-End: 1-400

SEQ ID NO: 157718 - DNA, 1489 bp, Homo sapiens; identical to SEQ ID NO: 157462
  Payload ID: 10906
  Gene Symbol: NDUFA10
  Gene Name: NADH dehydrogenase [ubiquinone] 1 alpha subcomplex subunit 10, mitochondrial
  ENST ID: ENST00000628011
  CDS Start-End: 45-1112

SEQ ID NO: 157719 - DNA, 776 bp, Homo sapiens; identical to SEQ ID NO: 157461
  Payload ID: 10906
  Gene Symbol: NDUFA10
  Gene Name: NADH dehydrogenase [ubiquinone] 1 alpha subcomplex subunit 10, mitochondrial
  ENST ID: ENST00000626554
  CDS Start-End: 43-776

SEQ ID NO: 157720 - DNA, 1557 bp, Homo sapiens; identical to SEQ ID NO: 157456
  Payload ID: 10906
  Gene Symbol: NDUFA10
  Gene Name: NADH dehydrogenase [ubiquinone] 1 alpha subcomplex subunit 10, mitochondrial
  ENST ID: ENST00000630225
  CDS Start-End: 6-1178

SEQ ID NO: 157721 - DNA, 662 bp, Homo sapiens; identical to SEQ ID NO: 157459
  Payload ID: 10906
  Gene Symbol: NDUFA10
  Gene Name: NADH dehydrogenase [ubiquinone] 1 alpha subcomplex subunit 10, mitochondrial
  ENST ID: ENST00000628405
  CDS Start-End: 1-390

SEQ ID NO: 157722 - DNA, 699 bp, Homo sapiens; identical to SEQ ID NO: 157455
  Payload ID: 10906
  Gene Symbol: NDUFA10
  Gene Name: NADH dehydrogenase [ubiquinone] 1 alpha subcomplex subunit 10, mitochondrial
  ENST ID: ENST00000626935
  CDS Start-End: 7-612

SEQ ID NO: 157723 - DNA, 4915 bp, Homo sapiens; identical to SEQ ID NO: 157453
  Payload ID: 10906
  Gene Symbol: NDUFA10
  Gene Name: NADH dehydrogenase [ubiquinone] 1 alpha subcomplex subunit 10, mitochondrial
  ENST ID: ENST00000630647
  CDS Start-End: 102-1169

SEQ ID NO: 157724 - DNA, 434 bp, Homo sapiens; identical to SEQ ID NO: 157460
  Payload ID: 10906
  Gene Symbol: NDUFA10
  Gene Name: NADH dehydrogenase [ubiquinone] 1 alpha subcomplex subunit 10, mitochondrial
  ENST ID: ENST00000627439
  CDS Start-End: 1-417

SEQ ID NO: 157725 - DNA, 562 bp, Homo sapiens; identical to SEQ ID NO: 157457
  Payload ID: 10906
  Gene Symbol: NDUFA10
  Gene Name: NADH dehydrogenase [ubiquinone] 1 alpha subcomplex subunit 10, mitochondrial
  ENST ID: ENST00000630302
  CDS Start-End: 13-297

SEQ ID NO: 157726 - DNA, 1313 bp, Homo sapiens; identical to SEQ ID NO: 157454
  Payload ID: 10906
  Gene Symbol: NDUFA10
  Gene Name: NADH dehydrogenase [ubiquinone] 1 alpha subcomplex subunit 10, mitochondrial
  ENST ID: ENST00000626224
  CDS Start-End: 24-1313

SEQ ID NO: 157727 - DNA, 580 bp, Homo sapiens
  Payload ID: 10907
  Gene Symbol:
  Gene Name: NADH dehydrogenase [ubiquinone] 1 alpha subcomplex subunit 7  [Source:UniProtKB/Swiss-Prot
  Acc:O95182]
  Uniprot ID: O95182
  ENST ID: ENST00000598884
  CDS Start-End: 22-363
cttcagtatcgcggacggaagatggcgtccgccacccgtctcatccagcggctgcggaactgggcgtccgggcatgacctgcaggggaagctgcagctacgctaccaggagatctccaagcgaactcagcctcctcccaagctccctgtgggtcctagccacaagctctccaacaattactattgcactcgcgatggccgccgggaatctgtgcccccttccatcatcatgtcgtcgcagaaggcgctggtgtcaggcaagccagcagagagctctgctgtagctgccactgagaagaaggcggtgactccagctcctcccataaagaggtgggagctgtcctcggaccagccttacctgtgacactgcaccctcacggccacccgactactttgcctccttggatttcctccagggagaatgtgacctaatttatgacaaatacgtagagctcagccgcgggcgccgcagaactcaggggcttgggccccgccccaaccccgcgcgtgcgcgtgcgcagggataagagagcggtctggacagcgcgtggccggcgccgctgtggggacagcatgagcgg

SEQ ID NO: 157728 - DNA, 1857 bp, Homo sapiens
  Payload ID: 10908
  Gene Symbol: NOXRED1
  Gene Name: NADP-dependent oxidoreductase domain containing 1
  Uniprot ID: Q6NXP6
  ENST ID: ENST00000380835
  CDS Start-End: 168-1247
aaattcagaatctgggagtagagaggtgctgaagcccatcatcatgagtgcttgtgacctgggcacacacaccatcatacacacacctcctacatagacccctcttctaccgggacagggagccaaattgattagtgtctatcactgcaggaaatagtggcttggaaatggacatgctccaggaccttgagtccctgcagtttgagtatggggttccagaggaagatcgtatctggctgtatttgcagggccgttctcggggactgatgatcgaggcttgtgcccatgcaaccttcttctgcaaactattatataatttgagagcatcattaaataagaatcaaagttccagacatctctcaattggctcccttaattcagccactcctgaagagtttaaggtgggcatcattggaggtggccaccttgggaagcagctggctggcacactgctgcagcttggccccatccctgctgaaagcctgcggatctccactcggaggccagagactctgggtgagctccagaagctgggaatcaaatgcttttaccataacgctgatctggtgagttgggccgatgtgatattcctctgctgcttgccgtctcagctgcctaatatctgcgtagaaatttacaccagccttgagaaggccagcattgtgtacagctttgtagctgccatcccactacccaggctgaaactactgttgaaccacaccaatatcttgcggcctcagtatcagtatgatgaagattctgtcagcgtctggggggccaataagggagtcatagctgctctccaagatcctacgattcttcaagctacctgtccctacagtcctgctgggggaataatcctcaatatcaagtggttggagggagtgttctatgcggccctaaacatatgcacagcaagaaacatggcccactcccaagtgctgcagcttctgagtgaactctttctctccgtgcactttgaagactgtgggaaagacacagcatcttgcccaaagttgcaattaacagattttgtcagcaaagcctatggcaagaatttgtctcaggaaaggcctttcccctggtttgatctgactgctgtgcaactcaaggaaactccgtttagccagcatctctcaagtagtcctgttctccaagaccaccttacccatctatactgtgcttcatttggcatctccctaaccaaagaacagccagtcatttccacaggctttccatcccaataagagaactcaggaatcaggattttttcccactcacagattttccctataatagttgtgccctgattatcacaattgactgtgggagtcttgtggctgtattgtgtttgccacatgatagacatcaggaattataaaactgtactgatgactctttaaaatgtagaataaaacaagtggtcctatccatcaatatgtatctggctctcagaagcaactagtgaaactacacaacctaacttaagtaagctgctcccgcagaaaagtcttgttaatacaaattatttctcttctaaaattaaagaagttataatgttataagttttagacaattacatactgcagcttcttttccaataaatcaagtttcaatccatttgccagcagtaggtagctggaaaaagatacagtttgattttctcacaattttggacagagaagtgaaggtatggtaaaccatcttaattgaattatggcttgtatcatgcttattttgactatatatgactgttctggtactatcttatttacagctgttcccatttaaaccatttaaaaaactggtatttaatggctaaaactaattttgcaaaatatagatctatactgcaaa

SEQ ID NO: 157729 - DNA, 734 bp, Homo sapiens
  Payload ID: 10908
  Gene Symbol: NOXRED1
  Gene Name: NADP-dependent oxidoreductase domain containing 1
  ENST ID: ENST00000555603
  CDS Start-End: 65-734
ttccaggatcagaagtactgaggagcagagccaatcttctctgtttggaaatagtggcttggaaatggacatgctccaggaccttgagtccctgcagtttgagtatggggttccagaggaagatcgtatctggctgtatttgcagggccgttctcggggactgatgatcgaggcttgtgcccatgcaaccttcttctgcaaactattatataatttgagagcatcattaaataagaatcaaagttccagacatctctcaattggctcccttaattcagccactcctgaagagtttaaggtgggcatcattggaggtggccaccttgggaagcagctggctggcacactgctgcagcttggccccatccctgctgaaagcctgcggatctccactcggaggccagagactctgggtgagctccagaagctgggaatcaaatgcttttaccataacgctgatctggtgagttgggccgatgtgatattcctctgctgcttgccgtctcagctgcctaatatctgcgtagaaatttacaccagccttgagaaggccagcattgtgtacagctttgtagctgccatcccactacccaggctgaaactactgttgaaccacaccaatatcttgcggcctcagtatcagtatgatgaagattctgtcagcgtctggggggccaataagggagtcatagctgctctccaagatcctacgattcttcaagctacctgtccct

SEQ ID NO: 157730 - DNA, 2495 bp, Homo sapiens
  Payload ID: 10909
  Gene Symbol: NDOR1
  Gene Name: NADPH dependent diflavin oxidoreductase 1
  Uniprot ID: Q9UHB4
  ENST ID: ENST00000344894
  CDS Start-End: 109-1902
acttccggtcgacggcggaaggcggaaggcggagcggtccctgcaacccggccggcgggaactgccttctagtttttagtctcagaccagaccaccgggcgcaccccgatgccgagcccgcagcttctggtgctcttcggcagccagacaggcacggctcaggatgtgtcggagagactgggtcgcgaggcccggcgccggcggcttggctgccgggtgcaggccctggactcctacccggtggtgaatctgattaacgagcccctggtgatatttgtttgtgcaactacaggccaaggagacccccctgacaacatgaagaacttctggaggtttatattccggaagaacctgccctccactgccctctgtcagatggactttgccgtcctgggcctcggggactcctcatacgccaagttcaacttcgtggccaagaagctgcaccgacggctactgcagcttgggggcagcgccctcctgcccgtgtgcctgggcgatgaccagcatgagctggggcccgacgctgctgtggacccctggctgcgagacttgtgggacagggttctggggctgtacccgccgcctccgggcctcactgagatccctcccggagtccccctgccctccaagttcaccctgctgttcctccaagaggcacccagcacgggctctgaggggcagcgggtagctcaccccggctctcaggagcccccgtcagagtcgaagcccttcctagcacccatgatctccaaccagagagtcaccggcccctcccacttccaggacgttcggctgattgagtttgacatcttgggctctggcatcagctttgctgctggtgatgtggtgctgattcagccctccaactcggctgcccatgtccagcggttctgccaggtgctgggcctggaccctgaccagctcttcatgctgcagccgcgggagccagatgtctcctcccccacgaggctgccccagccctgctccatgcggcacctcgtgtcccactacctggacatcgccagcgtgcctcgccgctccttcttcgaactcctggcctgtctatccctccatgagctggagcgggagaagctgctggagttcagttctgcccaaggccaggaggagctctttgaatactgcaaccggccccgcaggaccatcctggaggtgctctgtgacttcccgcacacagctgccgccatccctcccgactacctgttggacctcatccccgttatccggccgagggccttctccatcgcctcctcgctgctgactcacccctcacggctgcagatcctcgtggctgtagtgcagttccagactcgcctcaaggagccccgccggggcctctgctcctcctggctggcatccctggaccctgggcaaggacctgtccgggtgcccctctgggtgcggcctgggagtctggccttcccagagacaccagacacacctgtgatcatggtggggcctggcactggggtagcccccttccgagcagccatccaggagcgtgtggcccagggccagactggaaacttcttgttttttggctgccgctggcgggaccaagacttctactgggaggctgagtggcaggagctggagaagcgggactgtctgaccctcatccctgccttctcccgggaacaggagcagaaagtatatgtgcagcaccggctccgggagctggggtcgcttgtgtgggaactgctggaccgccagggtgcatacttctacctggcaggcaacgccaagtccatgccagcggacgtctcggaagccctgatgtccatcttccaggaggagggtggactctgcagcccggacgcagccgcgtatctagccaggctccagcagacacggcgcttccagacagagacgtgggcctgaggcccgcggctgcccgtgccccctctgacagccatcctcctgggagcccaggaaggcatccacgagggagctcctggccagcagccgtcatcctctcggaccagccagctggtcctctgggaacagccagctcccgagcacagccgcactcctgttgaccctggatcccaccctttgagcctgaccccactgcagcctctgcccagccagccctgcgctcccccaccctgacagtgagctgtgtcctcgtccccccacccccttcccagtcaaggtggtggcctgggccgctccacctcaccggtgcagtgacccaggacggcatcagcagcccagtgagcaccaggggtggcatagggcacccatgaggctgcgctgcactcctctgccctggggccacctcggctgctgcagcctgcccagcagcacattccagtcactgcccccgcactcccacagggctcaggctgggctcagaggccactgagatgccagctccttgagagcagtgggggtgtcccaggccagagcagcctcttcctctcctggtcccagaaaaacccttgcagtaaatggtggcctctgggtggtta

SEQ ID NO: 157731 - DNA, 2497 bp, Homo sapiens
  Payload ID: 10909
  Gene Symbol: NDOR1
  Gene Name: NADPH dependent diflavin oxidoreductase 1
  Uniprot ID: Q9UHB4
  ENST ID: ENST00000371521
  CDS Start-End: 84-1904
aaggcggagcggtccctgcaacccggccggcgggaactgccttctagtttttagtctcagaccagaccaccgggcgcaccccgatgccgagcccgcagcttctggtgctcttcggcagccagacaggcacggctcaggatgtgtcggagagactgggtcgcgaggcccggcgccggcggcttggctgccgggtgcaggccctggactcctacccggtggtgaatctgattaacgagcccctggtgatatttgtttgtgcaactacaggccaaggagacccccctgacaacatgaagaacttctggaggtttatattccggaagaacctgccctccactgccctctgtcagatggactttgccgtcctgggcctcggggactcctcatacgccaagttcaacttcgtggccaagaagctgcaccgacggctactgcagcttgggggcagcgccctcctgcccgtgtgcctgggcgatgaccagcatgagctggggcccgacgctgctgtggacccctggctgcgagacttgtgggacagggttctggggctgtacccgccgcctccgggcctcactgagatccctcccggagtccccctgccctccaagttcaccctgctgttcctccaagaggcacccagcacgggctctgaggggcagcgggtagctcaccccggctctcaggagcccccgtcagagtcgaagcccttcctagcacccatgatctccaaccagagagtcaccggcccctcccacttccaggacgttcggctgattgagtttgacatcttgggctctggcatcagctttgctgctggtgatgtggtgctgattcagccctccaactcggctgcccatgtccagcggttctgccaggtgctgggcctggaccctgaccagctcttcatgctgcagccgcgggagccagatgtctcctcccccacgaggctgccccagccctgctccatgcggcacctcgtgtcccactacctggacatcgccagcgtgcctcgccgctccttcttcgaactcctggcctgtctatccctccatgagctggagcgggagaagctgctggagttcagttctgcccaaggccaggaggagctctttgaatactgcaaccggccccgcaggaccatcctggaggtgctctgtgacttcccgcacacagctgccgccatccctcccgactacctgttggacctcatccccgttatccggccgagggccttctccatcgcctcctcgctgctgactcacccctcacggctgcagatcctcgtggctgtagtgcagttccagactcgcctcaaggagccccgccggggcctctgctcctcctggctggcatccctggaccctgggcaaggacctgtccgggtgcccctctgggtgcggcctgggagtctggccttcccagagacaccagacacacctgtgatcatggtggggcctggcactggggtagcccccttccgagcagccatccaggagcgtgtggcccagggccagactggaaacttcttgttttttggctgccgctggcgggaccaagacttctactgggaggctgagtggcaggagctggagaagcgggactgtctgaccctcatccctgccttctcccgggaacagcccccagccctgttctctgccctacaggagcagaaagtatatgtgcagcaccggctccgggagctggggtcgcttgtgtgggaactgctggaccgccagggtgcatacttctacctggcaggcaacgccaagtccatgccagcggacgtctcggaagccctgatgtccatcttccaggaggagggtggactctgcagcccggacgcagccgcgtatctagccaggctccagcagacacggcgcttccagacagagacgtgggcctgaggcccgcggctgcccgtgccccctctgacagccatcctcctgggagcccaggaaggcatccacgagggagctcctggccagcagccgtcatcctctcggaccagccagctggtcctctgggaacagccagctcccgagcacagccgcactcctgttgaccctggatcccaccctttgagcctgaccccactgcagcctctgcccagccagccctgcgctcccccaccctgacagtgagctgtgtcctcgtccccccacccccttcccagtcaaggtggtggcctgggccgctccacctcaccggtgcagtgacccaggacggcatcagcagcccagtgagcaccaggggtggcatagggcacccatgaggctgcgctgcactcctctgccctggggccacctcggctgctgcagcctgcccagcagcacattccagtcactgcccccgcactcccacagggctcaggctgggctcagaggccactgagatgccagctccttgagagcagtgggggtgtcccaggccagagcagcctcttcctctcctggtcccagaaaaacccttgcagtaaatggtggcctctgggtggtta

SEQ ID NO: 157732 - DNA, 1829 bp, Homo sapiens
  Payload ID: 10909
  Gene Symbol: NDOR1
  Gene Name: NADPH dependent diflavin oxidoreductase 1
  Uniprot ID: Q9UHB4
  ENST ID: ENST00000458322
  CDS Start-End: 29-1801
ctcagaccagaccaccgggcgcaccccgatgccgagcccgcagcttctggtgctcttcggcagccagacaggcacggctcaggatgtgtcggagagactgggtcgcgaggcccggcgccggcggcttggctgccgggtgcaggccctggactcctacccggtggtgaatctgattaacgagcccctggtgatatttgtttgtgcaactacaggccaaggagacccccctgacaacatgaagaacttctggaggtttatattccggaagaacctgccctccactgccctctgtcagatggactttgccgtcctgggcctcggggactcctcatacgccaagttcaacttcgtggccaagaagctgcaccgacggctactgcagcttgggggcagcgccctcctgcccgtgtgcctgggcgatgaccagcatgagctggggcccgacgctgctgtggacccctggctgcgagacttgtgggacagggttctggggctgtacccgccgcctccgggcctcactgagatccctcccggagtccccctgccctccaagttcaccctgctgttcctccaagaggcacccagcacgggctctgaggggcagcgggtagctcaccccggctctcaggagcccccgtcagagtcgaagcccttcctagcacccatgatctccaaccagagagtcaccggcccctcccacttccaggacgttcggctgattgagtttgacatcttgggctctggcatcagctttgctgctggtgatgtggtgctgattcagccctccaactcggctgcccatgtccagcggttctgccaggtgctgggcctggaccctgaccagctcttcatgctgcagccgcgggagccagatgtctcctcccccacgaggctgccccagccctgctccatgcggcacctcgtgtcccactacctggacatcgccagcgtgcctcgccgctccttcttcgaactcctggcctgtctatccctccatgagctggagcgggagaagctgctggagttcagttctgcccaaggccaggaggagctctttgaatactgcaaccggccccgcaggaccatcctggaggtgctctgtgacttcccgcacacagctgccgccatccctcccgactacctgttggacctcatccccgttatccggccgagggccttctccatcgcctcctcgctgctgatcctcgtggctgtagtgcagttccagactcgcctcaaggagccccgccggggcctctgctcctcctggctggcatccctggaccctgggcaaggacctgtccgggtgcccctctgggtgcggcctgggagtctggccttcccagagacaccagacacacctgtgatcatggtggggcctggcactggggtagcccccttccgagcagccatccaggagcgtgtggcccagggccagactggaaacttcttgttttttggctgccgctggcgggaccaagacttctactgggaggctgagtggcaggagctggagaagcgggactgtctgaccctcatccctgccttctcccgggaacaggagcagaaagtatatgtgcagcaccggctccgggagctggggtcgcttgtgtgggaactgctggaccgccagggtgcatacttctacctggcaggcaacgccaagtccatgccagcggacgtctcggaagccctgatgtccatcttccaggaggagggtggactctgcagcccggacgcagccgcgtatctagccaggctccagcagacacggcgcttccagacagagacgtgggcctgaggcccgcggctgcccgtgccccctctga

SEQ ID NO: 157733 - DNA, 2315 bp, Homo sapiens
  Payload ID: 10909
  Gene Symbol: NDOR1
  Gene Name: NADPH dependent diflavin oxidoreductase 1
  Uniprot ID: Q9UHB4
  ENST ID: ENST00000427047
  CDS Start-End: 73-1638
gtccctgcaacccggccggcgggaactgccttctagtttttagtctcagaccagaccaccgggcgcaccccgatgccgagcccgcagcttctggtgctcttcggcagccagacaggcacggctcaggatgtgtcggagagactgggtcgcgaggcccggcgccggcggcttggctgccgggtgcaggccctggactcctacccggtggtgaatctgattaacgagcccctggtgatatttgtttgtgcaactacaggccaaggagacccccctgacaacatgaagaacttctggaggtttatattccggaagaacctgccctccactgccctctgtcagatggactttgccgtcctgggcctcggggactcctcatacgccaagttcaacttcgtggccaagaagctgcaccgacggctactgcagcttgggggcagcgccctcctgcccgtgtgcctgggcgatgaccagcatgagctgggcctgccctccaagttcaccctgctgttcctccaagaggcacccagcacgggctctgaggggcagcgggtagctcaccccggctctcaggagcccccgtcagagtcgaagcccttcctagcacccatgatctccaaccagagagtcaccggcccctcccacttccaggacgttcggctgattgagtttgacatcttgggctctggcatcagctttgctgctggtgatgtggtgctgattcagccctccaactcggctgcccatgtccagcggttctgccaggtgctgggcctggaccctgaccagctcttcatgctgcagccgcgggagccagatgtctcctcccccacgaggctgccccagccctgctccatgcggcacctcgtgtcccactacctggacatcgccagcgtgcctcgccgctccttcttcgaactcctggcctgtctatccctccatgagctggagcgggagaagctgctggagttcagttctgcccaaggccaggaggagctctttgaatactgcaaccggccccgcaggaccatcctggaggtgctctgtgacttcccgcacacagctgccgccatccctcccgactacctgttggacctcatccccgttatccggccgagggccttctccatcgcctcctcgctgctgactcacccctcacggctgcagatcctcgtggctgtagtgcagttccagactcgcctcaaggagccccgccggggcctctgctcctcctggctggcatccctggaccctgggcaaggacctgtccgggtgcccctctgggtgcggcctgggagtctggccttcccagagacaccagacacacctgtgatcatggtggggcctggcactggggtagcccccttccgagcagccatccaggagcgtgtggcccagggccagactggaaacttcttgttttttggctgccgctggcgggaccaagacttctactgggaggctgagtggcaggagctggagaagcgggactgtctgaccctcatccctgccttctcccgggaacaggagcagaaagtatatgtgcagcaccggctccgggagctggggtcgcttgtgtgggaactgctggaccgccaggcaacgccaagtccatgccagcggacgtctcggaagccctgatgtccatcttccaggaggagggtggactctgcagcccggacgcagccgcgtatctagccaggctccagcagacacggcgcttccagacagagacgtgggcctgaggcccgcggctgcccgtgccccctctgacagccatcctcctgggagcccaggaaggcatccacgagggagctcctggccagcagccgtcatcctctcggaccagccagctggtcctctgggaacagccagctcccgagcacagccgcactcctgttgaccctggatcccaccctttgagcctgaccccactgcagcctctgcccagccagccctgcgctcccccaccctgacagtgagctgtgtcctcgtccccccacccccttcccagtcaaggtggtggcctgggccgctccacctcaccggtgcagtgacccaggacggcatcagcagcccagtgagcaccaggggtggcatagggcacccatgaggctgcgctgcactcctctgccctggggccacctcggctgctgcagcctgcccagcagcacattccagtcactgcccccgcactcccacagggctcaggctgggctcagaggccactgagatgccagctccttgagagcagtgggggtgtcccaggccagagcagcctcttcctctcctggtcccagaaaaacccttgcagtaaa

SEQ ID NO: 157734 - DNA, 1734 bp, Homo sapiens
  Payload ID: 10910
  Gene Symbol: NOX1
  Gene Name: NADPH oxidase 1
  Uniprot ID: Q9Y5S8
  ENST ID: ENST00000217885
  CDS Start-End: 71-1618
ggacctctccagaatccggattgctgaatcttccctgttgcctagaagggctccaaaccacctcttgacaatgggaaactgggtggttaaccactggttttcagttttgtttctggttgtttggttagggctgaatgttttcctgtttgtggatgccttcctgaaatatgagaaggccgacaaatactactacacaagaaaaatccttgggtcaacattggcctgtgcccgagcgtctgctctctgcttgaattttaacagcacgctgatcctgcttcctgtgtgtcgcaatctgctgtccttcctgaggggcacctgctcattttgcagccgcacactgagaaagcaattggatcacaacctcaccttccacaagctggtggcctatatgatctgcctacatacagctattcacatcattgcacacctgtttaactttgactgctatagcagaagccgacaggccacagatggctcccttgcctccattctctccagcctatctcatgatgagaaaaaggggggttcttggctaaatcccatccagtcccgaaacacgacagtggagtatgtgacattcaccagcattgctggtctcactggagtgatcatgacaatagccttgattctcatggtaacttcagctactgagttcatccggaggagttattttgaagtcttctggtatactcaccacctttttatcttctatatccttggcttagggattcacggcattggtggaattgtccggggtcaaacagaggagagcatgaatgagagtcatcctcgcaagtgtgcagagtcttttgagatgtgggatgatcgtgactcccactgtaggcgccctaagtttgaagggcatccccctgagtcttggaagtggatccttgcaccggtcattctttatatctgtgaaaggatcctccggttttaccgctcccagcagaaggttgtgattaccaaggttgttatgcacccatccaaagttttggaattgcagatgaacaagcgtggcttcagcatggaagtggggcagtatatctttgttaattgcccctcaatctctctcctggaatggcatccttttactttgacctctgctccagaggaagatttcttctccattcatatccgagcagcaggggactggacagaaaatctcataagggctttcgaacaacaatattcaccaattcccaggattgaagtggatggtccctttggcacagccagtgaggatgttttccagtatgaagtggctgtgctggttggagcaggaattggggtcaccccctttgcttctatcttgaaatccatctggtacaaattccagtgtgcagaccacaacctcaaaacaaaaaaggttggtcatgcagcattaaactttgacaaggccactgacatcgtgacaggtctgaaacagaaaacctcctttgggagaccaatgtgggacaatgagttttctacaatagctacctcccaccccaagtctgtagtgggagttttcttatgtggccctcggactttggcaaagagcctgcgcaaatgctgtcaccgatattccagtctggatcctagaaaggttcaattctacttcaacaaagaaaatttttgagttataggaataaggacggtaatctgcattttgtctctttgtatcttcagtaatttacttggtctcgtcaggtttgagcagtcactttaggataagaatgtgcctctcaagccttg

SEQ ID NO: 157735 - DNA, 2418 bp, Homo sapiens
  Payload ID: 10910
  Gene Symbol: NOX1
  Gene Name: NADPH oxidase 1
  ENST ID: ENST00000372960
  CDS Start-End: 207-1790
gctgatagcacagttctgtccagagaaggaaggcagaataaacttattcattcccaggaactcttggggtaggtgtgtgtttttcacatcttaaaggctcacagaccctgcgctggacaaatgttccattcctgaaggacctctccagaatccggattgctgaatcttccctgttgcctagaagggctccaaaccacctcttgacaatgggaaactgggtggttaaccactggttttcagttttgtttctggttgtttggttagggctgaatgttttcctgtttgtggatgccttcctgaaatatgagaaggccgacaaatactactacacaagaaaaatccttgggttttgcagccgcacactgagaaagcaattggatcacaacctcaccttccacaagctggtggcctatatgatctgcctacatacagctattcacatcattgcacacctgtttaactttgactgctatagcagaagccgacaggccacagatggctcccttgcctccattctctccagcctatctcatgatgagaaaaaggggggttcttggctaaatcccatccagtcccgaaacacgacagtggagtatgtgacattcaccagcattgctggtctcactggagtgatcatgacaatagccttgattctcatggtaacttcagctactgagttcatccggaggagttattttgaagtcttctggtatactcaccacctttttatcttctatatccttggcttagggattcacggcattggtggaattgtccggggtcaaacagaggagagcatgaatgagagtcatcctcgcaagtgtgcagagtcttttgagatgtgggatgatcgtgactcccactgtaggcgccctaagtttgaagggcatccccctgagtcttggaagtggatccttgcaccggtcattctttatatctgtgaaaggatcctccggttttaccgctcccagcagaaggttgtgattaccaaggttgttatgcacccatccaaagttttggaattgcagatgaacaagcgtggcttcagcatggaagtggggcagtatatctttgttaattgcccctcaatctctctcctggaatggcatccttttactttgacctctgctccagaggaagatttcttctccattcatatccgagcagcaggggactggacagaaaatctcataagggctttcgaacaacaatattcaccaattcccaggattgaagtggatggtccctttggcacagccagtgaggatgttttccagtatgaagtggctgtgctggttggagcaggaattggggtcaccccctttgcttctatcttgaaatccatctggtacaaattccagtgtgcagaccacaacctcaaaacaaaaaagatctatttctactggatctgcagggagacaggtgccttttcctggttcaacaacctgttgacttccctggaacaggagatggaggaattaggcaaagtgggttttctaaactaccgtctcttcctcaccggatgggacagcaatattgttggtcatgcagcattaaactttgacaaggccactgacatcgtgacaggtctgaaacagaaaacctcctttgggagaccaatgtgggacaatgagttttctacaatagctacctcccaccccaagtctgtagtgggagttttcttatgtggccctcggactttggcaaagagcctgcgcaaatgctgtcaccgatattccagtctggatcctagaaaggttcaattctacttcaacaaagaaaatttttgagttataggaataaggacggtaatctgcattttgtctctttgtatcttcagtaatttacttggtctcgtcaggtttgagcagtcactttaggataagaatgtgcctctcaagccttgactccctggtattctttttttgattgcattcaacttcgttacttgagcttcagcaacttaagaacttctgaagttcttaaagttctgaagttcttaaagcccatggatcctttctcagaaaaataactgtaaatctttctggacagccatgactgtagcaaggcttgatagcagaggtttggtggttcagagttatacaactaatcccaggtgattttatcaattccagtgttaccatctcctgagttttggtttgtaatcttttgtccctcccacccccacagaagatttctaagtagggtgactttttaaataaaaatttattgaataattaatgataaaacataataataaacataaataataaacaaaattaccgagaaccccatccccatataacaccaacagtgtacatgtttactgtcacttttgatatggtcttatccagtgtgaacagcaatttattcttatttttgctcatcaaaaaataaaggattttcttcttcacttga

SEQ ID NO: 157736 - DNA, 661 bp, Homo sapiens
  Payload ID: 10910
  Gene Symbol: NOX1
  Gene Name: NADPH oxidase 1
  ENST ID: ENST00000372964
  CDS Start-End: 71-649
ggacctctccagaatccggattgctgaatcttccctgttgcctagaagggctccaaaccacctcttgacaatgggaaactgggtggttaaccactggttttcagttttgtttctggttgtttggttagggctgaatgttttcctgtttgtggatgccttcctgaaatatgagaaggccgacaaatactactacacaagaaaaatccttgggtcaacattggcctgtgcccgagcgtctgctctctgcttgaattttaacagcacgctgatcctgcttcctgtgtgtcgcaatctgctgtccttcctgaggggcacctgctcattttgcagccgcacactgagaaagcaattggatcacaacctcaccttccacaagctggtggcctatatgatctgcctacatacagctattcacatcattgcacacctgtttaactttgactgctatagcagaagccgacaggccacagatggctcccttgcctccattctctccagcctatctcatgatgagaaaaaggggggttcttggctaaatcccatccatccccatataacaccaacagtgtacatgtttactgtcacttttgatatggtcttatccagtgtgaacagcaatttattcttatttttgctcatcaaaaaataaaggattttcttc

SEQ ID NO: 157737 - DNA, 2529 bp, Homo sapiens
  Payload ID: 10910
  Gene Symbol: NOX1
  Gene Name: NADPH oxidase 1
  Uniprot ID: Q9Y5S8
  ENST ID: ENST00000372966
  CDS Start-End: 207-1901
gctgatagcacagttctgtccagagaaggaaggcagaataaacttattcattcccaggaactcttggggtaggtgtgtgtttttcacatcttaaaggctcacagaccctgcgctggacaaatgttccattcctgaaggacctctccagaatccggattgctgaatcttccctgttgcctagaagggctccaaaccacctcttgacaatgggaaactgggtggttaaccactggttttcagttttgtttctggttgtttggttagggctgaatgttttcctgtttgtggatgccttcctgaaatatgagaaggccgacaaatactactacacaagaaaaatccttgggtcaacattggcctgtgcccgagcgtctgctctctgcttgaattttaacagcacgctgatcctgcttcctgtgtgtcgcaatctgctgtccttcctgaggggcacctgctcattttgcagccgcacactgagaaagcaattggatcacaacctcaccttccacaagctggtggcctatatgatctgcctacatacagctattcacatcattgcacacctgtttaactttgactgctatagcagaagccgacaggccacagatggctcccttgcctccattctctccagcctatctcatgatgagaaaaaggggggttcttggctaaatcccatccagtcccgaaacacgacagtggagtatgtgacattcaccagcattgctggtctcactggagtgatcatgacaatagccttgattctcatggtaacttcagctactgagttcatccggaggagttattttgaagtcttctggtatactcaccacctttttatcttctatatccttggcttagggattcacggcattggtggaattgtccggggtcaaacagaggagagcatgaatgagagtcatcctcgcaagtgtgcagagtcttttgagatgtgggatgatcgtgactcccactgtaggcgccctaagtttgaagggcatccccctgagtcttggaagtggatccttgcaccggtcattctttatatctgtgaaaggatcctccggttttaccgctcccagcagaaggttgtgattaccaaggttgttatgcacccatccaaagttttggaattgcagatgaacaagcgtggcttcagcatggaagtggggcagtatatctttgttaattgcccctcaatctctctcctggaatggcatccttttactttgacctctgctccagaggaagatttcttctccattcatatccgagcagcaggggactggacagaaaatctcataagggctttcgaacaacaatattcaccaattcccaggattgaagtggatggtccctttggcacagccagtgaggatgttttccagtatgaagtggctgtgctggttggagcaggaattggggtcaccccctttgcttctatcttgaaatccatctggtacaaattccagtgtgcagaccacaacctcaaaacaaaaaagatctatttctactggatctgcagggagacaggtgccttttcctggttcaacaacctgttgacttccctggaacaggagatggaggaattaggcaaagtgggttttctaaactaccgtctcttcctcaccggatgggacagcaatattgttggtcatgcagcattaaactttgacaaggccactgacatcgtgacaggtctgaaacagaaaacctcctttgggagaccaatgtgggacaatgagttttctacaatagctacctcccaccccaagtctgtagtgggagttttcttatgtggccctcggactttggcaaagagcctgcgcaaatgctgtcaccgatattccagtctggatcctagaaaggttcaattctacttcaacaaagaaaatttttgagttataggaataaggacggtaatctgcattttgtctctttgtatcttcagtaatttacttggtctcgtcaggtttgagcagtcactttaggataagaatgtgcctctcaagccttgactccctggtattctttttttgattgcattcaacttcgttacttgagcttcagcaacttaagaacttctgaagttcttaaagttctgaagttcttaaagcccatggatcctttctcagaaaaataactgtaaatctttctggacagccatgactgtagcaaggcttgatagcagaggtttggtggttcagagttatacaactaatcccaggtgattttatcaattccagtgttaccatctcctgagttttggtttgtaatcttttgtccctcccacccccacagaagatttctaagtagggtgactttttaaataaaaatttattgaataattaatgataaaacataataataaacataaataataaacaaaattaccgagaaccccatccccatataacaccaacagtgtacatgtttactgtcacttttgatatggtcttatccagtgtgaacagcaatttattcttatttttgctcatcaaaaaataaaggattttcttcttcacttga

SEQ ID NO: 157738 - DNA, 695 bp, Homo sapiens
  Payload ID: 10910
  Gene Symbol: NOX1
  Gene Name: NADPH oxidase 1
  ENST ID: ENST00000427768
  CDS Start-End: 1-526
cttcagcatggaagtggggcagtatatctttgttaattgcccctcaatctctctcctggaatggcatccttttactttgacctctgctccagaggaagatttcttctccattcatatccgagcagcaggggactggacagaaaatctcataagggctttcgaacaacaatattcaccaattcccaggattgaagtggatggtccctttggcacagccagtgaggatgttttccagtatgaagtggctgtgctggttggagcaggaattggggtcaccccctttgcttctatcttgaaatccatctggtacaaattccagtgtgcagaccacaacctcaaaacaaaaaagatctatttctactggatctgcagggagacaggtgccttttcctggttcaacaacctgttgacttccctggaacaggagatggaggaattaggcaaaagcctgcgcaaatgctgtcaccgatattccagtctggatcctagaaaggttcaattctacttcaacaaagaaaatttttgagttataggaataaggacggtaatctgcattttgtctctttgtatcttcagtaatttacttggtctcgtcaggtttgagcagtcactttaggataagaatgtgcctctcaagccttgactccctggtattctttttttgattgcattcaacttcgttacttgagcttcag

SEQ ID NO: 157739 - DNA, 2042 bp, Homo sapiens
  Payload ID: 10911
  Gene Symbol: NOX3
  Gene Name: NADPH oxidase 3
  Uniprot ID: Q9HBY0
  ENST ID: ENST00000159060
  CDS Start-End: 104-1810
caaagacaaaataatttactagggaagcccttactaacgacccaacatccagacacaggtgagggagaagaaatttcctgacagccgaagagcaacaagtatcatgatggggtgctggattttgaatgagggtctctccaccatattagtactctcatggctgggaataaatttttatctgtttattgacacgttctactggtatgaagaggaggagtctttccattacacacgagttattttgggttcaacactggcttgggcacgagcatccgcactgtgcctgaattttaactgcatgctaattctaatacctgtcagtcgaaaccttatttcattcataagaggaacaagtatttgctgcagaggaccgtggaggaggcaattagacaaaaacctcagatttcacaaactggtcgcctatgggatagctgttaatgcaaccatccacatcgtggcgcatttcttcaacctggaacgctaccactggagccagtccgaggaggcccagggacttctggccgcactttccaagctgggcaacacccctaacgagagctacctcaaccctgtccggaccttccccacaaacacaaccactgaattgctaaggacaatagcaggcgtcaccggtctggtgatctctctggctttagtcttgatcatgacctcgtcaactgagttcatcagacaggcctcctatgagttgttctggtacacacaccatgttttcatcgtcttctttctcagcctggccatccatgggacgggtcggattgttcgaggccaaacccaagacagtctctctctgcacaacatcaccttctgtagagaccgctatgcagaatggcagacagtggcccaatgccccgtgcctcaattttctggcaaggaaccctcggcttggaaatggattttaggccctgtggtcttgtatgcatgtgaaagaataattaggttctggcgatttcaacaagaagttgtcattaccaaggtggtaagccacccctctggagtcctggaacttcacatgaaaaagcgtggctttaaaatggcgccagggcagtacatcttggtgcagtgcccagccatatcttcgctggagtggcaccccttcacccttacctctgccccccaggaggactttttcagcgtgcacatccgggcagcaggagactggacagcagcgctactggaggcctttggggcagagggacaggccctccaggagccctggagcctgccaaggctggcagtggacgggccctttggaactgccctgacagatgtatttcactacccagtgtgtgtgtgcgttgccgcggggatcggagtcactcccttcgctgctcttctgaaatctatatggtacaaatgcagtgaggcacagaccccactgaagctgagcaaggtgtatttctactggatttgccgggatgcaagagcttttgagtggtttgctgatctcttactctccctggaaacacggatgagtgagcaggggaaaactcactttctgagttatcatatatttcttaccggctgggatgaaaatcaggctcttcacatagctttacactgggacgaaaatactgacgtgattacaggcttaaagcagaagaccttctatgggaggcccaactggaacaatgagttcaagcagattgcctacaatcaccccagcagcagtattggcgtgttcttctgtggacctaaagctctctcgaggacacttcaaaagatgtgccacttgtattcatcagctgaccccagaggtgttcatttctattacaacaaggagagcttctagactttggaggtcaagtccaggcattgtgttttcaatcaagttattgattccaaagaactccaccaggaattcctgtgacggcctgttgatatgagctcccagttgggaactggtgaataataattaactattgtgaacagtacactataccatacttccttagcttataaataacatgtcatatacaacagaacaaaaacatttactgaaattaaaatatattatgtttctc

SEQ ID NO: 157740 - DNA, 2388 bp, Homo sapiens
  Payload ID: 10912
  Gene Symbol: NOX4
  Gene Name: NADPH oxidase 4
  Uniprot ID: Q9NPH5
  ENST ID: ENST00000263317
  CDS Start-End: 240-1976
tgagtgggcagagctgacccggtgcgggtgggagtcagggcgcccggaaaacccggctctgggtagcagaccccgcccgggctggctcggcgccgggccttcgggcttccactcagtctttgaccctcggtcctcgctcagcggcccggcaggccgcacaactgtaaccgctgccccggccgccgcccgctccttctcggtccggcgggcacagagcgcagcgcggcggggccggcggcatggctgtgtcctggaggagctggctcgccaacgaaggggttaaacacctctgcctgttcatctggctctccatgaatgtcctgcttttctggaaaaccttcttgctgtataaccaagggccagagtatcactacctccaccagatgttggggctaggattgtgtctaagcagagcctcagcatctgttcttaacctcaactgcagccttatccttttacccatgtgccgaacactcttggcttacctccgaggatcacagaaggttccaagcaggagaaccaggagattgttggataaaagcagaacattccatattacctgtggtgttactatctgtattttctcaggcgtgcatgtggctgcccatctggtgaatgccctcaacttctcagtgaattacagtgaagactttgttgaactgaatgcagcaagataccgagatgaggatcctagaaaacttctcttcacaactgttcctggcctgacaggggtctgcatggtggtggtgctattcctcatgatcacagcctctacatatgcaataagagtttctaactatgatatcttctggtatactcataacctcttctttgtcttctacatgctgctgacgttgcatgtttcaggagggctgctgaagtatcaaactaatttagatacccaccctcccggctgcatcagtcttaaccgaaccagctctcagaatatttccttaccagagtatttctcagaacattttcatgaacctttccctgaaggattttcaaaaccggcagagtttacccagcacaaatttgtgaagatttgtatggaagagcccagattccaagctaattttccacagacttggctttggatttctggacctttgtgcctgtactgtgccgaaagactttacaggtatatccggagcaataagccagtcaccatcatttcggtcatgagtcatccctcagatgtcatggaaatccgaatggtcaaagaaaattttaaagcaagacctggtcagtatattactctacattgtcccagtgtatctgcattagaaaatcatccatttaccctcacaatgtgtccaactgaaaccaaagcaacatttggggttcatcttaaaatagtaggagactggacagaacgatttcgagatttactactgcctccatctagtcaagactccgaaattctgcccttcattcaatctagaaattatcccaagctgtatattgatggtccttttggaagtccatttgaggaatcactgaactatgaggtcagcctctgcgtggctggaggcattggagtaactccatttgcatcaatactcaacaccctgttggatgactggaaaccatacaagcttagaagactatactttatttgggtatgcagagatatccagtccttccgttggtttgcagatttactctgtatgttgcataacaagttttggcaagagaacagacctgactatgtcaacatccagctgtacctcagtcaaacagatgggatacagaagataattggagaaaaatatcatgcactgaattcaagactgtttataggacgtcctcggtggaaacttttgtttgatgaaatagcaaaatataacagaggaaaaacagttggtgttttctgttgtggacccaattcactatccaagactcttcataaactgagtaaccagaacaactcatatgggacaagatttgaatacaataaagagtctttcagctgaaaacttttgccatgaagcaggactctaaagaaggaatgagtgcaatttctaagactttgaaactcagcggaatcaatcagctgtgttatgccaaagaatagtaaggttttcttatttatgattatttaaaatggaaatgtgagaatgtggcaagatgaccgtcacattacatgtttaatctggaaaccaaagagaccctgaagaatatttgatgtgatgattcacttttcagttctcaaattaaaagaaaactgttagatgcacactgttgattttcatggtggattcaagaactccctagtgaggagctgaacttgctcaatctaaggctgattgtcgtgttcctctttaaattgtttttggttgaacaaatgcaagattgaacaaaattaaaaattcattgaagctgaaa

SEQ ID NO: 157741 - DNA, 3347 bp, Homo sapiens
  Payload ID: 10912
  Gene Symbol: NOX4
  Gene Name: NADPH oxidase 4
  Uniprot ID: Q9NPH5
  ENST ID: ENST00000343727
  CDS Start-End: 295-1959
attctctgagcgtgcacgggtgggaagctggaagtggaagttttgtcttaattcgaacattctcaacttacaaaactttatgctggagataacaatgaacactccccctcccaccccctcgcctgtcccccaaatgcatgagaatttttctgcacattgatgggagagatgtggaggaagagggaagaggtcattttccgtgaatacagcttttctttttaccctttaaacatttttgctccctttgttcttttcccagattacttctgtttgcttgggttcatctggctctccatgaatgtcctgcttttctggaaaaccttcttgctgtataaccaagggccagagtatcactacctccaccagatgttggggctaggattgtgtctaagcagagcctcagcatctgttcttaacctcaactgcagccttatccttttacccatgtgccgaacactcttggcttacctccgaggatcacagaaggttccaagcaggagaaccaggagattgttggataaaagcagaacattccatattacctgtggtgttactatctgtattttctcaggcgtgcatgtggctgcccatctggtgaatgccctcaacttctcagtgaattacagtgaagactttgttgaactgaatgcagcaagataccgagatgaggatcctagaaaacttctcttcacaactgttcctggcctgacaggggtctgcatggtggtggtgctattcctcatgatcacagcctctacatatgcaataagagtttctaactatgatatcttctggtatactcataacctcttctttgtcttctacatgctgctgacgttgcatgtttcaggagggctgctgaagtatcaaactaatttagatacccaccctcccggctgcatcagtcttaaccgaaccagctctcagaatatttccttaccagagtatttctcagaacattttcatgaacctttccctgaaggattttcaaaaccggcagagtttacccagcacaaatttgtgaagatttgtatggaagagcccagattccaagctaattttccacagacttggctttggatttctggacctttgtgcctgtactgtgccgaaagactttacaggtatatccggagcaataagccagtcaccatcatttcggtcatgagtcatccctcagatgtcatggaaatccgaatggtcaaagaaaattttaaagcaagacctggtcagtatattactctacattgtcccagtgtatctgcattagaaaatcatccatttaccctcacaatgtgtccaactgaaaccaaagcaacatttggggttcatcttaaaatagtaggagactggacagaacgatttcgagatttactactgcctccatctagtcaagactccgaaattctgcccttcattcaatctagaaattatcccaagctgtatattgatggtccttttggaagtccatttgaggaatcactgaactatgaggtcagcctctgcgtggctggaggcattggagtaactccatttgcatcaatactcaacaccctgttggatgactggaaaccatacaagcttagaagactatactttatttgggtatgcagagatatccagtccttccgttggtttgcagatttactctgtatgttgcataacaagttttggcaagagaacagacctgactatgtcaacatccagctgtacctcagtcaaacagatgggatacagaagataattggagaaaaatatcatgcactgaattcaagactgtttataggacgtcctcggtggaaacttttgtttgatgaaatagcaaaatataacagaggaaaaacagttggtgttttctgttgtggacccaattcactatccaagactcttcataaactgagtaaccagaacaactcatatgggacaagatttgaatacaataaagagtctttcagctgaaaacttttgccatgaagcaggactctaaagaaggaatgagtgcaatttctaagactttgaaactcagcggaatcaatcagctgtgttatgccaaagaatagtaaggttttcttatttatgattatttaaaatggaaatgtgagaatgtggcaagatgaccgtcacattacatgtttaatctggaaaccaaagagaccctgaagaatatttgatgtgatgattcacttttcagttctcaaattaaaagaaaactgttagatgcacactgttgattttcatggtggattcaagaactccctagtgaggagctgaacttgctcaatctaaggctgattgtcgtgttcctctttaaattgtttttggttgaacaaatgcaagattgaacaaaattaaaaattcattgaagctgaaattccattttctgtgttgtgtataaacagagtagctttaatttgcaagcactccaggcaaatatattagatgtttgaaaacacagcacaagactctgtattgatacgggtactttgtgtcaatatctaatcgtctccactacttatgctaatacctctatttgatatctgaagactatatgctaactgaaccttcctcaaatgttgttatagtatctatttttatatatttttttctttttattcctctctctagggaaatatgccttcccttagcatgcattagacataatgatttaataggtccctttcatcttcatttaaatctatcactattgcatggtaatgaaaatattcctactataaattataaagggatatatatatatggatatatatatgtatatacacatatatatatacacacacacacacatatatatatatatatatatatatacacatatactaataacttttcccttttttcagcatttttgtctctattattattattgtttttttcccaggtagggtttgtcttaggctgtagcctctaaggatagttagttaatttgcactttgagaccaaaggacatcatgtgtgtcagtagggactgaatataagatttatctcctttgccacacattggtttatgatggagacattgaaagtctagtcatattcctgaacagtaaaacctgtattttaccttttaagtaagaggaaatatgatattcttattcaaacttaagtttagaatccagaatattactgtcgcactttttggtatcctgagtttccatagggaactattgggtttaaagtcaccgttggaactacactgtgtgatcttataaacttatgttccctggctatcatattcttggctcagaacaatatttcccattactatcttaagaattaaggcattcatggctcacgcctgtaatcccggcactttgggaggccaaggc

SEQ ID NO: 157742 - DNA, 816 bp, Homo sapiens
  Payload ID: 10912
  Gene Symbol: NOX4
  Gene Name: NADPH oxidase 4
  Uniprot ID: Q9NPH5
  ENST ID: ENST00000375979
  CDS Start-End: 1-816
atggctgtgtcctggaggagctggctcgccaacgaaggggttaaacacctctgcctgttcatctggctctccatgaatgtcctgcttttctggaaaaccttcttgctgtataaccaagggccagagtatcactacctccaccagatgttggggtgtccaactgaaaccaaagcaacatttggggttcatcttaaaatagtaggagactggacagaacgatttcgagatttactactgcctccatctagtcaagactccgaaattctgcccttcattcaatctagaaattatcccaagctgtatattgatggtccttttggaagtccatttgaggaatcactgaactatgaggtcagcctctgcgtggctggaggcattggagtaactccatttgcatcaatactcaacaccctgttggatgactggaaaccatacaagcttagaagactatactttatttgggtatgcagagatatccagtccttccgttggtttgcagatttactctgtatgttgcataacaagttttggcaagagaacagacctgactatgtcaacatccagctgtacctcagtcaaacagatgggatacagaagataattggagaaaaatatcatgcactgaattcaagactgtttataggacgtcctcggtggaaacttttgtttgatgaaatagcaaaatataacagaggaaaaacagttggtgttttctgttgtggacccaattcactatccaagactcttcataaactgagtaaccagaacaactcatatgggacaagatttgaatacaataaagagtctttcagctga

SEQ ID NO: 157743 - DNA, 560 bp, Homo sapiens
  Payload ID: 10912
  Gene Symbol: NOX4
  Gene Name: NADPH oxidase 4
  Uniprot ID: Q9NPH5
  ENST ID: ENST00000393282
  CDS Start-End: 320-484
cctagacaaaggggccggcgcggcggagcagactggtgcagcctgggccgcgcgctcagagcgctgggcgtctgggcagctgagtgggcagagctgacccggtgcgggtgggagtcagggcgcccggaaaacccggctctgggtagcagaccccgcccgggctggctcggcgccgggccttcgggcttccactcagtctttgaccctcggtcctcgctcagcggcccggcaggccgcacaactgtaaccgctgccccggccgccgcccgctccttctcggtccggcgggcacagagcgcagcgcggcggggccggcggcatggctgtgtcctggaggagctggctcgccaacgaaggggttaaacacctctgcctgttcatctggctctccatgaatgtcctgcttttctggaaaaccttcttgctgtataaccaagggccagagtatcactacctccaccagatgttgggggaactgtcttgaaacctatacatttcagatgggcacccagagagtaagacctcacctcgcccctcaagttgcttacaatataatggaa

SEQ ID NO: 157744 - DNA, 4184 bp, Homo sapiens
  Payload ID: 10912
  Gene Symbol: NOX4
  Gene Name: NADPH oxidase 4
  Uniprot ID: Q9NPH5
  ENST ID: ENST00000424319
  CDS Start-End: 120-1784
tgcagtgtcgaataggtacctgggtcaactccacacacttctcactcttcactggacctctggtacaagattgagaggattcctattacttacaaacagactagttcatctggctctccatgaatgtcctgcttttctggaaaaccttcttgctgtataaccaagggccagagtatcactacctccaccagatgttggggctaggattgtgtctaagcagagcctcagcatctgttcttaacctcaactgcagccttatccttttacccatgtgccgaacactcttggcttacctccgaggatcacagaaggttccaagcaggagaaccaggagattgttggataaaagcagaacattccatattacctgtggtgttactatctgtattttctcaggcgtgcatgtggctgcccatctggtgaatgccctcaacttctcagtgaattacagtgaagactttgttgaactgaatgcagcaagataccgagatgaggatcctagaaaacttctcttcacaactgttcctggcctgacaggggtctgcatggtggtggtgctattcctcatgatcacagcctctacatatgcaataagagtttctaactatgatatcttctggtatactcataacctcttctttgtcttctacatgctgctgacgttgcatgtttcaggagggctgctgaagtatcaaactaatttagatacccaccctcccggctgcatcagtcttaaccgaaccagctctcagaatatttccttaccagagtatttctcagaacattttcatgaacctttccctgaaggattttcaaaaccggcagagtttacccagcacaaatttgtgaagatttgtatggaagagcccagattccaagctaattttccacagacttggctttggatttctggacctttgtgcctgtactgtgccgaaagactttacaggtatatccggagcaataagccagtcaccatcatttcggtcatgagtcatccctcagatgtcatggaaatccgaatggtcaaagaaaattttaaagcaagacctggtcagtatattactctacattgtcccagtgtatctgcattagaaaatcatccatttaccctcacaatgtgtccaactgaaaccaaagcaacatttggggttcatcttaaaatagtaggagactggacagaacgatttcgagatttactactgcctccatctagtcaagactccgaaattctgcccttcattcaatctagaaattatcccaagctgtatattgatggtccttttggaagtccatttgaggaatcactgaactatgaggtcagcctctgcgtggctggaggcattggagtaactccatttgcatcaatactcaacaccctgttggatgactggaaaccatacaagcttagaagactatactttatttgggtatgcagagatatccagtccttccgttggtttgcagatttactctgtatgttgcataacaagttttggcaagagaacagacctgactatgtcaacatccagctgtacctcagtcaaacagatgggatacagaagataattggagaaaaatatcatgcactgaattcaagactgtttataggacgtcctcggtggaaacttttgtttgatgaaatagcaaaatataacagaggaaaaacagttggtgttttctgttgtggacccaattcactatccaagactcttcataaactgagtaaccagaacaactcatatgggacaagatttgaatacaataaagagtctttcagctgaaaacttttgccatgaagcaggactctaaagaaggaatgagtgcaatttctaagactttgaaactcagcggaatcaatcagctgtgttatgccaaagaatagtaaggttttcttatttatgattatttaaaatggaaatgtgagaatgtggcaagatgaccgtcacattacatgtttaatctggaaaccaaagagaccctgaagaatatttgatgtgatgattcacttttcagttctcaaattaaaagaaaactgttagatgcacactgttgattttcatggtggattcaagaactccctagtgaggagctgaacttgctcaatctaaggctgattgtcgtgttcctctttaaattgtttttggttgaacaaatgcaagattgaacaaaattaaaaattcattgaagctgaaattccattttctgtgttgtgtataaacagagtagctttaatttgcaagcactccaggcaaatatattagatgtttgaaaacacagcacaagactctgtattgatacgggtactttgtgtcaatatctaatcgtctccactacttatgctaatacctctatttgatatctgaagactatatgctaactgaaccttcctcaaatgttgttatagtatctatttttatatatttttttctttttattcctctctctagggaaatatgccttcccttagcatgcattagacataatgatttaataggtccctttcatcttcatttaaatctatcactattgcatggtaatgaaaatattcctactataaattataaagggatatatatatatggatatatatatgtatatacacatatatatatacacacacacacacatatatatatatatatatatatatacacatatactaataacttttcccttttttcagcatttttgtctctattattattattgtttttttcccaggtagggtttgtcttaggctgtagcctctaaggatagttagttaatttgcactttgagaccaaaggacatcatgtgtgtcagtagggactgaatataagatttatctcctttgccacacattggtttatgatggagacattgaaagtctagtcatattcctgaacagtaaaacctgtattttaccttttaagtaagaggaaatatgatattcttattcaaacttaagtttagaatccagaatattactgtcgcactttttggtatcctgagtttccatagggaactattgggtttaaagtcaccgttggaactacactgtgtgatcttataaacttatgttccctggctatcatattcttggctcagaacaatatttcccattactatcttaagaattaaggcattcatggctcacgcctgtaatcccggcactttgggaggccaaggcaggtggatcacgaggtcagagttcaagaccagcctgaccaagttggtgaaaccccatcgctactaaaaatacaaatattaggcgggtgtggtggcgggtgcctataatcccaactactcgggagactgaggcaaagaatcgcttgaacccggtgggcggaggttgcagtgagccaagattgcaccactgcactccagcctgggtgacagagcaagattccatctcaaaaaaaaaaaaaaaaaaaaaaaaaaagaattaaagcattcatacagtttagtgattttgtttagtagtcggctatcaattgctatcaaatataacactgctgaaatcagcagtgtgacttaccttgccattgttaaaatgttacataaaacataacatgatagatgctaaggcctttttttgctataattcaccaatagcaatcaagcatgctaacccatactgaatgatatttacttgtagatatttcttcctttccttgaaattctcctttctatggaaagaagatgaacccaaaaaagtgataggaaatgtggaatgctcatgcagatttagctctgaaggcatatttaataactagtatgtcttgacaacagtctttagattaaaaagaattttcatggaaacatttaacagaaagaactagtaaaaagacactttgagttagtccaggcttaatgtgcaatactgactctatactgatcataatttatttatgcgatcatattaatagacctaatttcattaaaacaggtagaagatttttcaaaagaaagatgatgtttcaaagctggtctgccattctagatgagcctccttgcttatttaagttccagtaggtgttcaaatgttaaatgttaaacataggtcatctttgcttctgcagggcttcatcttgcatgtttaagagaactttgttttattttgagggattatttctctggggatcattcttataatacaagccttaaatcactaattttagtagcaataaatgttaaaattg

SEQ ID NO: 157745 - DNA, 2379 bp, Homo sapiens
  Payload ID: 10912
  Gene Symbol: NOX4
  Gene Name: NADPH oxidase 4
  Uniprot ID: Q9NPH5
  ENST ID: ENST00000527956
  CDS Start-End: 306-1970
tacttctagtctagttggagaaacaacctagaaaatgcaccaacaaatggggcacaataactactctgagagagagtggcacacagtggacgcaaagaagaggttcctgatgcagctgggaagagtctacatgggcctctagcaggagaagatactggtcttgagtttggagactaagtaagcatctccagtgtcgaataggtacctgggtcaactccacacacttctcactcttcactggacctctggtacaagattgagaggattcctattacttacaaacagactagttcatctggctctccatgaatgtcctgcttttctggaaaaccttcttgctgtataaccaagggccagagtatcactacctccaccagatgttggggctaggattgtgtctaagcagagcctcagcatctgttcttaacctcaactgcagccttatccttttacccatgtgccgaacactcttggcttacctccgaggatcacagaaggttccaagcaggagaaccaggagattgttggataaaagcagaacattccatattacctgtggtgttactatctgtattttctcaggcgtgcatgtggctgcccatctggtgaatgccctcaacttctcagtgaattacagtgaagactttgttgaactgaatgcagcaagataccgagatgaggatcctagaaaacttctcttcacaactgttcctggcctgacaggggtctgcatggtggtggtgctattcctcatgatcacagcctctacatatgcaataagagtttctaactatgatatcttctggtatactcataacctcttctttgtcttctacatgctgctgacgttgcatgtttcaggagggctgctgaagtatcaaactaatttagatacccaccctcccggctgcatcagtcttaaccgaaccagctctcagaatatttccttaccagagtatttctcagaacattttcatgaacctttccctgaaggattttcaaaaccggcagagtttacccagcacaaatttgtgaagatttgtatggaagagcccagattccaagctaattttccacagacttggctttggatttctggacctttgtgcctgtactgtgccgaaagactttacaggtatatccggagcaataagccagtcaccatcatttcggtcatgagtcatccctcagatgtcatggaaatccgaatggtcaaagaaaattttaaagcaagacctggtcagtatattactctacattgtcccagtgtatctgcattagaaaatcatccatttaccctcacaatgtgtccaactgaaaccaaagcaacatttggggttcatcttaaaatagtaggagactggacagaacgatttcgagatttactactgcctccatctagtcaagactccgaaattctgcccttcattcaatctagaaattatcccaagctgtatattgatggtccttttggaagtccatttgaggaatcactgaactatgaggtcagcctctgcgtggctggaggcattggagtaactccatttgcatcaatactcaacaccctgttggatgactggaaaccatacaagcttagaagactatactttatttgggtatgcagagatatccagtccttccgttggtttgcagatttactctgtatgttgcataacaagttttggcaagagaacagacctgactatgtcaacatccagctgtacctcagtcaaacagatgggatacagaagataattggagaaaaatatcatgcactgaattcaagactgtttataggacgtcctcggtggaaacttttgtttgatgaaatagcaaaatataacagaggaaaaacagttggtgttttctgttgtggacccaattcactatccaagactcttcataaactgagtaaccagaacaactcatatgggacaagatttgaatacaataaagagtctttcagctgaaaacttttgccatgaagcaggactctaaagaaggaatgagtgcaatttctaagactttgaaactcagcggaatcaatcagctgtgttatgccaaagaatagtaaggttttcttatttatgattatttaaaatggaaatgtgagaatgtggcaagatgaccgtcacattacatgtttaatctggaaaccaaagagaccctgaagaatatttgatgtgatgattcacttttcagttctcaaattaaaagaaaactgttagatgcacactgttgattttcatggtggattcaagaactccctagtgaggagctgaacttgctcaatctaaggctgattgtcgtgttcctctttaaattgtttttggttgaacaaatgcaagattgaacaaaattaaaaattcattgaagctg

SEQ ID NO: 157746 - DNA, 2039 bp, Homo sapiens
  Payload ID: 10912
  Gene Symbol: NOX4
  Gene Name: NADPH oxidase 4
  Uniprot ID: Q9NPH5
  ENST ID: ENST00000532825
  CDS Start-End: 86-1630
acacttctcactcttcactggacctctggtacaagattgagaggattcctattacttacaaacagactagttcatctggctctccatgaatgtcctgcttttctggaaaaccttcttgctgtataaccaagggccagagtatcactacctccaccagatgttggggctaggattgtgtctaagcagagcctcagcatctgttcttaacctcaactgcagccttatccttttacccatgtgccgaacactcttggcttacctccgaggatcacagaaggttccaagcaggagaaccaggagattgttggataaaagcagaacattccatattacctgtggtgttactatctgtattttctcaggcgtgcatgtggctgcccatctggtgaatgccctcaacttctcagtgaattacagtgaagactttgttgaactgaatgcagcaagataccgagatgaggatcctagaaaacttctcttcacaactgttcctggcctgacaggggtctgcatggtggtggtgctattcctcatgatcacagcctctacatatgcaataagagtttctaactatgatatcttctggtatactcataacctcttctttgtcttctacatgctgctgacgttgcatgtttcaggagggctgctgaagtatcaaactaatttagatacccaccctcccggctgcatcagtcttaaccgaaccagctctcagaatatttccttaccagagtatttctcagaacattttcatgaacctttccctgaaggattttcaaaaccggcagagtttacccagcacaaatttgtgaagatttgtatggaagagcccagattccaagctaattttccacagacttggctttggatttctggacctttgtgcctgtactgtgccgaaagactttacaggtatatccggagcaataagccagtcaccatcatttcggtcatgagtcatccctcagatgtcatggaaatccgaatggtcaaagaaaattttaaagcaagacctggtcagtatattactctacattgtcccagtgtatctgcattagaaaatcatccatttaccctcacaatgtgtccaactgaaaccaaagcaacatttggggttcatcttaaaatagtaggagactggacagaacgatttcgagatttactactgcctccatctagtcaagactccgaaattctgcccttcattcaatctagaaattatcccaaggatgactggaaaccatacaagcttagaagactatactttatttgggtatgcagagatatccagtccttccgttggtttgcagatttactctgtatgttgcataacaagttttggcaagagaacagacctgactatgtcaacatccagctgtacctcagtcaaacagatgggatacagaagataattggagaaaaatatcatgcactgaattcaagactgtttataggacgtcctcggtggaaacttttgtttgatgaaatagcaaaatataacagaggaaaaacagttggtgttttctgttgtggacccaattcactatccaagactcttcataaactgagtaaccagaacaactcatatgggacaagatttgaatacaataaagagtctttcagctgaaaacttttgccatgaagcaggactctaaagaaggaatgagtgcaatttctaagactttgaaactcagcggaatcaatcagctgtgttatgccaaagaatagtaaggttttcttatttatgattatttaaaatggaaatgtgagaatgtggcaagatgaccgtcacattacatgtttaatctggaaaccaaagagaccctgaagaatatttgatgtgatgattcacttttcagttctcaaattaaaagaaaactgttagatgcacactgttgattttcatggtggattcaagaactccctagtgaggagctgaacttgctcaatctaaggctgattgtcgtgttcctctttaaattgtttttggttgaacaaatgcaagattgaacaaaattaaaaattcattgaagctg

SEQ ID NO: 157747 - DNA, 696 bp, Homo sapiens
  Payload ID: 10912
  Gene Symbol: NOX4
  Gene Name: NADPH oxidase 4
  Uniprot ID: Q9NPH5
  ENST ID: ENST00000531342
  CDS Start-End: 1-696
atggctgtgtcctggaggagctggctcgccaacgaaggggttaaacacctctgcctgttcatctggctctccatgaatgtcctgcttttctggaaaaccttcttgctgtataaccaagggccagagtatcactacctccaccagatgttggggtgtccaactgaaaccaaagcaacatttggggttcatcttaaaatagtaggagactggacagaacgatttcgagatttactactgcctccatctagtcaagactccgaaattctgcccttcattcaatctagaaattatcccaaggatgactggaaaccatacaagcttagaagactatactttatttgggtatgcagagatatccagtccttccgttggtttgcagatttactctgtatgttgcataacaagttttggcaagagaacagacctgactatgtcaacatccagctgtacctcagtcaaacagatgggatacagaagataattggagaaaaatatcatgcactgaattcaagactgtttataggacgtcctcggtggaaacttttgtttgatgaaatagcaaaatataacagaggaaaaacagttggtgttttctgttgtggacccaattcactatccaagactcttcataaactgagtaaccagaacaactcatatgggacaagatttgaatacaataaagagtctttcagctga

SEQ ID NO: 157748 - DNA, 1403 bp, Homo sapiens
  Payload ID: 10912
  Gene Symbol: NOX4
  Gene Name: NADPH oxidase 4
  Uniprot ID: Q9NPH5
  ENST ID: ENST00000529343
  CDS Start-End: 112-786
ggtcctcgctcagcggcccggcaggccgcacaactgtaaccgctgccccggccgccgcccgctccttctcggtccggcgggcacagagcgcagcgcggcggggccggcggcatggctgtgtcctggaggagctggctcgccaacgaaggggttaaacacctctgcctgttcatctggctctccatgaatgtcctgcttttctggaaaaccttcttgctgtataaccaagggccagagtatcactacctccaccagatgttggggctaggattgtgtctaagcagagcctcagcatctgttcttaacctcaactgcagccttatccttttacccatgtgccgaacactcttggcttacctccgaggatcacagaaggttccaagcaggagaaccaggagattgttggataaaagcagaacattccatattacctgtggtgttactatctgtattttctcaggcgtgcatgtggctgcccatctggtgaatgccctcaacttctcagtgaattacagtgaagactttgttgaactgaatgcagcaagataccgagatgaggatcctagaaaacttctcttcacaactgttcctggcctgacaggggtctgcatggtggtggtgctattcctcatgatcacagcctctacatatgcaataagagtttctaactatgatatcttctggtatactcataacctcttctttgtcttctacatgctgctgacgttgcatgtttcaggtgtccaactgaaaccaaagcaacatttggggttcatcttaaaatagtaggagactggacagaacgatttcgagatttactactgcctccatctagtcaagactccgaaattctgcccttcattcaatctagaaattatcccaagctgtatattgatggtccttttggaagtccatttgaggaatcactgaactatgaggtcagcctctgcgtggctggaggcattggagtaactccatttgcatcaatactcaacaccctgttggatgactggaaaccatacaagcttagaagactatactttatttgggtatgcagagatatccagtccttccgttggtttgcagatttactctgtatgttgcataacaagttttggcaagagaacagacctgactatgtcaacatccagctgtacctcagtcaaacagatgggatacagaagataattggagaaaaatatcatgcactgaattcaagactgtttataggacgtcctcggtggaaacttttgtttgatgaaatagcaaaatataacagaggaaaaacagttggtgttttctgttgtggacccaattcactatccaagactcttcataaactgagtaaccagaacaactcatatgggacaagatttgaatacaataaagagtctttcagctga

SEQ ID NO: 157749 - DNA, 1774 bp, Homo sapiens
  Payload ID: 10912
  Gene Symbol: NOX4
  Gene Name: NADPH oxidase 4
  ENST ID: ENST00000527626
  CDS Start-End: 259-1434
acaactgtaaccgctgccccggccgccgcccgctccttctcggtccggcgggcacagagcgcagcgcggcggggccggcggcatggctgtgtcctggaggagctggctcgccaacgaaggggttaaacacctctgcctgttcatctggctctccatgaatgtcctgcttttctggaaaaccttcttgctgtataaccaagggccagagtatcactacctccaccagatgttggggttcctggcctgacaggggtctgcatggtggtggtgctattcctcatgatcacagcctctacatatgcaataagagtttctaactatgatatcttctggtatactcataacctcttctttgtcttctacatgctgctgacgttgcatgtttcaggagggctgctgaagtatcaaactaatttagatacccaccctcccggctgcatcagtcttaaccgaaccagctctcagaatatttccttaccagagtatttctcagaacattttcatgaacctttccctgaaggattttcaaaaccggcagagtttacccagcacaaatttgtgaagatttgtatggaagagcccagattccaagctaattttccacagacttggctttggatttctggacctttgtgcctgtactgtgccgaaagactttacaggtatatccggagcaataagccagtcaccatcatttcggtcatgagtcatccctcagatgtcatggaaatccgaatggtcaaagaaaattttaaagcaagacctggtcagtatattactctacattgtcccagtgtatctgcattagaaaatcatccatttaccctcacaatgtgtccaactgaaaccaaagcaacatttggggttcatcttaaaatagtaggagactggacagaacgatttcgagatttactactgcctccatctagtcaagactccgaaattctgcccttcattcaatctagaaattatcccaagctgtatattgatggtccttttggaagtccatttgaggaatcactgaactatgaggtcagcctctgcgtggctggaggcattggagtaactccatttgcatcaatactcaacaccctgttggatgactggaaaccatacaagcttagaagactatactttatttggttttggcaagagaacagacctgactatgtcaacatccagctgtacctcagtcaaacagatgggatacagaagataattggagaaaaatatcatgcactgaattcaagactgtttataggacgtcctcggtggaaacttttgtttgatgaaatagcaaaatataacagaggaaaaacagttggtgttttctgttgtggacccaattcactatccaagactcttcataaactgagtaaccagaacaactcatatgggacaagatttgaatacaataaagagtctttcagctgaaaacttttgccatgaagcaggactctaaagaaggaatgagtgcaatttctaagactttgaaactcagcggaatcaatcagctgtgttatgccaaagaatagtaaggttttcttatttatgattatttaaaatggaaatgtgagaatgtggcaagatgaccgtcacattacatgtttaatctggaaaccaaagagaccctgaagaatatttgatgtgatgattcacttttcagttctcaaattaaaagaaaactgttagatgcacactgttgattttcatggtggattcaagaactccctagtgaggagctgaacttgctcaatctaaggctgattgtcgt

SEQ ID NO: 157750 - DNA, 1555 bp, Homo sapiens
  Payload ID: 10912
  Gene Symbol: NOX4
  Gene Name: NADPH oxidase 4
  ENST ID: ENST00000525196
  CDS Start-End: 115-1143
ctcggtcctcgctcagcggcccggcaggccgcacaactgtaaccgctgccccggccgccgcccgctccttctcggtccggcgggcacagagcgcagcgcggcggggccggcggcatggctgtgtcctggaggagctggctcgccaacgaaggggttaaacacctctgcctgttcatctggctctccatgaatgtcctgcttttctggaaaaccttcttgctgtataaccaagggccagagtatcactacctccaccagatgttggggctaggattgtgtctaagcagagcctcagcatctgttcttaacctcaactgcagccttatccttttacccatgtgccgaacactcttggcttacctccgaggatcacagaaggttccaagcaggagaaccaggagattgttggataaaagcagaacattccatattacctgtggtgttactatctgtattttctcaggcgtgcatgtggctgcccatctggtgaatgccctcaacttctcagtgaattacagtgaagactttgttgaactgaatgcagcaagataccgagatgaggatcctagaaaacttctcttcacaactgttcctggcctgacaggggtctgcatggtggtggtgctattcctcatgatcacagcctctacatatgcaataagagtttctaactatgatatcttctggtatactcataacctcttctttgtcttctacatgctgctgacgttgcatgtttcaggggatgactggaaaccatacaagcttagaagactatactttatttgggtatgcagagatatccagtccttccgttggtttgcagatttactctgtatgttgcataacaagttttggcaagagaacagacctgactatgtcaacatccagctgtacctcagtcaaacagatgggatacagaagataattggagaaaaatatcatgcactgaattcaagactgtttataggacgtcctcggtggaaacttttgtttgatgaaatagcaaaatataacagaggaaaaacagttggtgttttctgttgtggacccaattcactatccaagactcttcataaactgagtaaccagaacaactcatatgggacaagatttgaatacaataaagagtctttcagctgaaaacttttgccatgaagcaggactctaaagaaggaatgagtgcaatttctaagactttgaaactcagcggaatcaatcagctgtgttatgccaaagaatagtaaggttttcttatttatgattatttaaaatggaaatgtgagaatgtggcaagatgaccgtcacattacatgtttaatctggaaaccaaagagaccctgaagaatatttgatgtgatgattcacttttcagttctcaaattaaaagaaaactgttagatgcacactgttgattttcatggtggattcaagaactccctagtgaggagctgaacttgctcaatctaaggctgattgtcgtgttcctctttaaattgtttttggttgaacaaatgcaagattgaacaaaattaaaaattcattgaagctgaaa

SEQ ID NO: 157751 - DNA, 2156 bp, Homo sapiens
  Payload ID: 10912
  Gene Symbol: NOX4
  Gene Name: NADPH oxidase 4
  Uniprot ID: Q9NPH5
  ENST ID: ENST00000534731
  CDS Start-End: 83-1699
acaactgtaaccgctgccccggccgccgcccgctccttctcggtccggcgggcacagagcgcagcgcggcggggccggcggcatggctgtgtcctggaggagctggctcgccaacgaaggggttaaacacctctgcctgttcatctggctctccatgaatgtcctgcttttctggaaaaccttcttgctgtataaccaagggccagagtatcactacctccaccagatgttggggctaggattgtgtctaagcagagcctcagcatctgttcttaacctcaactgcagccttatccttttacccatgtgccgaacactcttggcttacctccgaggatcacagaaggttccaagcaggagaaccaggagattgttggataaaagcagaacattccatattacctgtggtgttactatctgtattttctcaggcgtgcatgtggctgcccatctggtgaatgccctcaacttctcagtgaattacagtgaagactttgttgaactgaatgcagcaagataccgagatgaggatcctagaaaacttctcttcacaactgttcctggcctgacaggggtctgcatggtggtggtgctattcctcatgatcacagcctctacatatgcaataagagtttctaactatgatatcttctggtatactcataacctcttctttgtcttctacatgctgctgacgttgcatgtttcaggagggctgctgaagtatcaaactaatttagatacccaccctcccggctgcatcagtcttaaccgaaccagctctcagaatatttccttaccagagtatttctcagaacattttcatgaacctttccctgaaggattttcaaaaccggcagagtttacccagcacaaatttgtgaagatttgtatggaagagcccagattccaagctaattttccacagacttggctttggatttctggacctttgtgcctgtactgtgccgaaagactttacaggtatatccggagcaataagccagtcaccatcatttcggtcatgagtcatccctcagatgtcatggaaatccgaatggtcaaagaaaattttaaagcaagacctggtcagtatattactctacattgtcccagtgtatctgcattagaaaatcatccatttaccctcacaatgtgtccaactgaaaccaaagcaacatttggggttcatcttaaaatagtaggagactggacagaacgatttcgagatttactactgcctccatctagtcaagactccgaaattctgcccttcattcaatctagaaattatcccaaggatgactggaaaccatacaagcttagaagactatactttatttgggtatgcagagatatccagtccttccgttggtttgcagatttactctgtatgttgcataacaagttttggcaagagaacagacctgactatgtcaacatccagctgtacctcagtcaaacagatgggatacagaagataattggagaaaaatatcatgcactgaattcaagactgtttataggacgtcctcggtggaaacttttgtttgatgaaatagcaaaatataacagaggaaaaacagttggtgttttctgttgtggacccaattcactatccaagactcttcataaactgagtaaccagaacaactcatatgggacaagatttgaatacaataaagagtctttcagctgaaaacttttgccatgaagcaggactctaaagaaggaatgagtgcaatttctaagactttgaaactcagcggaatcaatcagctgtgttatgccaaagaatagtaaggttttcttatttatgattatttaaaatggaaatgtgagaatgtggcaagatgaccgtcacattacatgtttaatctggaaaccaaagagaccctgaagaatatttgatgtgatgattcacttttcagttctcaaattaaaagaaaactgttagatgcacactgttgattttcatggtggattcaagaactccctagtgaggagctgaacttgctcaatctaaggctgattgtcgtgttcctctttaaattgtttttggttgaacaaatgcaagattgaacaaaattaaaaattcattgaagctgaaattccattttctgtgttgtgtataaacagagtagctttaatttgca

SEQ ID NO: 157752 - DNA, 1899 bp, Homo sapiens
  Payload ID: 10912
  Gene Symbol: NOX4
  Gene Name: NADPH oxidase 4
  ENST ID: ENST00000528341
  CDS Start-End: 49-1710
cagatttgttttcctctgagtggttttcagcttgctggttaattgaaaatgctttctgcagttactgatttaggttccattgaaagcactgtgtcgaagaatttacctgtggtttctattcatcagctaggattgtgtctaagcagagcctcagcatctgttcttaacctcaactgcagccttatccttttacccatgtgccgaacactcttggcttacctccgaggatcacagaaggttccaagcaggagaaccaggagattgttggataaaagcagaacattccatattacctgtggtgttactatctgtattttctcaggcgtgcatgtggctgcccatctggtgaatgccctcaacttctcagtgaattacagtgaagactttgttgaactgaatgcagcaagataccgagatgaggatcctagaaaacttctcttcacaactgttcctggcctgacaggggtctgcatggtggtggtgctattcctcatgatcacagcctctacatatgcaataagagtttctaactatgatatcttctggtatactcataacctcttctttgtcttctacatgctgctgacgttgcatgtttcaggagggctgctgaagtatcaaactaatttagatacccaccctcccggctgcatcagtcttaaccgaaccagctctcagaatatttccttaccagagtatttctcagaacattttcatgaacctttccctgaaggattttcaaaaccggcagagtttacccagcacaaatttgtgaagatttgtatggaagagcccagattccaagctaattttccacagacttggctttggatttctggacctttgtgcctgtactgtgccgaaagactttacaggtatatccggagcaataagccagtcaccatcatttcggtcatgagtcatccctcagatgtcatggaaatccgaatggtcaaagaaaattttaaagcaagacctggtcagtatattactctacattgtcccagtgtatctgcattagaaaatcatccatttaccctcacaatgtgtccaactgaaaccaaagcaacatttggggttcatcttaaaatagtaggagactggacagaacgatttcgagatttactactgcctccatctagtcaagactccgaaattctgcccttcattcaatctagaaattatcccaagctgtatattgatggtccttttggaagtccatttgaggaatcactgaactatgaggtcagcctctgcgtggctggaggcattggagtaactccatttgcatcaatactcaacaccctgttggatgactggaaaccatacaagcttagaagactatactttatttgggtatgcagagatatccagtccttccgttggtttgcagatttactctgtatgttgcataacaagttttggcaagagaacagacctgactatgtcaacatccagctgtacctcagtcaaacagatgggatacagaagataattggagaaaaatatcatgcactgaattcaagactgtttataggacgtcctcggtggaaacttttgtttgatgaaatagcaaaatataacagaggaaaaacagttggtgttttctgttgtggacccaattcactatccaagactcttcataaactgagtaaccagaacaactcatatgggacaagatttgaatacaataaagagtctttcagctgaaaacttttgccatgaagcaggactctaaagaaggaatgagtgcaatttctaagactttgaaactcagcggaatcaatcagctgtgttatgccaaagaatagtaaggttttcttatttatgattatttaaaatggaaatgtgagaatgtggcaagatgaccgtcacattacatgtttaatctggaaacca

SEQ ID NO: 157753 - DNA, 1678 bp, Homo sapiens
  Payload ID: 10913
  Gene Symbol: NOXA1
  Gene Name: NADPH oxidase activator 1
  Uniprot ID: Q86UR1
  ENST ID: ENST00000341349
  CDS Start-End: 181-1632
ccggggaggggcgggcgcctgccgccagggggcgccgcggggcagcggggttgcacctggcgcttggcgcccgcacctctgcccgcctcggagaccccgcagccccgcgccgccgcctggccccggccccggcccctccgcgggatcctggcccctcctcgagcgccgccaccggccgccatggcctctctgggggacctggtgcgcgcctggcacctgggcgcgcaggctgtggatcgtggggactgggcccgcgccttgcacctcttctcgggcgtcccggcgccgcccgccaggctgtgcttcaacgcgggctgcgtgcacctgctggccggggaccccgaggccgcgctgcgggcatttgaccaagccgtgaccaaggacacctgcatggcggttggcttcttccagcgaggagtggccaacttccagctggcaaggttccaggaggctctgtctgacttctggctggccctggagcagctgaggggccacgctgccatcgactacacgcagctgggcctgcggttcaagctgcaagcctgggaggtgctacacaatgtggcgtcggcacagtgccagctggggctctggacagaggcggccagcagcctaagggaggccatgtccaagtggccggaggggtccctgaatggcctggactcagccctggaccaagtgcagagacggggctcactgccgccacggcaggtccccaggggcgaggtcttccggccccaccggtggcacctgaagcacttggagcccgtggatttcctgggcaaggccaaggtggtggcctctgccatccccgacgaccagggctggggcgtccgccctcagcagccacagggaccaggagcgaaccatgatgccaggtccctaatcatggactccccaagagctggcacccaccagggccccctcgatgcagagacagaggtcggtgctgaccgctgcacgtcgactgcctaccaggagcagaggccccaggtggagcaagttggcaaacaggctcctctctccccagggctgccggcaatgggggggcctggccccggcccctgtgaggaccccgcgggtgctgggggagcaggtgcagggggctccgagcccctggtgactgtcaccgtgcagtgcgccttcacagtggccctgagggcacgaagaggagccgacctgtccagcctgcgggcactgctgggccaagccctccctcaccaggcccagcttgggcaactcagttacctagccccaggtgaggacgggcactgggtccccatccccgaggaggagtcgctgcagagggcctggcaggacgcagctgcctgccccagggggctgcagctgcagtgcaggggagccgggggtcggccggtcctctaccaggtggtggcccagcacagctactccgcccaggggccagaggacctgggcttccgacagggggacacggtggacgtcctgtgtgaagagcccgatgtcccccttgcagtggaccaggcatggctggagggccactgtgacggccgcatcggcatcttccccaagtgcttcgtggtccccgccggccctcggatgtcaggagcccccggccgcctgccccgatcccagcagggagatcagccctaatgatgctgtgtccatgatgcttttaataaaaacaacccccactgca

SEQ ID NO: 157754 - DNA, 1464 bp, Homo sapiens
  Payload ID: 10913
  Gene Symbol: NOXA1
  Gene Name: NADPH oxidase activator 1
  Uniprot ID: Q86UR1
  ENST ID: ENST00000392815
  CDS Start-End: 136-1419
cggggttgcacctggcgcttggcgcccgcacctctgcccgcctcggagaccccgcagccccgcgccgccgcctggccccggccccggcccctccgcgggatcctggcccctcctcgagcgccgccaccggccgccatggcctctctgggggacctggtgcgcgcctggcacctgggcgcgcaggctgtggatcgtggggactgggcccgcgccttgcacctcttctcgggcgtcccggcgccgcccgccaggctgtgcttcaacgcgggctgcgtgcacctgctggccggggaccccgaggccgcgctgcgggcatttgaccaagccgtgaccaaggacacctgcatggcggttggcttcttccagcgaggagtggccaacttccagctggcaaggttccaggaggctctgtctgacttctggctggccctggagcagctgaggggccacgctgccatcgactacacgcagctgggcctgcggttcaagctgcaagcctgggaggtgctacacaatgtggcgtcggcacagtgccagctggggctctggacagaggcggccagcagcctaagggaggccatgtccaagtggccggaggggtccctgaatggcctggactcagccctggaccaagtgcagggaccaggagcgaaccatgatgccaggtccctaatcatggactccccaagagctggcacccaccagggccccctcgatgcagagacagaggtcggtgctgaccgctgcacgtcgactgcctaccaggagcagaggccccaggtggagcaagttggcaaacaggctcctctctccccagggctgccggcaatgggggggcctggccccggcccctgtgaggaccccgcgggtgctgggggagcaggtgcagggggctccgagcccctggtgactgtcaccgtgcagtgcgccttcacagtggccctgagggcacgaagaggagccgacctgtccagcctgcgggcactgctgggccaagccctccctcaccaggcccagcttgggcaactcagttacctagccccaggtgaggacgggcactgggtccccatccccgaggaggagtcgctgcagagggcctggcaggacgcagctgcctgccccagggggctgcagctgcagtgcaggggagccgggggtcggccggtcctctaccaggtggtggcccagcacagctactccgcccaggggccagaggacctgggcttccgacagggggacacggtggacgtcctgtgtgaagagcccgatgtcccccttgcagtggaccaggcatggctggagggccactgtgacggccgcatcggcatcttccccaagtgcttcgtggtccccgccggccctcggatgtcaggagcccccggccgcctgccccgatcccagcagggagatcagccctaatgatgctgtgtccatgatgcttttaataaaaacaacccccactgc

SEQ ID NO: 157755 - DNA, 1618 bp, Homo sapiens
  Payload ID: 10914
  Gene Symbol: NOXO1
  Gene Name: NADPH oxidase organizer 1
  Uniprot ID: Q8NFA2
  ENST ID: ENST00000354249
  CDS Start-End: 371-1483
cttctcctccctcctcctgtggccagaggcaggcaggagggccccaggcagcagtcccgcctacccttcgccccttcttcagtcttgcacgcctccagggctggaaagctcattcttcttcttcctcccagcagctctgcctggaagtcccccaatccctgtgctcctgcccccagatcgtgggcttgggggacagcaagaaagctgcaaaggactcagctggggcggctccacaaggaccccacaggcttgaggtgttgccaggattctatcccagggggttttctgggtcccccagagccctctcaagcacggggaggcagaagggtcctcgcccatttcaggaatctgcagcctggaagccacagccatggcaggcccccgatacccagtttcagtgcaaggggcagccctggtgcagatcaagaggctccaaacgtttgccttctctgtgcgctggtcagacggcagcgacaccttcgtgcgcaggagttgggacgaattcaggcagctcaagaccctcaaggagaccttcccggtggaggcgggcctgctgcggagatctgaccgcgttctcccaaagcttctcgatgcaccactgttgggacgcgtggggcgcacgagccgcggcctggcgcgcctgcagctgttggaaacctattctcggaggctgctggcgactgcagagcgcgtggcacggagcccgacgatcactggcttcttcgcaccgcaacccctggacctggagcccgcgctgccacccggcagccgggtgatcctgcccaccccagaggagcagcctctttctcgcgctgcgggccgcctctccatccacagtctggaggctcagagcctgcgctgcctgcagcccttctgtacccaggacacgcgggataggccttttcaggcgcaggcccaggagagcctggacgtgctgctgcggcacccctcaggctggtggctggtggagaacgaagaccggcagaccgcctggtttccagcgccctacctggaggaggcggccccgggccaaggccgggagggaggcccgtccctagggagcagcggtccccagttctgtgcttcccgcgcctacgagagcagccgcgcagatgagctgtccgtgcccgcgggggcgcgcgtgcgcgtgttggaaacgtcagaccgcggctggtggctatgcaggtacggcgaccgggcgggcctactccccgcggtgctgctgcggccggaagggctgggcgctctcctgagcgggacggggttccgtggaggagacgacccggcgggtgaggcccggggcttccctgaaccctcccaggccaccgcccctccccccaccgtgcccacccgaccttcgccgggcgccatccagagccgctgctgcaccgtcacacgcagggccctggagcggcgcccacggcgccagggccgccctcgagggtgcgtggactctgtgccgcaccccacgacggagcagtgagcgcgaggatcccgatgaggggatggaccgcgccatcccagggctggggaggagcggggagggcggatctccctggccagcagggatgggagggggccatttgctgttcctctgagtaaagcttgttctgcatga

SEQ ID NO: 157756 - DNA, 1539 bp, Homo sapiens
  Payload ID: 10914
  Gene Symbol: NOXO1
  Gene Name: NADPH oxidase organizer 1
  Uniprot ID: Q8NFA2
  ENST ID: ENST00000356120
  CDS Start-End: 289-1404
tcttgcacgcctccagggctggaaagctcattcttcttcttcctcccagcagctctgcctggaagtcccccaatccctgtgctcctgcccccagatcgtgggcttgggggacagcaagaaagctgcaaaggactcagctggggcggctccacaaggaccccacaggcttgaggtgttgccaggattctatcccagggggttttctgggtcccccagagccctctcaagcacggggaggcagaagggtcctcgcccatttcaggaatctgcagcctggaagccacagccatggcaggcccccgatacccagtttcagtgcaaggggcagccctggtgcagatcaagaggctccaaacgtttgccttctctgtgcgctggtcagacggcagcgacaccttcgtgcgcaggagttgggacgaattcaggcagctcaagaagaccctcaaggagaccttcccggtggaggcgggcctgctgcggagatctgaccgcgttctcccaaagcttctcgatgcaccactgttgggacgcgtggggcgcacgagccgcggcctggcgcgcctgcagctgttggaaacctattctcggaggctgctggcgactgcagagcgcgtggcacggagcccgacgatcactggcttcttcgcaccgcaacccctggacctggagcccgcgctgccacccggcagccgggtgatcctgcccaccccagaggagcagcctctttctcgcgctgcgggccgcctctccatccacagtctggaggctcagagcctgcgctgcctgcagcccttctgtacccaggacacgcgggataggccttttcaggcgcaggcccaggagagcctggacgtgctgctgcggcacccctcaggctggtggctggtggagaacgaagaccggcagaccgcctggtttccagcgccctacctggaggaggcggccccgggccaaggccgggagggaggcccgtccctagggagcagcggtccccagttctgtgcttcccgcgcctacgagagcagccgcgcagatgagctgtccgtgcccgcgggggcgcgcgtgcgcgtgttggaaacgtcagaccgcggctggtggctatgcaggtacggcgaccgggcgggcctactccccgcggtgctgctgcggccggaagggctgggcgctctcctgagcgggacggggttccgtggaggagacgacccggcgggtgaggcccggggcttccctgaaccctcccaggccaccgcccctccccccaccgtgcccacccgaccttcgccgggcgccatccagagccgctgctgcaccgtcacacgcagggccctggagcggcgcccacggcgccagggccgccctcgagggtgcgtggactctgtgccgcaccccacgacggagcagtgagcgcgaggatcccgatgaggggatggaccgcgccatcccagggctggggaggagcggggagggcggatctccctggccagcagggatgggagggggccatttgctgttcctctgagtaaagcttgttctgcatga

SEQ ID NO: 157757 - DNA, 1147 bp, Homo sapiens
  Payload ID: 10914
  Gene Symbol: NOXO1
  Gene Name: NADPH oxidase organizer 1
  Uniprot ID: Q8NFA2
  ENST ID: ENST00000397280
  CDS Start-End: 5-1135
agccatggcaggcccccgatacccagtttcagtgcaaggggcagccctggtgcagatcaagaggctccaaacgtttgccttctctgtgcgctggtcagacggcagcgacaccttcgtgcgcaggagttgggacgaattcaggcagctcaagaagaccctcaaggagaccttcccggtggaggcgggcctgctgcggagatctgaccgcgttctcccaaagcttctcggtcaggccagcctggatgcaccactgttgggacgcgtggggcgcacgagccgcggcctggcgcgcctgcagctgttggaaacctattctcggaggctgctggcgactgcagagcgcgtggcacggagcccgacgatcactggcttcttcgcaccgcaacccctggacctggagcccgcgctgccacccggcagccgggtgatcctgcccaccccagaggagcagcctctttctcgcgctgcgggccgcctctccatccacagtctggaggctcagagcctgcgctgcctgcagcccttctgtacccaggacacgcgggataggccttttcaggcgcaggcccaggagagcctggacgtgctgctgcggcacccctcaggctggtggctggtggagaacgaagaccggcagaccgcctggtttccagcgccctacctggaggaggcggccccgggccaaggccgggagggaggcccgtccctagggagcagcggtccccagttctgtgcttcccgcgcctacgagagcagccgcgcagatgagctgtccgtgcccgcgggggcgcgcgtgcgcgtgttggaaacgtcagaccgcggctggtggctatgcaggtacggcgaccgggcgggcctactccccgcggtgctgctgcggccggaagggctgggcgctctcctgagcgggacggggttccgtggaggagacgacccggcgggtgaggcccggggcttccctgaaccctcccaggccaccgcccctccccccaccgtgcccacccgaccttcgccgggcgccatccagagccgctgctgcaccgtcacacgcagggccctggagcggcgcccacggcgccagggccgccctcgagggtgcgtggactctgtgccgcaccccacgacggagcagtgagcgcgaggatcc

SEQ ID NO: 157758 - DNA, 582 bp, Homo sapiens
  Payload ID: 10914
  Gene Symbol: NOXO1
  Gene Name: NADPH oxidase organizer 1
  ENST ID: ENST00000567471
  CDS Start-End: 355-582
agctcggcctccagatgagcctccagatggaggtctcaacatgttgcccagactggtctcgaactcctgagctcaagcaatccccctgcctcggcctcccaaagtacttggattacagctctgcctggaagtcccccaatccctgtgctcctgcccccagatcgtgggcttgggggacagcaagaaagctgcaaaggactcagctggggcggctccacaaggaccccacaggcttgaggtgttgccaggattctatcccagggggttttctgggtcccccagagccctctcaagcacggggaggcagaagggtcctcgcccatttcaggaatctgcagcctggaagccacagccatggcaggcccccgatacccagtttcagtgcaaggggcagccctggtgcagatcaagaggctccaaacgtttgccttctctgtgcgctggtcagacggcagcgacaccttcgtgcgcaggagttgggacgaattcaggcagctcaagaagaccctcaaggagaccttcccggtggaggcgggcctgctgcggagatctgaccgcgttctcccaaagcttctcgatgca

SEQ ID NO: 157759 - DNA, 1144 bp, Homo sapiens
  Payload ID: 10914
  Gene Symbol: NOXO1
  Gene Name: NADPH oxidase organizer 1
  Uniprot ID: Q8NFA2
  ENST ID: ENST00000566005
  CDS Start-End: 5-1132
agccatggcaggcccccgatacccagtttcagtgcaaggggcagccctggtgcagatcaagaggctccaaacgtttgccttctctgtgcgctggtcagacggcagcgacaccttcgtgcgcaggagttgggacgaattcaggcagctcaagaccctcaaggagaccttcccggtggaggcgggcctgctgcggagatctgaccgcgttctcccaaagcttctcggtcaggccagcctggatgcaccactgttgggacgcgtggggcgcacgagccgcggcctggcgcgcctgcagctgttggaaacctattctcggaggctgctggcgactgcagagcgcgtggcacggagcccgacgatcactggcttcttcgcaccgcaacccctggacctggagcccgcgctgccacccggcagccgggtgatcctgcccaccccagaggagcagcctctttctcgcgctgcgggccgcctctccatccacagtctggaggctcagagcctgcgctgcctgcagcccttctgtacccaggacacgcgggataggccttttcaggcgcaggcccaggagagcctggacgtgctgctgcggcacccctcaggctggtggctggtggagaacgaagaccggcagaccgcctggtttccagcgccctacctggaggaggcggccccgggccaaggccgggagggaggcccgtccctagggagcagcggtccccagttctgtgcttcccgcgcctacgagagcagccgcgcagatgagctgtccgtgcccgcgggggcgcgcgtgcgcgtgttggaaacgtcagaccgcggctggtggctatgcaggtacggcgaccgggcgggcctactccccgcggtgctgctgcggccggaagggctgggcgctctcctgagcgggacggggttccgtggaggagacgacccggcgggtgaggcccggggcttccctgaaccctcccaggccaccgcccctccccccaccgtgcccacccgaccttcgccgggcgccatccagagccgctgctgcaccgtcacacgcagggccctggagcggcgcccacggcgccagggccgccctcgagggtgcgtggactctgtgccgcaccccacgacggagcagtgagcgcgaggatcc

SEQ ID NO: 157760 - DNA, 2804 bp, Homo sapiens
  Payload ID: 10915
  Gene Symbol: NOX5
  Gene Name: NADPH oxidase, EF-hand calcium binding domain 5
  Uniprot ID: Q96PH1
  ENST ID: ENST00000388866
  CDS Start-End: 42-2339
agcagtctttctgggacctgtgatctagaagacaggagaagatgaacacatctggagacccagcccagacgggccctgaaggctgtagaggcaccatgagtgccgaggaggatgccaggtggctccggtgggtgactcagcagtttaagaccattgcaggagaagatggggagatcagcctgcaagaattcaaagcagctctgcatgtgaaagagtccttctttgcagagcgattctttgccctatttgactccgatagaagtggcaccatcaccctccaggagctgcaggaggcactgaccctgctcatccatggcagccccatggacaaactcaaattcctcttccaggtgtatgacatcgatgtgtgtgcacggcagggggcgtctgcaggtacagagtggggtgctggggcaggcccgcactgggcttcatccccactcgggacaggcagtggctccattgacccggatgagctgcgcactgtgctgcagtcgtgtctgcgcgagagcgccatctcgctgcctgacgagaagctggaccagctgacgctggcgctcttcgaatcggccgacgcggacggcaacggggccatcaccttcgaggagctccgggacgagctgcagcgcttccccggagtcatggagaacctgaccatcagcgctgcccactggctgacggcccccgccccccgcccacgcccgcgccggccgcgccagctgacccgcgcctactggcacaaccaccgcagccagctgttctgcctggccacctatgcaggcctccacgtgctgctcttcgggctggcggccagcgcgcaccgggacctcggcgccagcgtcatggtggccaagggctgcggccagtgcctcaacttcgactgcagcttcatcgcggtgctgatgctcagacgctgcctcacctggctgcgggccacgtggctggctcaagtcctaccactggaccagaacatccagttccaccagcttatgggctacgtggtagtggggctgtccctcgtgcacaccgtggctcacactgtgaactttgtactccaggctcaggcggaggccagccctttccagttctgggagctgctgctcaccacgaggcctggcattggctgggtacacggttcggcctccccgacaggtgtcgctctgctgctgctgctcctcctcatgttcatctgctccagttcctgcatccgcaggagtggccactttgaggtgttctattggactcacctgtcctacctcctcgtgtggcttctgctcatctttcatgggcccaacttctggaagtggctgctggtgcctggaatcttgtttttcctggagaaggccatcggactggcagtgtcccgcatggcagccgtgtgcatcatggaagtcaacctcctcccctccaaggtcactcatctcctcatcaagcggccccctttttttcactatagacctggtgactacttgtatctgaacatccccaccattgctcgctatgagtggcaccccttcaccatcagcagtgctcctgagcagaaagacactatctggctgcacattcggtcccaaggccagtggacaaacaggctgtatgagtccttcaaggcatcagacccactgggccgtggttctaagaggctgtcgaggagtgtgacaatgagaaagagtcaaaggtcgtccaagggctctgagatacttttggagaaacacaaattctgtaacatcaagtgctacatcgatgggccttatgggacccccacccgcaggatctttgcctctgagcatgccgtgctcatcggggcaggcatcggcatcaccccctttgcttccattctgcagagtatcatgtacaggcaccagaaaagaaagcatacttgccccagctgccagcactcctggatcgaaggtgtccaagacaacatgaagctccataaggtggactttatctggatcaacagagaccagcggtctttcgagtggtttgtgagcctgctgactaaactggagatggaccaggccgaggaggctcaatacggccgcttcctggagctgcatatgtacatgacatctgcactgggcaagaatgacatgaaggccattggcctgcagatggcccttgacctcctggccaacaaggagaagaaagactccatcacggggctgcagacgcgcacccagcctgggcggcctgactggagcaaggtgttccagaaagtggctgctgagaagaagggcaaggtgcaggtcttcttctgtggctccccagctctggccaaggtgctgaagggccattgtgagaagttcggcttcagatttttccaagagaatttctagcctcacctctccaagctctgccccaagtccacaccatgggtctgcttcattgcattagtataaatgcccccacagggaccagcctcagatgacccacccaataagacaaagcctagggaccccctaatcctgctcaacagagagaacaggagaccccaaggggcagatgaacttcctctagaacccaggggaagggacagtgccttgttcagtctgctgtagattctggggtttctgtgaaagtgagggaaccagaggctggtcacgggagcttgggggtggggttcgagggggcagagggcaaccactcctccaaacattttccgacggagccttcccccacatccatggtcccaaacctgcccaatcatcacagtcatttggaagcttatttctccggcatcttataaaattgttcaaacctacaaaaagtgagaagaatcatacagtgaacagtgttaccta

SEQ ID NO: 157761 - DNA, 2498 bp, Homo sapiens
  Payload ID: 10915
  Gene Symbol: NOX5
  Gene Name: NADPH oxidase, EF-hand calcium binding domain 5
  Uniprot ID: Q96PH1
  ENST ID: ENST00000448182
  CDS Start-End: 302-2461
gttgctgggtgtcccagggcctgaggcaggacggtactccgctgacaccttccctttcggccttgaggttcccagcctggtggccccaggacgttccggtcgcatggcagagtgctacggacgacgcctatgaagcccttagtccttctagttgcgcttttgctatggccttcgtctgtgccggcttatccgaggtctcaatccattgcgcccaggctggtatgcagtcatgttgtatctggaattggtgggttcttggtctcactgacttcaagaatgaagccgcagaccctcgtgcaccatgagtgccgaggaggatgccaggtggctccggtgggtgactcagcagtttaagaccattgcaggagaagatggggagatcagcctgcaagaattcaaagcagctctgcatgtgaaagagtccttctttgcagagcgattctttgccctatttgactccgatagaagtggcaccatcaccctccaggagctgcaggaggcactgaccctgctcatccatggcagccccatggacaaactcaaattcctcttccaggtgtatgacatcgatggcagtggctccattgacccggatgagctgcgcactgtgctgcagtcgtgtctgcgcgagagcgccatctcgctgcctgacgagaagctggaccagctgacgctggcgctcttcgaatcggccgacgcggacggcaacggggccatcaccttcgaggagctccgggacgagctgcagcgcttccccggagtcatggagaacctgaccatcagcgctgcccactggctgacggcccccgccccccgcccacgcccgcgccggccgcgccagctgacccgcgcctactggcacaaccaccgcagccagctgttctgcctggccacctatgcaggcctccacgtgctgctcttcgggctggcggccagcgcgcaccgggacctcggcgccagcgtcatggtggccaagggctgcggccagtgcctcaacttcgactgcagcttcatcgcggtgctgatgctcagacgctgcctcacctggctgcgggccacgtggctggctcaagtcctaccactggaccagaacatccagttccaccagcttatgggctacgtggtagtggggctgtccctcgtgcacaccgtggctcacactgtgaactttgtactccaggctcaggcggaggccagccctttccagttctgggagctgctgctcaccacgaggcctggcattggctgggtacacggttcggcctccccgacaggtgtcgctctgctgctgctgctcctcctcatgttcatctgctccagttcctgcatccgcaggagtggccactttgaggtgttctattggactcacctgtcctacctcctcgtgtggcttctgctcatctttcatgggcccaacttctggaagtggctgctggtgcctggaatcttgtttttcctggagaaggccatcggactggcagtgtcccgcatggcagccgtgtgcatcatggaagtcaacctcctcccctccaaggtcactcatctcctcatcaagcggccccctttttttcactatagacctggtgactacttgtatctgaacatccccaccattgctcgctatgagtggcaccccttcaccatcagcagtgctcctgagcagaaagacactatctggctgcacattcggtcccaaggccagtggacaaacaggctgtatgagtccttcaaggcatcagacccactgggccgtggttctaagaggctgtcgaggagtgtgacaatgagaaagagtcaaaggtcgtccaagggctctgagatacttttggagaaacacaaattctgtaacatcaagtgctacatcgatgggccttatgggacccccacccgcaggatctttgcctctgagcatgccgtgctcatcggggcaggcatcggcatcaccccctttgcttccattctgcagagtatcatgtacaggcaccagaaaagaaagcatacttgccccagctgccagcactcctggatcgaaggtgtccaagacaacatgaagctccataaggtggactttatctggatcaacagagaccagcggtctttcgagtggtttgtgagcctgctgactaaactggagatggaccaggccgaggaggctcaatacggccgcttcctggagctgcatatgtacatgacatctgcactgggcaagaatgacatgaaggccattggcctgcagatggcccttgacctcctggccaacaaggagaagaaagactccatcacggggctgcagacgcgcacccagcctgggcggcctgactggagcaaggtgttccagaaagtggctgctgagaagaagggcaaggtgcaggtcttcttctgtggctccccagctctggccaaggtgctgaagggccattgtgagaagttcggcttcagatttttccaagagaatttctagcctcacctctccaagctctgccccaagtccacaccat

SEQ ID NO: 157762 - DNA, 2277 bp, Homo sapiens
  Payload ID: 10915
  Gene Symbol: NOX5
  Gene Name: NADPH oxidase, EF-hand calcium binding domain 5
  Uniprot ID: Q96PH1
  ENST ID: ENST00000455873
  CDS Start-End: 56-2248
gagtgctacggacgacgcctatgaagcccttagtccttctagttgcgcttttgctatggccttcgtctgtgccggcttatccgacaccatgagtgccgaggaggatgccaggtggctccggtgggtgactcagcagtttaagaccattgcaggagaagatggggagatcagcctgcaagaattcaaagcagctctgcatgtgaaagagtccttctttgcagagcgattctttgccctatttgactccgatagaagtggcaccatcaccctccaggagctgcaggaggcactgaccctgctcatccatggcagccccatggacaaactcaaattcctcttccaggtgtatgacatcgatggcagtggctccattgacccggatgagctgcgcactgtgctgcagtcgtgtctgcgcgagagcgccatctcgctgcctgacgagaagctggaccagctgacgctggcgctcttcgaatcggccgacgcggacggcaacggggccatcaccttcgaggagctccgggacgagctgcagcgcttccccggagtcatggagaacctgaccatcagcgctgcccactggctgacggcccccgccccccgcccacgcccgcgccggccgcgccagctgacccgcgcctactggcacaaccaccgcagccagctgttctgcctggccacctatgcaggcctccacgtgctgctcttcgggctggcggccagcgcgcaccgggacctcggcgccagcgtcatggtggccaagggctgcggccagtgcctcaacttcgactgcagcttcatcgcggtgctgatgctcagacgctgcctcacctggctgcgggccacgtggctggctcaagtcctaccactggaccagaacatccagttccaccagcttatgggctacgtggtagtggggctgtccctcgtgcacaccgtggctcacactgtgaactttgtactccaggctcaggcggaggccagccctttccagttctgggagctgctgctcaccacgaggcctggcattggctgggtacacggttcggcctccccgacaggtgtcgctctgctgctgctgctcctcctcatgttcatctgctccagttcctgcatccgcaggagtggccactttgaggtgttctattggactcacctgtcctacctcctcgtgtggcttctgctcatctttcatgggcccaacttctggaagtggctgctggtgcctggaatcttgtttttcctggagaaggccatcggactggcagtgtcccgcatggcagccgtgtgcatcatggaagtcaacctcctcccctccaaggtcactcatctcctcatcaagcggccccctttttttcactatagacctggtgactacttgtatctgaacatccccaccattgctcgctatgagtggcaccccttcaccatcagcagtgctcctgagcagaaagacactatctggctgcacattcggtcccaaggccagtggacaaacaggctgtatgagtccttcaaggcatcagacccactgggccgtggttctaagaggctgtcgaggagtgtgacaatgagaaagagtcaaaggtcgtccaagggctctgagatacttttggagaaacacaaattctgtaacatcaagtgctacatcgatgggccttatgggacccccacccgcaggatctttgcctctgagcatgccgtgctcatcggggcaggcatcggcatcaccccctttgcttccattctgcagagtatcatgtacaggcaccagaaaagaaagcatacttgccccagctgccagcactcctggatcgaaggtgtccaagacaacatgaagctccataaggtggactttatctggatcaacagagaccagcggtctttcgagtggtttgtgagcctgctgactaaactggagatggaccaggccgaggaggctcaatacggccgcttcctggagctgcatatgtacatgacatctgcactgggcaagaatgacatgaaggccattggcctgcagatggcccttgacctcctggccaacaaggagaagaaagactccatcacggggctgcagacgcgcacccagcctgggcggcctgactggagcaaggtgttccagaaagtggctgctgagaagaagggcaaggtgcaggtcttcttctgtggctccccagctctggccaaggtgctgaagggccattgtgagaagttcggcttcagatttttccaagagaatttctagcctcacctctccaagctctgccccaagtc

SEQ ID NO: 157763 - DNA, 2289 bp, Homo sapiens
  Payload ID: 10915
  Gene Symbol: NOX5
  Gene Name: NADPH oxidase, EF-hand calcium binding domain 5
  Uniprot ID: Q96PH1
  ENST ID: ENST00000530406
  CDS Start-End: 39-2252
agtctttctgggacctgtgatctagaagacaggagaagatgaacacatctggagacccagcccagacgggccctgaaggctgtagaggcaccatgagtgccgaggaggatgccaggtggctccggtgggtgactcagcagtttaagaccattgcaggagaagatggggagatcagcctgcaagaattcaaagcagctctgcatgtgaaagagtccttctttgcagagcgattctttgccctatttgactccgatagaagtggcaccatcaccctccaggagctgcaggaggcactgaccctgctcatccatggcagccccatggacaaactcaaattcctcttccaggtgtatgacatcgatggcagtggctccattgacccggatgagctgcgcactgtgctgcagtcgtgtctgcgcgagagcgccatctcgctgcctgacgagaagctggaccagctgacgctggcgctcttcgaatcggccgacgcggacggcaacggggccatcaccttcgaggagctccgggacgagctgcagcgcttccccggagtcatggagaacctgaccatcagcgctgcccactggctgacggcccccgccccccgcccacgcccgcgccggccgcgccagctgacccgcgcctactggcacaaccaccgcagccagctgttctgcctggccacctatgcaggcctccacgtgctgctcttcgggctggcggccagcgcgcaccgggacctcggcgccagcgtcatggtggccaagggctgcggccagtgcctcaacttcgactgcagcttcatcgcggtgctgatgctcagacgctgcctcacctggctgcgggccacgtggctggctcaagtcctaccactggaccagaacatccagttccaccagcttatgggctacgtggtagtggggctgtccctcgtgcacaccgtggctcacactgtgaactttgtactccaggctcaggcggaggccagccctttccagttctgggagctgctgctcaccacgaggcctggcattggctgggtacacggttcggcctccccgacaggtgtcgctctgctgctgctgctcctcctcatgttcatctgctccagttcctgcatccgcaggagtggccactttgaggtgttctattggactcacctgtcctacctcctcgtgtggcttctgctcatctttcatgggcccaacttctggaagtggctgctggtgcctggaatcttgtttttcctggagaaggccatcggactggcagtgtcccgcatggcagccgtgtgcatcatggaagtcaacctcctcccctccaaggtcactcatctcctcatcaagcggccccctttttttcactatagacctggtgactacttgtatctgaacatccccaccattgctcgctatgagtggcaccccttcaccatcagcagtgctcctgagcagaaagacactatctggctgcacattcggtcccaaggccagtggacaaacaggctgtatgagtccttcaaggcatcagacccactgggccgtggttctaagaggctgtcgaggagtgtgacaatgagaaagagtcaaaggtcgtccaagggctctgagatacttttggagaaacacaaattctgtaacatcaagtgctacatcgatgggccttatgggacccccacccgcaggatctttgcctctgagcatgccgtgctcatcggggcaggcatcggcatcaccccctttgcttccattctgcagagtatcatgtacaggcaccagaaaagaaagcatacttgccccagctgccagcactcctggatcgaaggtgtccaagacaacatgaagctccataaggtggactttatctggatcaacagagaccagcggtctttcgagtggtttgtgagcctgctgactaaactggagatggaccaggccgaggaggctcaatacggccgcttcctggagctgcatatgtacatgacatctgcactgggcaagaatgacatgaaggccattggcctgcagatggcccttgacctcctggccaacaaggagaagaaagactccatcacggggctgcagacgcgcacccagcctgggcggcctgactggagcaaggtgttccagaaagtggctgctgagaagaagggcaaggtgcaggtcttcttctgtggctccccagctctggccaaggtgctgaagggccattgtgagaagttcggcttcagatttttccaagagaatttctagcctcacctctccaagctctgccccaagtccacaccat

SEQ ID NO: 157764 - DNA, 8592 bp, Homo sapiens
  Payload ID: 10915
  Gene Symbol: NOX5
  Gene Name: NADPH oxidase, EF-hand calcium binding domain 5
  Uniprot ID: Q96PH1
  ENST ID: ENST00000260364
  CDS Start-End: 302-2545
gttgctgggtgtcccagggcctgaggcaggacggtactccgctgacaccttccctttcggccttgaggttcccagcctggtggccccaggacgttccggtcgcatggcagagtgctacggacgacgcctatgaagcccttagtccttctagttgcgcttttgctatggccttcgtctgtgccggcttatccgaggtctcaatccattgcgcccaggctggtatgcagtcatgttgtatctggaattggtgggttcttggtctcactgacttcaagaatgaagccgcagaccctcgtgcaccatgagtgccgaggaggatgccaggtggctccggtgggtgactcagcagtttaagaccattgcaggagaagatggggagatcagcctgcaagaattcaaagcagctctgcatgtgaaagagtccttctttgcagagcgattctttgccctatttgactccgatagaagtggcaccatcaccctccaggagctgcaggaggcactgaccctgctcatccatggcagccccatggacaaactcaaattcctcttccaggtgtatgacatcgatgtgtgtgcacggcagggggcgtctgcaggtacagagtggggtgctggggcaggcccgcactgggcttcatccccactcgggacaggcagtggctccattgacccggatgagctgcgcactgtgctgcagtcgtgtctgcgcgagagcgccatctcgctgcctgacgagaagctggaccagctgacgctggcgctcttcgaatcggccgacgcggacggcaacggggccatcaccttcgaggagctccgggacgagctgcagcgcttccccggagtcatggagaacctgaccatcagcgctgcccactggctgacggcccccgccccccgcccacgcccgcgccggccgcgccagctgacccgcgcctactggcacaaccaccgcagccagctgttctgcctggccacctatgcaggcctccacgtgctgctcttcgggctggcggccagcgcgcaccgggacctcggcgccagcgtcatggtggccaagggctgcggccagtgcctcaacttcgactgcagcttcatcgcggtgctgatgctcagacgctgcctcacctggctgcgggccacgtggctggctcaagtcctaccactggaccagaacatccagttccaccagcttatgggctacgtggtagtggggctgtccctcgtgcacaccgtggctcacactgtgaactttgtactccaggctcaggcggaggccagccctttccagttctgggagctgctgctcaccacgaggcctggcattggctgggtacacggttcggcctccccgacaggtgtcgctctgctgctgctgctcctcctcatgttcatctgctccagttcctgcatccgcaggagtggccactttgaggtgttctattggactcacctgtcctacctcctcgtgtggcttctgctcatctttcatgggcccaacttctggaagtggctgctggtgcctggaatcttgtttttcctggagaaggccatcggactggcagtgtcccgcatggcagccgtgtgcatcatggaagtcaacctcctcccctccaaggtcactcatctcctcatcaagcggccccctttttttcactatagacctggtgactacttgtatctgaacatccccaccattgctcgctatgagtggcaccccttcaccatcagcagtgctcctgagcagaaagacactatctggctgcacattcggtcccaaggccagtggacaaacaggctgtatgagtccttcaaggcatcagacccactgggccgtggttctaagaggctgtcgaggagtgtgacaatgagaaagagtcaaaggtcgtccaagggctctgagatacttttggagaaacacaaattctgtaacatcaagtgctacatcgatgggccttatgggacccccacccgcaggatctttgcctctgagcatgccgtgctcatcggggcaggcatcggcatcaccccctttgcttccattctgcagagtatcatgtacaggcaccagaaaagaaagcatacttgccccagctgccagcactcctggatcgaaggtgtccaagacaacatgaagctccataaggtggactttatctggatcaacagagaccagcggtctttcgagtggtttgtgagcctgctgactaaactggagatggaccaggccgaggaggctcaatacggccgcttcctggagctgcatatgtacatgacatctgcactgggcaagaatgacatgaaggccattggcctgcagatggcccttgacctcctggccaacaaggagaagaaagactccatcacggggctgcagacgcgcacccagcctgggcggcctgactggagcaaggtgttccagaaagtggctgctgagaagaagggcaaggtgcaggtcttcttctgtggctccccagctctggccaaggtgctgaagggccattgtgagaagttcggcttcagatttttccaagagaatttctagcctcacctctccaagctctgccccaagtccacaccatgggtctgcttcattgcattagtataaatgcccccacagggaccagcctcagatgacccacccaataagacaaagcctagggaccccctaatcctgctcaacagagagaacaggagaccccaaggggcagatgaacttcctctagaacccaggggaagggacagtgccttgttcagtctgctgtagattctggggtttctgtgaaagtgagggaaccagaggctggtcacgggagcttgggggtggggttcgagggggcagagggcaaccactcctccaaacattttccgacggagccttcccccacatccatggtcccaaacctgcccaatcatcacagtcatttggaagcttatttctccggcatcttataaaattgttcaaacctacaaaaagtgagaagaatcatacagtgaacagtgttacctactttctagactcctcagttaataatttgctctgtttatcacatattatccatcagttcctcctccctctttccatctgtcaatttatctgattttttggatgcattttcaagttaggtgcaaatatctcagcacaccttgctacttggaggagccttcttcaaatgcacattccttggtcccactaccagaaattctgattctgatgatctgggaatgaaacctgaaatatgtattttccaccaaatccatttgcatagggagaaataagcagcatctttccctgcccctccttgtgtctttgtctccccatctccctctctcctggcgcgtccctcagagcctctctgggctctgtatgctggcctcttccttctctctgtgtgctgagtcgcttgagaaacaggatggagacagcctctttgtgtgcctctctctgtcgtggaaaggccaagtgcctggggatgaagcgggctaagcctggaagctcagctcagccacactctggctgtgtggccctggaagcttccccatgtctgttattttcatctgtgaaataagctgatgccatccgtcagtcacagttgctgtgaggtgacatgagacgccaagtgctcaagacattccacctcagttcagctccttgctgctccaggctttcgtgcatctacatcatttctctttatcctggctccctctgtctctgttttccagcctctgtttgcgtctgtccctgtctgggcaggagggaacagcagaggcagcaaaggctctctcagcacatactgtggggaggagcggccctgggcagaggacagggtgggcctcacctcctccatctgagctggacatttccatctgtgccacaccatgagctcctgtgagccccacatttcctgggcatcctccaccttgcagtcagtcctgataggttctcttcttgacagtgtaaagcacccttccccaaggctgccatcatggggttggaaccaggcactttccaatgggattgtagctggcacctttcttttccatgggttggaagtccatggttgcaaagggggaggtaaagaagccggatcataacctggatgatgatgtcccttatctaaggtggggctgggatgcagcagtaggggtgggtgtgacctgcaggggatgagccagttgggtggatggaagaatgaaggtgggggaaagctctcttctgaaaggggcaataggaaggggatggtggaggaagacgctgaggcaggccctgggaaggggaaggcaaaacataccctgaggactgggacagagcaggatgggagtgaggatgtcatctttaagatgtgaggaggaacgggaagaagaatacgagaggaggagtggggcctgcagtcaaggagaggctaattcggtttgggtgggtggaaagcggggctcgtgcttgcaccaagcctccatctccctggactgggagtcagcaaggccaggagacctggtgttggggccttccaaccagatcgtgtttaatttccagcaagcctggggaggcacacaactcaccagggaaactcacacctggagttttaccagcctgaggccacacactcttggaacctctttccctctgttgagtctgtactttcccctcttcatcaggcttgggaaggcttggacaaaacgctctctggggcacagaaggaaactaaagagggtgttctgacttaaggttggaggatgtaaacaggctgtgccaaatcatttggaaacgtggcagaatctgtttagcacaggatgtctcacacatgcactcaatgcacacacacacatgcatgtcaccgttttggattctttcccatctctgtctacaccgccttaacacatttgagccctgccctcagtcctttgccctctcgtaacagatttccaccaggctcccacccgcatatacaaatagtcagctgttcgtttaggacttaataatatagtgggtgggagcaggtggaaggacttggacatacgattctaaaatccgtgaatgcccacatgtgtgacgaccatatgcccgtgtcctgaggttttctctccagacagattccagttgcccacgagagggcgctgcagaatcacggatctcaagcgggtttgtttcccaggaagtgagactggtccgtgagtggcagttaatcaaagggaaaggggctgggaagacaacgccctgttccaaagctccccactagaggcaaaacctccaggctccatctctgtgaagtcaagagacttcatgttcaaggtcagtttctctagctggcagcttctcactgccgctgccttcccccagaaactctaccctccccatacccagtgtccagttctgggctttcctcttttctgcttgcaacaaaatgtccatcggtgaggtcaagttgaactgaacaggcctggcttggggagagttcacaggtccaggttctgtctgcctcggtggacatgtcatcgaaggcagcaggaccacacatgtgagtgtacagcacgcatggtctgaccatctggatgtttcccagatgtgcagatgggcatcatcggccatcaacaggaaaatgcatccggatgactggctgacttttcttctctcaccagatgttgccaatgctgtagaaacatctgggcccacgacagataaggctgacacatgcaaagagaagagagaaggagcaaggccagttatcggcacgtgtgcccatcctcccccatgaagctgcaaactccccaaggccagacatggggacccaaagcctagcacagagtgtagaccagatgtcggttcctcccagggcaaggggttacttaaatggaattatccttacaaagagtcttttgcacctaattgtcacttgtaatttggggaacaaaagcacaaacacaagcccactgaaccactttgccaggtgccattgcactgttctgtgaggacagcgctgacggagacagcaggcattcctgaaatgaccaatcaggcagggccctcctggacgagcggcacaagtgcaggctattaatacactgagctggggcattcgtgggaggggagggggcatgggcaacatggagagtcaccaggctggcagacaaggttgaaggtagggagggatgaggaacattagccgagactggctctgggccaacctgttggagacacagtggacaaacctttgccctctgggaggcagggcactgagtcctacacttgcctctgccacagtctgctgtgtgaccttgggtgtatcatttgacctctctgagttctcactttcttattataaagtgaacagatcaagtatgtatgcgtttaagcacttgtcatttctaaaaggatacatgaaagtatatttatctgtgtgctctggggagtgggaatggagggatacaatgaaggaaaggattttgtgtttttgtttttgttttactttttgcccttctgtaaagtttaagtttttattaatattatagttttattttaaaaagaaaccccaaataggatgtcatgtaaaagaaaagaaaaaacaagtaccaagtgtttgatataatcctatttataacacagaaaataaatgacatatgtatatcatgtggggataaatagataaaaatacacggaaagacagttagaagccagccttaatctgtcttgggcccagacagcccttatctgttgggggcccagatgtgtctacagcattgttaacatctggtgaaaggagaaaagtcagccagccatcctgatgcgttttcttgctgatggccgatgatgcccaaatgctaagcagttcgcagtggttaactgtggaggaggcaaaggaggacttgaatgttttcctcttatctgtttcctgtatttgtgtgttacctgagtaaggtttcacttcctgtattactcatgtgatattttactttttaatttatgtacttttgtatggcttgtatctattttttaagagtaaaacaaaatgcagagattatctgcagtgttgtctaagatcctgaatattgatttggtatcaagtgaaagtatttcgggcctaagccaggggactggccctccccgtcaggggtcactccgtgggctcttcaataagggaggctcctatagtgcccattatcaatatgctgctggccctgaatggcctaagtattaaaataaaatgccctgtctaggcccaaaactagtccagaaggactgtggaggccgtgggcatacacgtgaaattgtgtgcacaggggctaagcccagcaccagcccagcctgggagttgagatgcctcagggcacactgtctgtgctaaacaaatactcatattaaccagccttcctgacagattgatgcatctttttatgatctgtctttacaatatgatgactctctccttttaaaaataagattaattcagacaagacatttattttatgaggaaattcatcccagggggaaaaatactcaacctgaatggcagaaatggctggaaagagacttgactctcaaggaagcttccagcctccaaccttagccacccagccatggccccaaaagggctgccctaatactactcagggacaaatgggccctcttaaactaccctagctgtgtgagtgtagcctgctggagaaacaaagaaagacaggtagtgagttttagtgtggcagggaagaaaaggatgcattttttggtaaaggaaaaaaaaattctgagatttacccaaatttggctggacatgagtttataaatacagattaagcttgtctttaaataaccctaaagaatgttcaagaacagtgaatgatttgtctctgtgtccccagtgactagaatagcgtcaccacctagtaggtgcttggcgtgtttcatgaatgtttccactgctatggtctgtttcagctggtgaccccatgaggtacccttggctcctctatctcccccatcttcctccttcagccaatcatcaagcctgtcaacatggcattctaaatgcttctcaagcacatttccttccccactggccctgccttggttcagtccttaaattgcctattgcctgaattggtgcatcagagacaggctggagaaaggaagaccagttagccagaaaggaagcttggaagaccacccagctaactggtcttcctttctccagcctggctctgatccatcctccacacactgctgtgggtctgactgcacaccttctttttggaggactctcctattatagccatcaaactcctgagtctgctacacaaggcccccccaacataagccctagatgaagatctgctaccattacagccagtattacctggcccttgcctacctctcaggtcttggcaatgtccaccttgctttttttactttaaatagcatcatttcgtgctcccccaggacactgtgcagcttcgcacctccaagcctttgcttctgcatcgcctgacacttggagcacccttctccactttcagattgagacttcggaacactttatcatcagcctatctgtaaagacttccttgctggtccctcccatcgcagaataaacagcctgc

SEQ ID NO: 157765 - DNA, 1565 bp, Homo sapiens
  Payload ID: 10915
  Gene Symbol: NOX5
  Gene Name: NADPH oxidase, EF-hand calcium binding domain 5
  ENST ID: ENST00000525143
  CDS Start-End: 1-885
atggagaacctgaccatcagcgctgcccactggctgacggcccccgccccccgcccacgcccgcgccggccgcgccagctgacccgcgcctactggcacaaccaccgcagccagctgttctgcctggccacctatgcaggcctccacgtgctgctcttcgggctggcggccagcgcgcaccgggacctcggcgccagcgtcatggtggccaagggctgcggccagtgcctcaacttcgactgcagcttcatcgcggtgctgatgctcagacgctgcctcacctggctgcgggccacgtggctggctcaagtcctaccactggaccagaacatccagttccaccagcttatgggctacgtggtagtggggctgtccctcgtgcacaccgtggctcacactgtgaactttgtactccaggctcaggcggaggccagccctttccagttctgggagctgctgctcaccacgaggcctggcattggctgggtacacggttcggcctccccgacaggtgtcgctctgctgctgctgctcctcctcatgttcatctgctccagttcctgcatccgcaggagtggccactttgaggtgttctattggactcacctgtcctacctcctcgtgtggcttctgctcatctttcatgggcccaacttctggaagtggctgctggtgcctggaatcttgtttttcctggagaaggccatcggactggcagtgtcccgcatggcagccgtgtgcatcatggaagtcaacctcctcccctccaagacactatctggctgcacattcggtcccaaggccagtggacaaacaggctgtatgagtccttcaaggcatcagacccactgggccgtggttctaagaggctgtcgaggagtgtgacaatgagaaagagtcaaaggtcgtccaagggctctgagatacttttggagaaacacaaattctgtaacatcaagtgctacatcgatgggccttatgggacccccacccgcaggatctttgcctctgagcatgccgtgctcatcggggcaggcatcggcatcaccccctttgcttccattctgcagagtatcatgtacaggcaccagaaaagaaagcatacttgccccagctgccagcactcctggatcgaaggtgtccaagacaacatgaagctccataaggtggactttatctggatcaacagagaccagcggtctttcgagtggtttgtgagcctgctgactaaactggagatggaccaggccgaggaggctcaatacggccgcttcctggagctgcatatgtacatgacatctgcactgggcaagaatgacatgaaggccattggcctgcagatggcccttgacctcctggccaacaaggagaagaaagactccatcacggggctgcagacgcgcacccagcctgggcggcctgactggagcaaggtgttccagaaagtggctgctgagaagaagggcaaggtgcaggtcttcttctgtggctccccagctctggccaaggtgctgaagggccattgtgagaagttcggcttcagatttttccaagagaatttctag

SEQ ID NO: 157766 - DNA, 8595 bp, Homo sapiens
  Payload ID: 10916
  Gene Symbol: NKD1
  Gene Name: naked cuticle homolog 1 (Drosophila)
  Uniprot ID: Q969G9
  ENST ID: ENST00000268459
  CDS Start-End: 225-1637
gccaatgggcgcgcggggaggcgcgggccgcggcggcgggctgggggctcggcgctcccgggcgtcagtcgggccgcggcgacggcggcaggagcgcgtcccggcgccgcctcgggctccgctcggctcgggggctgcttcgggaggaggagagccaagggaggcgccaggcccgcgggccgggcgcatggcttagggacgctcccggccgccgcagccccagcatggggaaacttcactccaagccggccgccgtgtgcaagcgcagggagagcccggaaggtgacagcttcgccgtgagcgctgcctgggctcggaagggcatcgaggagtggatcgggagacagcgctgcccgggcggtgtctcgggaccccgacagctgcggttggcgggcaccataggccgaagcacccgggagctcgtgggcgacgtgttgagagacacgctcagcgaggaagaggaggacgactttcggctggaagtggccctgcctcctgagaagactgacgggctgggcagcggagatgagaagaagatggagagagtgagcgaaccctgcccaggctccaagaagcagctgaagtttgaagagctccagtgcgacgtgtccatggaggaggacagccggcaggagtggaccttcaccctgtatgactttgacaacaacggcaaggtcacccgagaggacatcaccagcttgctgcacaccatctatgaggtggtggactcctctgtcaaccactccccaacatccagcaagatgctgcgggtaaagctcaccgtggcccccgatggcagccagagcaagaggagcgtccttgtcaatcaggctgacctgcagagcgcaaggccccgagcagagaccaagcccactgaggacctgcggagctgggagaagaagcagcgagccccgctcaggttccagggtgacagccgcctggagcagtctggctgctaccaccattgcgtagatgagaacatcgagaggagaaaccactacttagatctcgccgggatagaaaactacacgtcccaatttgggcctggctccccttccgtggcccagaagtcagaactgcccccccgcacctccaatcccactcgatctcgctcccatgagccggaagccatccacatcccacaccgaaagccccaaggcgtggacccggcctccttccacttccttgacaccccaatcgccaaggtctcagagctccagcaacggctccggggcacccaggacgggagcaagcactttgtgaggtcccccaaggcccagggcaagagtgtgggtgtgggccacgtggccagaggggcaagaaacaagccccctctgggacccgccatccctgcggtgtccccctccgcccacctggctgccagcccggccctcctcccctccctagcccccctcgggcacaagaagcacaagcaccgagccaaggagagccagcagggctgccggggcctgcaggcaccactggcctcaggtggccctgtcctggggcgggagcacctgcgggagctgcccgccttggtggtgtatgagagccaggccgggcagccggtccagagacatgagcaccaccaccaccatgaacatcaccaccattaccaccacttctaccagacatagagcccctccccagggccccaccctgccatatgaaggaccccacccccgacaccacaaggcattattattctattaattattgttattatgatgattattgttattaataattattgttactccactaatatttagctagcctacatgtagaagatctatggaaacacagaactaaacttttatttatatgttgtggggactgcataactagcccaggaaatgactctggttttgagtggcctgtaatgggcagaggctccctcggggctcgggatctgcagcatctatgtggatcagcccacacccttcccagagccagggagcccttagcctcaactctgccccaccccagcctcttccaggagagcacccttacttggcccggcttccagagaccctcgaaatctccgagaagataaacagctgctacctcttagtattattctgattttattttgcccttaactgattgttatatgctacaagggatttcagtggactgcagagtgcgaacgtcttgctgttgtgtttttatgtcccaacctagaaaccttagctgtcttttctggagttgtctttcatgcttttccagtgggatcaagcccttttccccaagagtcccatctcttctgccatgcacgacatgaaaatccacttctcttccttctccttcttctctctctactttacagtgatacacacacgtatttaaggactatccctgagaccatccttctcattttggaaactgctagggagggaaccaaccacttaaacaagcgtggttttccaagatccaggcaattgtgtgctgttggttgtggtggaggatgtggcacatatatacgtacctacacggttctctaacagagctttctgtatctatagatagatgccatctgtccatttctatgtatctttctataaatatacactctcaggtatcttttctggtgtgtataaatcagtggtttgcttccctggatgcttctggaacccagatgtgaccctgcttgtctccttttggggctggacggctctcagatgctttcatcagaggtccattctcgggttttggggtctgatggattttggagagaactgctggggtacagaaacttggtgggaaaaggggactgtggccagagttgggaccctggagcagcatcctctgcagagaaggattttgtctggccagagcctggagaaacctgaaaaagaaccagtcagctagccagggtctcagagaaaagcagattacacactcaaattgggtaatttgagcagagcttaataaaggcagtatttacaaagtgtgggctaagcctcccatgagagtgcagaaccctggggctagcagtgtggggcgctattcccacccctgggcctgagtggggaaggagttatctttagcagacagaggattgctggaggagtgagaggggcacctgaaggagctgtgacctttgcttaaaggatgcagccagtcatggggaccctccagggaaattaatatcctgacctgctttcctgccccccagccccctcaatccattggctgaggccgctggaagccaccgggccaagggagcttgttgatgtgggtcacacgggcatgttcccaggtcagagaggagagtggagagtgaatctagggagactcaagagggagaagtgactccagctaccttcctttctgccgttttgtctcccagctggcattctcttttccagagcctcgagtttgggtttaatgtagttagtaaggagttacttccaaaggtagtgggcttagttgtcaccgtattcttaattttattaatgactgatgtgcctgggattggattaatacattaatccttaggacagccccatgaggcagcttggtggcagctcaggaagcatgtctaaggctcagaagttcataactcccttgaggccgcacagagggcggagctggaattctggtctcccactcgatcccttcgccactggtgcagagcttaatcacggccatgggctgcccttgttttgggttgtgggtttctgttcagtgagaacgcaactcaatccaaagtgaatgaaaccaagttggaaggcagggagggaactggctttgagatgacagggtccaggatgtgaatgcagctgagactggttcttgtccctccctcttgtccctcggattgataacttgtactcaactacatgcttttgtcagggaaccctggctgctggccttctgggtcccctaaccataagaaaaaggaccttccgttagtgtaaagcccaaggcaggattctgcttggctgggcttcgatctggtacccatagctggaccaatcatgacatcccagatggggtcacgtggccaacctgccgcaagggggtggggtctgtaccggaagacaggaggggaggggtgcagatcggacaggaagtaatggcatcccaggccccgaattgctgcaaccctggaggccagcccggagttgagactactggttttagagcagttcctctgcctccctaagctccacacctgtcaggattctgttacttcttggtaactgggacttgcccaactttaaaaacattatttaaaaaaatagtaatgtgcacatgtaaaagattcaaatagtatatatacaaggtgtacagtaaaaagtaaacttccctccatcccaggcctgccagcatccctgatgccgactttctgggtgtggcctagggcccctcagtgtaatgtaggggttgtgagcacagactttggtgccagtttgctaggttcgaatcctgactccctctttgtagctctgtgcttcaattgaaatactgtgcctcagtttctcctttataaaggcagggatcatgagagtgcctgtcccttgtgagcactatgaaagtgttagctgttctttaccagaataaatgcatttctatatcttcccatatgcattttgttaatttttaaagtatttcaaacacaaagtttgaaacagaaaattgtgtaacattaactatgaacttaccacccagaatttacaaatgctgacattttgcaatatttatttcggatctatttttaagggggggaaccctgcagttactgcttaatcctcttcccaccccacccttttatttttacacaaggagcatagtgttcatacttatgctatttttttcagtaactgaatatatttggagatctccctccctaggtcatagagctctgcccccttctctctaacagctgctcagccttctgtgactagaggtgctgtcaccagcttgccccatcccctcctggtggtcataagggtcatctctcatcccaggctctggcgaacactgtgctgagagtccttgcatacagctctcccggtgcccacaggcaggaacacaggcgacagaaagtttccacgtggaactgcagagttcaagagcaagtgtgatttcaattttgatgagattgtacatgacctctaaaagaggttatactggccgggcacggtggctcacgcctgtaatctcaacactttgggagaccgaggtgggtggatcacctgaggtcaggagttcgagaccaacctgggcaacatggtgaaaccccgtttctactaaaaatacaaaaaattagctgggcatggtggtgcgtgcctgtaatctcagctactcgggaggccaaggcacgagaatcgcttgaacctgggaggcagagattgcagtgagctaagattgcaccactgtactccagcctgggcgacagagtgagactccatctcaaataaataaagaggttatactgaataatgaggaatcaaaggaagaagaagaaagagagaggaaggaaggttggaaggaaggaaggagggaaaattagaaggggaaaccatgattgctggtgaggttttgagcacattttcctgcaggctggtatgggtgagaggtttggtcttgtttgcaaatcttctgaaggccattccagaggagcagttgccactgccccatcccctgagctctgagcgtgggggttcccctggggagactcctggtgagaggatgccgatttctgctgatctgtcactgggtaccgaggactgggtgtgtttaaggcagacagccaggtgaggatcccagctactggggcctgctgtcatctcctgggagtacccgggggtcaggagcctaggggactcttgcacttcacatccagccatgctaattacactttttggcaaaggaaacagctaggagcagtttctttcactcctacagccccgttttctcagtgtttagacctcgaattattactgggctagagggaaggcagcctctgaagtgtggcaggaggaggggaagtctgcctgcatcttggtgtgtctgtcagatgccagcactaataacctggcttctgtgaggcctgtcagtgctctcaggaatgaaaggggacccctgagaggtgctcagtaccagcaggctgtgaatgctctctacccaccaccctcacctcctcgttaaagatggtgctacctgccacacagcagacatctggtcgctgcacacccgaaagaccccaaggcagtctgccccttgtccagccacacgccagcacccaccctcctggcccctgcctcggcctccccagaccagctgcacccagcccccaacacgcaccccttctccagatgtgtgcagggcctcattttgcagagcaaagacagatgtttcagccacacgctttattaacttctaaaacctgtgctcaggacactcttcaacagtcatgaaaagtttgatcacttgccacagtcaggacctttgtgtggggctctgatctgatgttcggtctcatcatctcccaaaccagcagtcgtttgtaccccaaccctctgctcaggggctcatacccccaaatgattttcctgatttatgtatttccctacaaagggctttctatacctagcatctgcctccagcatgagaagggggaataggtgagacccatttgccagtagcagacggggaccctggggagaaaatggcagagcctgttggagactccctgtctccagctgaccagccaatgggattcctcttccctccactgtctcccacaaagtagaagaatcctggtacatttagcccatgagcctggcacagatccctatctagacatgaggccctttagacatgactttggcattgaccagcctgttggcaatgggtcggggaggcagaggggatgctcacaccagtaattctcatcccctgaatgcttgggatcacctggggagagttcacaaaatactggtgcaggggtcccacctctgatgatgctgagtggtgggtctggggtgtggcccaggcatcatgatgtttcaggcccccaggtgacttcttaggcagcccagctaagcccctagagccttgcaatttcccccaaatgacctcagagggcccgatttgagggaaatgcctaacttcaggggccgtaagaatcccccagggagcatgtgaaatgcagataccaggcccacccccagagatgagctgaggtgggtcaggggtgaagtgcagggatcagtgtttttcacaagctccatacctccaggaaatggtgttgtggttgggcccgtagaaaacattctgagagtcctgttgcctgtgccttggtgcacgtggggtggaatcccagtggccctgccttgaggaggatgtgcattaacgtggtaggggagacagagacagctccacctgccccctgccccaccggggacctccaaaaacttcatggatgttagagcaagcagccatgctgcagcagaggatgaggctggcggatttagtaagagccctctgtgtttgggctgagttctttctctagttgccctgtcatctggcctctggataacccacctctcctccctcatcctaaaattacagatggcgaaagatggccacatttagtgagacccctaaggtcctccaactagggtgggtccacagtggcccctggtgcatggaccacacactctcttccctcctctggctcaggactacggtctgaaattagggagatatgaatgtctttcttgaaaacttctcttcccagtcttcccactttgcttgggggtccttggtcaaggccagctttggggactagggcttgttgcgactaccagctgtctcattttgctgtactgcaaactcaggcttggttccaagcttatgggggccctgtccttcccctagtagggtttgttttggggtcacatctggtcatacccttcagagagctcttccccagcctctacatcagggagagaggtaggtagggaggagcattcaaggattagaagaaggactaaagtacaacagccttggaggaactgccaggaactaagggcgagcactggagaaggcaacctgggaccccctgcgcttctgagcaggaagaccaagaccttcaggggccctaagcactgaaaacatcattcctcatccccaagccctggcatccccctgttcttctaaaataattcttttctaggtatttctgattgcaaaattctggatgggttcatccaagctgacctttgctgttttttcccttcccaacaaggcctcactttttggagccaccttagctggtgcctaggcagaggggcagtcagcagtggttatcaggatcctggctctatgggttgccttcctcctggtctgtaaagcccctgcaggcagggacttcttagatagctgcttccttagggcatggcatgtagtgggtggttaatgaatggaagagagggaatgagtgatcaagggagggaggagggagtggagtggagatttctcatcctttcctgttaatttatgacatcctcctgcctatgagtccttgactctggagttttacaaagcagtcacatttcaaataaaagtctgggaaagcaa

SEQ ID NO: 157767 - DNA, 1940 bp, Homo sapiens
  Payload ID: 10917
  Gene Symbol: NKD2
  Gene Name: naked cuticle homolog 2 (Drosophila)
  Uniprot ID: Q969F2
  ENST ID: ENST00000274150
  CDS Start-End: 97-1032
gctcccggcccatgcggcccccgcgggctcccggccccggcttcagaactcagccctgcacctgagcgcggggcccggcggggcgtggcggcggcgatggggaaactgcagtcgaagcacgccgccgccgcccgcaagcggagagagagcccggaaggggacagcttcgtggcgtccgcgtacgcgagcggccgcaaaggcgcggaggaagcggagcggcgcgcgcgggacaagcaggagctgcccaatggggaccccaaggaggggcctttccgggaggaccagtgtcccctacaggtggcactccccgctgagaaagctgagggccgcgagcacccgggacaactcctcagcgcagatgacggagagagggcagcaaaccgcgagggcccgcgaggaccgggcgggcagcgcctcaacattgacgcactccagtgcgatgtctcggtggaggaggacgaccgccaggagtggacgttcacgctctatgactttgacaactgcgggaaggtcaccagggaggacatgtccagcctcatgcacaccatctatgaggtcgtggatgcctcggtcaaccactcctcgggcagcagcaagaccctccgtgtgaagctaaccgtcagccctgagccctccagcaagaggaaggagggtcctcctgctggccaggaccgggagcccacccgttgcaggatggagggtgaactggcagaggagccaagggtggctgacaggaggttgtctgcacacgtcaggaggcccagtactgacccccagccctgctcggagcgggggccctactgcgtggacgagaacacggagcgcagaaaccactacctggacctcgccgggattgagaactacacgtccagattcggccctgggtctcagctgtgcgagaagagaagctccgctcccaggacacacagtggggacaaggctagaggagtcggcctttgcagggagctgtggagccaggcaggtcacccacagtggccaggccccttcccttcagggctggtggccgtctgactgcagacttggctaacagactggcctcagggtcccctcctgtgcaagcaaagcaggagccccagggcagggcctcgcacctccaggcccggtcccgctcccaggagccagatacacatgccgtacaccaccgcaggtcacaggtgctggtggaacacgtcgtgccagcctcggagcctgctgcccgggccctggacacgcagccccggccgaaggggccggagaagcagttcctcaagtcccccaagggctccgggaagccgcctggggtgccagccagcagcaagtccgggaaagccttcagctactacctgccggccgtcctgccgccccaggcccctcaggacggccaccacctcccgcagcccccaccgccaccctacggccacaagcggtaccgccaaaagggcagggagggccactcgccactcaaggccccacacgctcagcctgccacagtggagcacgaggtggtgcgggacctgccgcccacgccagcaggagagggctacgcggtgccagtgatccagcggcacgagcaccaccaccaccacgagcaccaccaccaccaccaccaccaccacttccacccgtcctagcgccactgccaagcacacctcgctcccagcacaccacagcccgcgacctcagggcagggagcagagcagctgccggctgtgtgcccatggggagcccagcccccaccccccacctccgacagcaaacagcaactgactgcaggtgctggcatgatggaggtggtgcaccttggacacgtggacaaggcccaggcgccctctgctcttctgccctcgatgccacatggcggtgaacacatctgaagccactatgtttcctggctctaaggctcgtctgtgtaacccataaaacctgctttgattccaaaa

SEQ ID NO: 157768 - DNA, 2155 bp, Homo sapiens
  Payload ID: 10917
  Gene Symbol: NKD2
  Gene Name: naked cuticle homolog 2 (Drosophila)
  Uniprot ID: Q969F2
  ENST ID: ENST00000296849
  CDS Start-End: 230-1585
gccgctgtccccgcgccctgcgcccggtggccccccacctccgccccgcggccgtacctggcgccccctggctcccccggcccccgcgcggcgtggagccatcttccctcacctcctaccggcaccctagcttgctcccggcccatgcggcccccgcgggctcccggccccggcttcagaactcagccctgcacctgagcgcggggcccggcggggcgtggcggcggcgatggggaaactgcagtcgaagcacgccgccgccgcccgcaagcggagagagagcccggaaggggacagcttcgtggcgtccgcgtacgcgagcggccgcaaaggcgcggaggaagcggagcggcgcgcgcgggacaagcaggagctgcccaatggggaccccaaggaggggcctttccgggaggaccagtgtcccctacaggtggcactccccgctgagaaagctgagggccgcgagcacccgggacaactcctcagcgcagatgacggagagagggcagcaaaccgcgagggcccgcgaggaccgggcgggcagcgcctcaacattgacgcactccagtgcgatgtctcggtggaggaggacgaccgccaggagtggacgttcacgctctatgactttgacaactgcgggaaggtcaccagggaggacatgtccagcctcatgcacaccatctatgaggtcgtggatgcctcggtcaaccactcctcgggcagcagcaagaccctccgtgtgaagctaaccgtcagccctgagccctccagcaagaggaaggagggtcctcctgctggccaggaccgggagcccacccgttgcaggatggagggtgaactggcagaggagccaagggtggctgacaggaggttgtctgcacacgtcaggaggcccagtactgacccccagccctgctcggagcgggggccctactgcgtggacgagaacacggagcgcagaaaccactacctggacctcgccgggattgagaactacacgtccagattcggccctgggtcccctcctgtgcaagcaaagcaggagccccagggcagggcctcgcacctccaggcccggtcccgctcccaggagccagatacacatgccgtacaccaccgcaggtcacaggtgctggtggaacacgtcgtgccagcctcggagcctgctgcccgggccctggacacgcagccccggccgaaggggccggagaagcagttcctcaagtcccccaagggctccgggaagccgcctggggtgccagccagcagcaagtccgggaaagccttcagctactacctgccggccgtcctgccgccccaggcccctcaggacggccaccacctcccgcagcccccaccgccaccctacggccacaagcggtaccgccaaaagggcagggagggccactcgccactcaaggccccacacgctcagcctgccacagtggagcacgaggtggtgcgggacctgccgcccacgccagcaggagagggctacgcggtgccagtgatccagcggcacgagcaccaccaccaccacgagcaccaccaccaccaccaccaccaccacttccacccgtcctagcgccactgccaagcacacctcgctcccagcacaccacagcccgcgacctcagggcagggagcagagcagctgccggctgtgtgcccatggggagcccagcccccaccccccacctccgacagcaaacagcaactgactgcaggtgctggcatgatggaggtggtgcaccttggacacgtggacaaggcccaggcgccctctgctcttctgccctcgatgccacatggcggtgaacacatctgaagccactatgtttcctggctctaaggctcgtctgtgtaacccataaaacctgctttgattccaaaatgaggccctggagtgcgcaaggagtgcccggatgcttggggtgggtgttcctcccggggcttcaaggggtgactgctgtaggctgtcccagtgcgaggccgggagcgaatggaaaagctgaggctttgcctggcttgtgcatcatgaagtgagaggggacagggccggtggggggaagcagcttgtgcttagcagggagcatccgcggctccccgcaggaggccaagcagcagaaggcagcagtgctagaaagagaagtgc

SEQ ID NO: 157769 - DNA, 2155 bp, Homo sapiens; identical to SEQ ID NO: 157768
  Payload ID: 10917
  Gene Symbol: NKD2
  Gene Name: naked cuticle homolog 2 (Drosophila)
  Uniprot ID: Q969F2
  ENST ID: ENST00000616539
  CDS Start-End: 230-1585

SEQ ID NO: 157770 - DNA, 1940 bp, Homo sapiens; identical to SEQ ID NO: 157767
  Payload ID: 10917
  Gene Symbol: NKD2
  Gene Name: naked cuticle homolog 2 (Drosophila)
  Uniprot ID: Q969F2
  ENST ID: ENST00000610777
  CDS Start-End: 97-1032

SEQ ID NO: 157771 - DNA, 8761 bp, Homo sapiens
  Payload ID: 10918
  Gene Symbol: NHS
  Gene Name: Nance-Horan syndrome (congenital cataracts and dental anomalies)
  Uniprot ID: Q6T4R5
  ENST ID: ENST00000380060
  CDS Start-End: 339-5231
ggtggcgacggcgagcacagaaacgatggagttgagccagtcgaccctggttggaagcaagtgagaagagaccaggcgcacccctaaatttctgtgcggagcgcttgtcatcctccccagggaacggtgcacccaaaggaggactggctggactgatttgctagggagagggcggggaagaggaggcaaggtgagcagagaagccccctgcgtatccggactgccagatcgcgcttttgccggactcctgccccctccctgctcaggtgggcgcgcccggtctccagctcacaggggcgcttggaggagaccagaaagtcgccgcctggctgcgcgggatgcctttcgccaagcggatcgtggagccgcaatggctgtgcaggcagcggcgccctgcgcccggcccagcagtggacgcgagcggaggcagcgctgagccgccgccgcccttgcagccgccgggccggagggacctggacgaggtcgaggcgccagggccagaggagccagcccgcgccgtccctgcaccttcagggctgccaccgccgccgccgccactgcccgcgccggccgaccagactcagccgccgcacggagaggcgtccgtggctggcgaggagagcacggcggggatcccggaggcggcgcccgcagccggcgaggcgtcctcggcggcggcggcggcggccgtgctgctcatgctggacctatgcgcggtcagcaacgccgctctggcccgtgtcctccggcagctctcggacgtggcccggcacgcttgcagcctcttccaggagctcgagagcgacatccagctcacccaccgccgcgtctgggcgctgcagggcaagctcggcggcgtgcagcgcgtcctcagcacgcttgaccctaagcaggaggcagtgcccgtctccaacctggacatagagagtaagctgagtgtgtactaccgcgccccgtggcaccagcagcgcaacatcttcctcccagccacaaggccaccctgcgtggaggagctgcaccgccacgcccggcagagcctgcaagccctgcgcagagaacaccggagccggagcgatcgccgagagcaaagagcagctgcccccctttccattgcagctcctccactgccagcctaccctccagctcacagccagaggaggcgtgagtttaaggaccgtcactttttaacgtcccatcccccagaggatgaagatacagatgtcatgttagggcagaggccgaaaaacccaatacacaatatcccttccacactggacaagcagaccaactggagcaaagcactacctctcccgacgccagaggagaagatgaaacaagatgcccaagtgatttcttcttgcattattcccatcaatgttactggagttggctttgacagagaggctagtatacgctgctctctggttcattcacaatcggtactacagcggagacgaaaattgaggaggaggaaaaccatctcgggtatccccagaagagttcaacaagaaatagattctgatgaatcaccagtggccagggaaaggaatgtgattgtgcacacaaacccagacccctccaacactgtcaataggatatccggaaccagggactctgagtgccaaaccgaggatattctgattgctgccccatccagaaggagaatcagagctcaaaggggtcaaagcattgcagcttccctttctcattctgctggcaacatttctgccctagcagacaaaggtgacaccatgtttactcctgcagtgagcagccgcacaagatctcggagccttccccgggaaggtaatagaggtggggatgctgagcccaaagttggcgctaaaccctcagcatatgaagagggagagtcttttgtgggtgaccatgaaagaacccctaatgatttcagtgaggctccaagcagcccgagtgcccaggaccaccagcctactttgggcctggcctgctctcaacatcttcacagcccccagcacaaattaagtgagaggggaaggtcacgtctgtcccgaatggctgctgactctggcagctgtgacatctcctccaactcagacacgtttgggagccccatccactgcatctccacggctggcgtcctccttagcagccacatggaccagaaagatgaccaccagtcatccagtggcaactggagtgggagcagctccacgtgcccctcgcagacctcagaaaccatccctcctgcagcttctcctccactcactggctcttcacactgtgactcggagttgtcactaaacacagcccctcatgccaatgaggatgccagtgttttcgtgacagagcaatacaatgaccacttggataaagtgagaggccatcgggcaaactcctttacctccactgttgcagacctgctggatgatcccaacaacagcaacacaagtgacagtgagtggaattacctacaccaccaccatgatgcctcctgccgccaggattttagtcctgagcgtcccaaggcagacagcctgggctgcccaagcttcacaagcatggccacttatgacagctttctggaaaagtctccatcagacaaagcggacactagctctcacttttcagtagacacggaaggatactatacctccatgcactttgactgtggtctcaaaggtaataagagctatgtctgtcactatgcagccctgggcccagagaatggccagggtgtaggggcttcccctggtcttccagattgtgcctggcaggactacttagaccacaagaggcagggaagaccaagcatctctttcaggaaaccaaaggcaaagccgaccccacctaaacgtagctcatcattgaggaagtctgatggaaacgcagatatttctgagaagaaagaaccaaagataagcagtggtcagcacctgcctcacagttccagggaaatgaagctgcctcttgatttcgccaacacgccttctcgaatggaaaacgccaatcttcccaccaagcaggaaccttcttggataaaccagagtgaacaaggcattaaggaacctcagttagatgcttcggatattccaccattcaaagatgaagttgccgaatccacacactatgcagacctctggctcctaaatgacttgaaaacaaatgatccttatagatctctatctaattcaagcaccgctacgggtaccacagtcattgaatgcatcaaatctccagagagctctgaatcccaaacatcacaatcagaatcaagagccaccaccccatctcttccttctgttgacaatgagtttaaactggcttcaccagaaaagctggctggcttggcatctccatcaagtggctattcaagccagtctgaaacgccaacatcctctttccctacagctttcttttcaggtccattgtctcccggaggtagcaaaagaaaacctaaagtcccagaaagaaaatcctcactacagcaaccctctttaaaagatggaactatatcactgagtaaagaccttgaacttccaattatacctcctacccatcttgatctaagtgctcttcataatgtcttgaacaaaccattccaccaccgtcatccactgcatgtttttactcataataagcagaacacagtaggagaaacactgaggtcgaatcctccaccgtcccttgcaattacaccaacgatcctgaaatctgttaaccttaggtccatcaacaagtctgaagaagttaagcaaaaagaagaaaacaatacagatctcccttatttagaggaaagcacactcacaacggctgccttgtctccaagtaagattaggccgcatacagcaaataaatcagtatctcgtcaatactccactgaagacaccatactgtcctttttagactcttctgcagttgagatgggaccagataaactacatttagaaaaaaactctacttttgatgtgaagaatcgctgcgatccagaaaccataacatcagctggtagcagtcttctagattcaaatgtcacaaaagaccaagtgcgtacagagactgagcctattccagaaaacacgccaaccaaaaactgtgcttttcccacagaaggatttcagagggtctctgctgcccgcccaaatgatttggatggtaaaataatacaatatggacctggtccagacgaaactctagaacaggtacagaaggcaccctctgcaggtctggaggaagttgcacaacctgaatctgtggatgtaatcacatctcagtcagactcaccaactagagcaacagatgtaagcaatcaatttaagcatcaatttgttatgagccgccaccatgacaaagtgcctggtactatcagctatgaatcggagataacatctgtaaattcattccctgaaaaatgttccaagcaggaaaatattgcttcaggtatttcagccaaaagtgcctctgataacagcaaagcagaggagacccaaggaaatgtggatgaggcttcattgaaagaatcatcaccgagtgatgactccatcatttcaccacttagtgaagactcccaagctgaagcagagggtgtgttcgtgtctccaaacaaacctcgaacaactgaggatttatttgcagtcattcacagatccaagaggaaagtacttggaagaaaagattccggggacatgtctgttcgaagcaaatcgagagctcccctcagcagtagcagcagcagcgccagttccatcacttcacccagcagtaatgtgacaacccccaacagccagaggtctcctggtctcatataccgaaatgccaaaaagtccaacacatccaatgaagagtttaagctgttactgctcaagaaaggcagtcgctcagattctagttaccgcatgtctgccactgagatcctgaagagccccatactgcccaaacctcctggggagctcacagcagagtcccctcagagcaccgatgatgcccatcaggggtcacaaggggctgaggcattgtccccactctctccatgctccccacgagttaatgcagaaggcttttcctcgaagagctttgccacctcagcatcagcaagggttggacgttctcgggcccctcctgcagccagcagcagccgctacagtgtccgctgccggctgtacaatacgcccatgcaggcaatctccgagggagagacggaaaattctgacgggagcccacatgacgaccgttcctcccagagttcaacatagactgcctgtaccaggctgcctggcaaaggccaaaacccttactcacatgaggatggaggaacagaacagaggacttgggaaaagtctcaacttgatggggtagcatcactgctaagcaatgaatgaatttctaaatacagtatgtgctgggtaaacagaaagtggtttagacattcttgattagtttccatattttaagtagctgcagtctttcatgtttttctttagcatagtttgatttacgcaatctccttccttgtgaaaatagaggatacaaaattgtctaattttcatgacacctagaaaacgttttcccagagctgcctattcagaaactaaagccctcactgtcattattctttaagaagatgaaattactctggatgtttggtatttttttacattaaaacaaactaaagcaaaatttagaagaaagaactacacatatgtaaataccatatttttgataaaaatgtgtaaatagatttatcaatgatgagtggacatgtggtcaattatctactgcacaccaactgtttatagaatacacaaaaataaaatgtaataactgtattctgtgaataccattttcatatcaaatgccatatttaaatgtccaccaatatgatttctgagtggtaaacctcaaatatgaattttaaactggtgaactaaaggaaatcttgaggtcatatactgaaatatgaataaattaaaataatgaattcagatctaatcatttttatgacaaattgcagcaccaaacaaactaatagcaacccatggctgtgatttgttgtgtggtaatttggacagaatgaaaagcatgcttttgattttttttttaatcagtgagagaagtcatcattctcaacacaaagccctgaacaacagcatttgacagtgtcctttagattttaattttttcaatggattgctttaaagagaatgagtagggaaaatagtagttaattttaggttatgttttatattaggctactggggacataaacggtcataactaatgactgtaatcattaaactccttaaacagtttagaaattagctccaggttcttaaactaacaaaaataaaacctaagcatgccacagagctattgattaatcagtaagtacctgtaatgagttttcagtgaagctttctctctgtgctgatgagattcatgctacctaaaaattaacagaaatgacactgtgaacaatgtagttggaaaataggtatgtgtatatgcattatttatactcattgttaaactgggaatggggaacagctctggttcacaatactacatacaactgagtttttgtctggttttactatagtgtctgcttgatggcaaaaggggagggtggagggtgggagaggaaatgtcagggcatgtgctctgataaaataaaggcagggaaacaagctgaattacttgaaattacttgaattttcttgtcttaaaactgaaaaaaaaatgtagttacacgttaaaatctgcaaatggtttttacacctctgattttaacatgaacttatactaatgtttggaatcttatgtcagaaatataagcagctatgtacttagaataggttttgaatgggagaggtagaacagagagagaattaagaagggatctgacttataaaagactagaatgtgattagagtgatagaacataccaatgttaccaagaaattgacaagctgctggctttaagcttatgcaagtggtagttgggaaagtaggaggtgtggaagagggtttgcattttggattaattcatgcaaaatgaaggaggaagcctggtctaagaagatactgtctttcaatagaaatgatttctaaactgctacagattaagaatagataatctgattgctgttgttttgtttgtttggaaagaaaaaaaatgtctggcttcttctactatttgttttcactaccaaactgtgttactaaatttcttgtcatccttgtatgtaaaatgggtgctgggggtggaggggtataagaggagggagagtcagagagagtgtgtatgggtgtgtgtgagtgtgagtgtgtgtgtacgcacacacactggggatagataagctacctggtaaagggtttgaacatttacaaaatgtcacactttttcttaaaagaaaaatattttggggtttgaataaaatggaccaccatttctcattggaacccattaattaagaaaaccagcatggtttgacaccacatgggaacatgaataaatctgtctcatgatttgaaaagtacaccttgcaaagttttaaaaataaagtttttaggcaaatgcgataagaaaccgtcatttccagtcacagtaggcgatctttcgtaatttcataaaagcagttcgtttgcagtatggcttttgtgtagttaggggttttttaagtgtgaagaaaggtatgtgggctttaaaagtgattctaaatcttgaatagaaaacacatgaattggctttaataaaaatgtcacctttttattattgacattaagtaatggtaccatatattttttaaaatacatattgacttgaattgtgaggcaataagataccttctatatgtaatgatcacagaactaacccttataatatagttttacttattttgtttactctaaaaatctatagcagagtttctctattttatatttcatagatttaaaaaacccaaataaagatggatttaaaattcactgtggaaaagagtattgagttacaaactgagaagaaaaagcaggaagttccctaataatctggaatattctacatggcttgattacatagcaaacaagaccaagatttagggctgtctttaacatcactgccgtcttgaagcagggtacacacgttaggtattgtgaagaacatcaatccgaacttttcttctgttgtttgcactgatgcgattttttgttcttttatgtttatacaacgtatctatgttgtgtaggggaaattttttcattttttaaaaattctactttggttttgttgttgttttgatttgtttttggctaagtagaggacatggactagttgtagcaaacagaacatgctgtttgctcttgccaaaggtcagtgagtgagtgcatttgctgcagtggtggcacgtagagaactagatggtaataaagatttaaaactatgaagaaggttacagtgtaactattttggtactagaaccagttcatgctggccgaaacgacaatggtttatggacttgcatccattttgtatttttgtaatatttgtaaatatgaactttttaaattgctgcaaagatggtttcttttgtaagatgttttcaacgtttacattcaatccaagcctttgtatattttagagctgtgcaacactttaagtcttgtatttatttttagtaaaaatggtgacagtttcattgtgaacccctctcaaaaaaaatgtatcagaaaagtttgattacctagaaagtgtgtatagaaactgcaaataaacgtgactgcaattaaa

SEQ ID NO: 157772 - DNA, 8213 bp, Homo sapiens
  Payload ID: 10918
  Gene Symbol: NHS
  Gene Name: Nance-Horan syndrome (congenital cataracts and dental anomalies)
  Uniprot ID: Q6T4R5
  ENST ID: ENST00000398097
  CDS Start-End: 275-4699
ctgatttgccattcaagtgaaccctggagggattagcagccagcctagcacttgggtgagaccatctccccctccaggggggagtcctagatgcagcacagaggttctgtgaaaatctgccatcctccttgcagaaggttgccctctctcgccctccatcccccccgccgtgcttgctgacttaagcagatcagctttcagctctctggcattcagagacgtctttgcataaaagaaaaggcccttccttaaggagcagagcgggaatccaagcatggctctggcctgctgcatgcccaagaatgcagccgtctccaacctggacatagagagtaagctgagtgtgtactaccgcgccccgtggcaccagcagcgcaacatcttcctcccagccacaaggccaccctgcgtggaggagctgcaccgccacgcccggcagagcctgcaagccctgcgcagagaacaccggagccggagcgatcgccgagagcaaagagcagctgcccccctttccattgcagctcctccactgccagcctaccctccagctcacagccagaggaggcgtgagtttaaggaccgtcactttttaacgtttaacagcacccgttcgccctcccccactgaatgttgccacatgaccccgtggagtagaaagtcccatcccccagaggatgaagatacagatgtcatgttagggcagaggccgaaaaacccaatacacaatatcccttccacactggacaagcagaccaactggagcaaagcactacctctcccgacgccagaggagaagatgaaacaagatgcccaagtgatttcttcttgcattattcccatcaatgttactggagttggctttgacagagaggctagtatacgctgctctctggttcattcacaatcggtactacagcggagacgaaaattgaggaggaggaaaaccatctcgggtatccccagaagagttcaacaagaaatagattctgatgaatcaccagtggccagggaaaggaatgtgattgtgcacacaaacccagacccctccaacactgtcaataggatatccggaaccagggactctgagtgccaaaccgaggatattctgattgctgccccatccagaaggagaatcagagctcaaaggggtcaaagcattgcagcttccctttctcattctgctggcaacatttctgccctagcagacaaaggtgacaccatgtttactcctgcagtgagcagccgcacaagatctcggagccttccccgggaaggtaatagaggtggggatgctgagcccaaagttggcgctaaaccctcagcatatgaagagggagagtcttttgtgggtgaccatgaaagaacccctaatgatttcagtgaggctccaagcagcccgagtgcccaggaccaccagcctactttgggcctggcctgctctcaacatcttcacagcccccagcacaaattaagtgagaggggaaggtcacgtctgtcccgaatggctgctgactctggcagctgtgacatctcctccaactcagacacgtttgggagccccatccactgcatctccacggctggcgtcctccttagcagccacatggaccagaaagatgaccaccagtcatccagtggcaactggagtgggagcagctccacgtgcccctcgcagacctcagaaaccatccctcctgcagcttctcctccactcactggctcttcacactgtgactcggagttgtcactaaacacagcccctcatgccaatgaggatgccagtgttttcgtgacagagcaatacaatgaccacttggataaagtgagaggccatcgggcaaactcctttacctccactgttgcagacctgctggatgatcccaacaacagcaacacaagtgacagtgagtggaattacctacaccaccaccatgatgcctcctgccgccaggattttagtcctgagcgtcccaaggcagacagcctgggctgcccaagcttcacaagcatggccacttatgacagctttctggaaaagtctccatcagacaaagcggacactagctctcacttttcagtagacacggaaggatactatacctccatgcactttgactgtggtctcaaaggtaataagagctatgtctgtcactatgcagccctgggcccagagaatggccagggtgtaggggcttcccctggtcttccagattgtgcctggcaggactacttagaccacaagaggcagggaagaccaagcatctctttcaggaaaccaaaggcaaagccgaccccacctaaacgtagctcatcattgaggaagtctgatggaaacgcagatatttctgagaagaaagaaccaaagataagcagtggtcagcacctgcctcacagttccagggaaatgaagctgcctcttgatttcgccaacacgccttctcgaatggaaaacgccaatcttcccaccaagcaggaaccttcttggataaaccagagtgaacaaggcattaaggaacctcagttagatgcttcggatattccaccattcaaagatgaagttgccgaatccacacactatgcagacctctggctcctaaatgacttgaaaacaaatgatccttatagatctctatctaattcaagcaccgctacgggtaccacagtcattgaatgcatcaaatctccagagagctctgaatcccaaacatcacaatcagaatcaagagccaccaccccatctcttccttctgttgacaatgagtttaaactggcttcaccagaaaagctggctggcttggcatctccatcaagtggctattcaagccagtctgaaacgccaacatcctctttccctacagctttcttttcaggtccattgtctcccggaggtagcaaaagaaaacctaaagtcccagaaagaaaatcctcactacagcaaccctctttaaaagatggaactatatcactgagtaaagaccttgaacttccaattatacctcctacccatcttgatctaagtgctcttcataatgtcttgaacaaaccattccaccaccgtcatccactgcatgtttttactcataataagcagaacacagtaggagaaacactgaggtcgaatcctccaccgtcccttgcaattacaccaacgatcctgaaatctgttaaccttaggtccatcaacaagtctgaagaagttaagcaaaaagaagaaaacaatacagatctcccttatttagaggaaagcacactcacaacggctgccttgtctccaagtaagattaggccgcatacagcaaataaatcagtatctcgtcaatactccactgaagacaccatactgtcctttttagactcttctgcagttgagatgggaccagataaactacatttagaaaaaaactctacttttgatgtgaagaatcgctgcgatccagaaaccataacatcagctggtagcagtcttctagattcaaatgtcacaaaagaccaagtgcgtacagagactgagcctattccagaaaacacgccaaccaaaaactgtgcttttcccacagaaggatttcagagggtctctgctgcccgcccaaatgatttggatggtaaaataatacaatatggacctggtccagacgaaactctagaacaggtacagaaggcaccctctgcaggtctggaggaagttgcacaacctgaatctgtggatgtaatcacatctcagtcagactcaccaactagagcaacagatgtaagcaatcaatttaagcatcaatttgttatgagccgccaccatgacaaagtgcctggtactatcagctatgaatcggagataacatctgtaaattcattccctgaaaaatgttccaagcaggaaaatattgcttcaggtatttcagccaaaagtgcctctgataacagcaaagcagaggagacccaaggaaatgtggatgaggcttcattgaaagaatcatcaccgagtgatgactccatcatttcaccacttagtgaagactcccaagctgaagcagagggtgtgttcgtgtctccaaacaaacctcgaacaactgaggatttatttgcagtcattcacagatccaagaggaaagtacttggaagaaaagattccggggacatgtctgttcgaagcaaatcgagagctcccctcagcagtagcagcagcagcgccagttccatcacttcacccagcagtaatgtgacaacccccaacagccagaggtctcctggtctcatataccgaaatgccaaaaagtccaacacatccaatgaagagtttaagctgttactgctcaagaaaggcagtcgctcagattctagttaccgcatgtctgccactgagatcctgaagagccccatactgcccaaacctcctggggagctcacagcagagtcccctcagagcaccgatgatgcccatcaggggtcacaaggggctgaggcattgtccccactctctccatgctccccacgagttaatgcagaaggcttttcctcgaagagctttgccacctcagcatcagcaagggttggacgttctcgggcccctcctgcagccagcagcagccgctacagtgtccgctgccggctgtacaatacgcccatgcaggcaatctccgagggagagacggaaaattctgacgggagcccacatgacgaccgttcctcccagagttcaacatagactgcctgtaccaggctgcctggcaaaggccaaaacccttactcacatgaggatggaggaacagaacagaggacttgggaaaagtctcaacttgatggggtagcatcactgctaagcaatgaatgaatttctaaatacagtatgtgctgggtaaacagaaagtggtttagacattcttgattagtttccatattttaagtagctgcagtctttcatgtttttctttagcatagtttgatttacgcaatctccttccttgtgaaaatagaggatacaaaattgtctaattttcatgacacctagaaaacgttttcccagagctgcctattcagaaactaaagccctcactgtcattattctttaagaagatgaaattactctggatgtttggtatttttttacattaaaacaaactaaagcaaaatttagaagaaagaactacacatatgtaaataccatatttttgataaaaatgtgtaaatagatttatcaatgatgagtggacatgtggtcaattatctactgcacaccaactgtttatagaatacacaaaaataaaatgtaataactgtattctgtgaataccattttcatatcaaatgccatatttaaatgtccaccaatatgatttctgagtggtaaacctcaaatatgaattttaaactggtgaactaaaggaaatcttgaggtcatatactgaaatatgaataaattaaaataatgaattcagatctaatcatttttatgacaaattgcagcaccaaacaaactaatagcaacccatggctgtgatttgttgtgtggtaatttggacagaatgaaaagcatgcttttgattttttttttaatcagtgagagaagtcatcattctcaacacaaagccctgaacaacagcatttgacagtgtcctttagattttaattttttcaatggattgctttaaagagaatgagtagggaaaatagtagttaattttaggttatgttttatattaggctactggggacataaacggtcataactaatgactgtaatcattaaactccttaaacagtttagaaattagctccaggttcttaaactaacaaaaataaaacctaagcatgccacagagctattgattaatcagtaagtacctgtaatgagttttcagtgaagctttctctctgtgctgatgagattcatgctacctaaaaattaacagaaatgacactgtgaacaatgtagttggaaaataggtatgtgtatatgcattatttatactcattgttaaactgggaatggggaacagctctggttcacaatactacatacaactgagtttttgtctggttttactatagtgtctgcttgatggcaaaaggggagggtggagggtgggagaggaaatgtcagggcatgtgctctgataaaataaaggcagggaaacaagctgaattacttgaaattacttgaattttcttgtcttaaaactgaaaaaaaaatgtagttacacgttaaaatctgcaaatggtttttacacctctgattttaacatgaacttatactaatgtttggaatcttatgtcagaaatataagcagctatgtacttagaataggttttgaatgggagaggtagaacagagagagaattaagaagggatctgacttataaaagactagaatgtgattagagtgatagaacataccaatgttaccaagaaattgacaagctgctggctttaagcttatgcaagtggtagttgggaaagtaggaggtgtggaagagggtttgcattttggattaattcatgcaaaatgaaggaggaagcctggtctaagaagatactgtctttcaatagaaatgatttctaaactgctacagattaagaatagataatctgattgctgttgttttgtttgtttggaaagaaaaaaaatgtctggcttcttctactatttgttttcactaccaaactgtgttactaaatttcttgtcatccttgtatgtaaaatgggtgctgggggtggaggggtataagaggagggagagtcagagagagtgtgtatgggtgtgtgtgagtgtgagtgtgtgtgtacgcacacacactggggatagataagctacctggtaaagggtttgaacatttacaaaatgtcacactttttcttaaaagaaaaatattttggggtttgaataaaatggaccaccatttctcattggaacccattaattaagaaaaccagcatggtttgacaccacatgggaacatgaataaatctgtctcatgatttgaaaagtacaccttgcaaagttttaaaaataaagtttttaggcaaatgcgataagaaaccgtcatttccagtcacagtaggcgatctttcgtaatttcataaaagcagttcgtttgcagtatggcttttgtgtagttaggggttttttaagtgtgaagaaaggtatgtgggctttaaaagtgattctaaatcttgaatagaaaacacatgaattggctttaataaaaatgtcacctttttattattgacattaagtaatggtaccatatattttttaaaatacatattgacttgaattgtgaggcaataagataccttctatatgtaatgatcacagaactaacccttataatatagttttacttattttgtttactctaaaaatctatagcagagtttctctattttatatttcatagatttaaaaaacccaaataaagatggatttaaaattcactgtggaaaagagtattgagttacaaactgagaagaaaaagcaggaagttccctaataatctggaatattctacatggcttgattacatagcaaacaagaccaagatttagggctgtctttaacatcactgccgtcttgaagcagggtacacacgttaggtattgtgaagaacatcaatccgaacttttcttctgttgtttgcactgatgcgattttttgttcttttatgtttatacaacgtatctatgttgtgtaggggaaattttttcattttttaaaaattctactttggttttgttgttgttttgatttgtttttggctaagtagaggacatggactagttgtagcaaacagaacatgctgtttgctcttgccaaaggtcagtgagtgagtgcatttgctgcagtggtggcacgtagagaactagatggtaataaagatttaaaactatgaagaaggttacagtgtaactattttggtactagaaccagttcatgctggccgaaacgacaatggtttatggacttgcatccattttgtatttttgtaatatttgtaaatatgaactttttaaattgctgcaaagatggtttcttttgtaagatgttttcaacgtttacattcaatccaagcctttgtatattttagagctgtgcaacactttaagtcttgtatttatttttagtaaaaatggtgacagtttcattgtgaacccctctcaaaaaaaatgtatcagaaaagtttgattacctagaaagtgtgtatagaaactgcaaataaa

SEQ ID NO: 157773 - DNA, 8163 bp, Homo sapiens
  Payload ID: 10918
  Gene Symbol: NHS
  Gene Name: Nance-Horan syndrome (congenital cataracts and dental anomalies)
  ENST ID: ENST00000617601
  CDS Start-End: 293-4636
ctgatttgccattcaagtgaaccctggagggattagcagccagcctagcacttgggtgagaccatctccccctccaggggggagtcctagatgcagcacagaggttctgtgaaaatctgccatcctccttgcagaaggttgccctctctcgccctccatcccccccgccgtgcttgctgacttaagcagatcagctttcagctctctggcattcagagacgtctttgcataaaagaaaaggcccttccttaaggagcagagcgggaatccaagcatggctctggcctgctgcatgcccaagaatgcagccgtctccaacctggacatagagagtaagctgagtgtgtactaccgcgccccgtggcaccagcagcgcaacatcttcctcccagccacaaggccaccctgcgtggaggagctgcaccgccacgcccggcagagcctgcaagccctgcgcagagaacaccggagccggagcgatcgccgagagcaaagagcagctgcccccctttccattgcagctcctccactgccagcctaccctccagctcacagccagaggaggcgtgagtttaaggaccgtcactttttaacgtcccatcccccagaggatgaagatacagatgtcatgttagggcagaggccgaaaaacccaatacacaatatcccttccacactggacaagcagaccaactggagcaaagcactacctctcccgacgccagaggagaagatgaaacaagatgcccaagtgatttcttcttgcattattcccatcaatgttactggagttggctttgacagagaggctagtatacgctgctctctggttcattcacaatcggtactacagcggagacgaaaattgaggaggaggaaaaccatctcgggtatccccagaagagttcaacaagaaatagattctgatgaatcaccagtggccagggaaaggaatgtgattgtgcacacaaacccagacccctccaacactgtcaataggatatccggaaccagggactctgagtgccaaaccgaggatattctgattgctgccccatccagaaggagaatcagagctcaaaggggtcaaagcattgcagcttccctttctcattctgctggcaacatttctgccctagcagacaaaggtgacaccatgtttactcctgcagtgagcagccgcacaagatctcggagccttccccgggaaggtaatagaggtggggatgctgagcccaaagttggcgctaaaccctcagcatatgaagagggagagtcttttgtgggtgaccatgaaagaacccctaatgatttcagtgaggctccaagcagcccgagtgcccaggaccaccagcctactttgggcctggcctgctctcaacatcttcacagcccccagcacaaattaagtgagaggggaaggtcacgtctgtcccgaatggctgctgactctggcagctgtgacatctcctccaactcagacacgtttgggagccccatccactgcatctccacggctggcgtcctccttagcagccacatggaccagaaagatgaccaccagtcatccagtggcaactggagtgggagcagctccacgtgcccctcgcagacctcagaaaccatccctcctgcagcttctcctccactcactggctcttcacactgtgactcggagttgtcactaaacacagcccctcatgccaatgaggatgccagtgttttcgtgacagagcaatacaatgaccacttggataaagtgagaggccatcgggcaaactcctttacctccactgttgcagacctgctggatgatcccaacaacagcaacacaagtgacagtgagtggaattacctacaccaccaccatgatgcctcctgccgccaggattttagtcctgagcgtcccaaggcagacagcctgggctgcccaagcttcacaagcatggccacttatgacagctttctggaaaagtctccatcagacaaagcggacactagctctcacttttcagtagacacggaaggatactatacctccatgcactttgactgtggtctcaaaggtaataagagctatgtctgtcactatgcagccctgggcccagagaatggccagggtgtaggggcttcccctggtcttccagattgtgcctggcaggactacttagaccacaagaggcagggaagaccaagcatctctttcaggaaaccaaaggcaaagccgaccccacctaaacgtagctcatcattgaggaagtctgatggaaacgcagatatttctgagaagaaagaaccaaagataagcagtggtcagcacctgcctcacagttccagggaaatgaagctgcctcttgatttcgccaacacgccttctcgaatggaaaacgccaatcttcccaccaagcaggaaccttcttggataaaccagagtgaacaaggcattaaggaacctcagttagatgcttcggatattccaccattcaaagatgaagttgccgaatccacacactatgcagacctctggctcctaaatgacttgaaaacaaatgatccttatagatctctatctaattcaagcaccgctacgggtaccacagtcattgaatgcatcaaatctccagagagctctgaatcccaaacatcacaatcagaatcaagagccaccaccccatctcttccttctgttgacaatgagtttaaactggcttcaccagaaaagctggctggcttggcatctccatcaagtggctattcaagccagtctgaaacgccaacatcctctttccctacagctttcttttcaggtccattgtctcccggaggtagcaaaagaaaacctaaagtcccagaaagaaaatcctcactacagcaaccctctttaaaagatggaactatatcactgagtaaagaccttgaacttccaattatacctcctacccatcttgatctaagtgctcttcataatgtcttgaacaaaccattccaccaccgtcatccactgcatgtttttactcataataagcagaacacagtaggagaaacactgaggtcgaatcctccaccgtcccttgcaattacaccaacgatcctgaaatctgttaaccttaggtccatcaacaagtctgaagaagttaagcaaaaagaagaaaacaatacagatctcccttatttagaggaaagcacactcacaacggctgccttgtctccaagtaagattaggccgcatacagcaaataaatcagtatctcgtcaatactccactgaagacaccatactgtcctttttagactcttctgcagttgagatgggaccagataaactacatttagaaaaaaactctacttttgatgtgaagaatcgctgcgatccagaaaccataacatcagctggtagcagtcttctagattcaaatgtcacaaaagaccaagtgcgtacagagactgagcctattccagaaaacacgccaaccaaaaactgtgcttttcccacagaaggatttcagagggtctctgctgcccgcccaaatgatttggatggtaaaataatacaatatggacctggtccagacgaaactctagaacaggtacagaaggcaccctctgcaggtctggaggaagttgcacaacctgaatctgtggatgtaatcacatctcagtcagactcaccaactagagcaacagatgtaagcaatcaatttaagcatcaatttgttatgagccgccaccatgacaaagtgcctggtactatcagctatgaatcggagataacatctgtaaattcattccctgaaaaatgttccaagcaggaaaatattgcttcaggtatttcagccaaaagtgcctctgataacagcaaagcagaggagacccaaggaaatgtggatgaggcttcattgaaagaatcatcaccgagtgatgactccatcatttcaccacttagtgaagactcccaagctgaagcagagggtgtgttcgtgtctccaaacaaacctcgaacaactgaggatttatttgcagtcattcacagatccaagaggaaagtacttggaagaaaagattccggggacatgtctgttcgaagcaaatcgagagctcccctcagcagtagcagcagcagcgccagttccatcacttcacccagcagtaatgtgacaacccccaacagccagaggtctcctggtctcatataccgaaatgccaaaaagtccaacacatccaatgaagagtttaagctgttactgctcaagaaaggcagtcgctcagattctagttaccgcatgtctgccactgagatcctgaagagccccatactgcccaaacctcctggggagctcacagcagagtcccctcagagcaccgatgatgcccatcaggggtcacaaggggctgaggcattgtccccactctctccatgctccccacgagttaatgcagaaggcttttcctcgaagagctttgccacctcagcatcagcaagggttggacgttctcgggcccctcctgcagccagcagcagccgctacagtgtccgctgccggctgtacaatacgcccatgcaggcaatctccgagggagagacggaaaattctgacgggagcccacatgacgaccgttcctcccagagttcaacatagactgcctgtaccaggctgcctggcaaaggccaaaacccttactcacatgaggatggaggaacagaacagaggacttgggaaaagtctcaacttgatggggtagcatcactgctaagcaatgaatgaatttctaaatacagtatgtgctgggtaaacagaaagtggtttagacattcttgattagtttccatattttaagtagctgcagtctttcatgtttttctttagcatagtttgatttacgcaatctccttccttgtgaaaatagaggatacaaaattgtctaattttcatgacacctagaaaacgttttcccagagctgcctattcagaaactaaagccctcactgtcattattctttaagaagatgaaattactctggatgtttggtatttttttacattaaaacaaactaaagcaaaatttagaagaaagaactacacatatgtaaataccatatttttgataaaaatgtgtaaatagatttatcaatgatgagtggacatgtggtcaattatctactgcacaccaactgtttatagaatacacaaaaataaaatgtaataactgtattctgtgaataccattttcatatcaaatgccatatttaaatgtccaccaatatgatttctgagtggtaaacctcaaatatgaattttaaactggtgaactaaaggaaatcttgaggtcatatactgaaatatgaataaattaaaataatgaattcagatctaatcatttttatgacaaattgcagcaccaaacaaactaatagcaacccatggctgtgatttgttgtgtggtaatttggacagaatgaaaagcatgcttttgattttttttttaatcagtgagagaagtcatcattctcaacacaaagccctgaacaacagcatttgacagtgtcctttagattttaattttttcaatggattgctttaaagagaatgagtagggaaaatagtagttaattttaggttatgttttatattaggctactggggacataaacggtcataactaatgactgtaatcattaaactccttaaacagtttagaaattagctccaggttcttaaactaacaaaaataaaacctaagcatgccacagagctattgattaatcagtaagtacctgtaatgagttttcagtgaagctttctctctgtgctgatgagattcatgctacctaaaaattaacagaaatgacactgtgaacaatgtagttggaaaataggtatgtgtatatgcattatttatactcattgttaaactgggaatggggaacagctctggttcacaatactacatacaactgagtttttgtctggttttactatagtgtctgcttgatggcaaaaggggagggtggagggtgggagaggaaatgtcagggcatgtgctctgataaaataaaggcagggaaacaagctgaattacttgaaattacttgaattttcttgtcttaaaactgaaaaaaaaatgtagttacacgttaaaatctgcaaatggtttttacacctctgattttaacatgaacttatactaatgtttggaatcttatgtcagaaatataagcagctatgtacttagaataggttttgaatgggagaggtagaacagagagagaattaagaagggatctgacttataaaagactagaatgtgattagagtgatagaacataccaatgttaccaagaaattgacaagctgctggctttaagcttatgcaagtggtagttgggaaagtaggaggtgtggaagagggtttgcattttggattaattcatgcaaaatgaaggaggaagcctggtctaagaagatactgtctttcaatagaaatgatttctaaactgctacagattaagaatagataatctgattgctgttgttttgtttgtttggaaagaaaaaaaatgtctggcttcttctactatttgttttcactaccaaactgtgttactaaatttcttgtcatccttgtatgtaaaatgggtgctgggggtggaggggtataagaggagggagagtcagagagagtgtgtatgggtgtgtgtgagtgtgagtgtgtgtgtacgcacacacactggggatagataagctacctggtaaagggtttgaacatttacaaaatgtcacactttttcttaaaagaaaaatattttggggtttgaataaaatggaccaccatttctcattggaacccattaattaagaaaaccagcatggtttgacaccacatgggaacatgaataaatctgtctcatgatttgaaaagtacaccttgcaaagttttaaaaataaagtttttaggcaaatgcgataagaaaccgtcatttccagtcacagtaggcgatctttcgtaatttcataaaagcagttcgtttgcagtatggcttttgtgtagttaggggttttttaagtgtgaagaaaggtatgtgggctttaaaagtgattctaaatcttgaatagaaaacacatgaattggctttaataaaaatgtcacctttttattattgacattaagtaatggtaccatatattttttaaaatacatattgacttgaattgtgaggcaataagataccttctatatgtaatgatcacagaactaacccttataatatagttttacttattttgtttactctaaaaatctatagcagagtttctctattttatatttcatagatttaaaaaacccaaataaagatggatttaaaattcactgtggaaaagagtattgagttacaaactgagaagaaaaagcaggaagttccctaataatctggaatattctacatggcttgattacatagcaaacaagaccaagatttagggctgtctttaacatcactgccgtcttgaagcagggtacacacgttaggtattgtgaagaacatcaatccgaacttttcttctgttgtttgcactgatgcgattttttgttcttttatgtttatacaacgtatctatgttgtgtaggggaaattttttcattttttaaaaattctactttggttttgttgttgttttgatttgtttttggctaagtagaggacatggactagttgtagcaaacagaacatgctgtttgctcttgccaaaggtcagtgagtgagtgcatttgctgcagtggtggcacgtagagaactagatggtaataaagatttaaaactatgaagaaggttacagtgtaactattttggtactagaaccagttcatgctggccgaaacgacaatggtttatggacttgcatccattttgtatttttgtaatatttgtaaatatgaactttttaaattgctgcaaagatggtttcttttgtaagatgttttcaacgtttacattcaatccaagcctttgtatattttagagctgtgcaacactttaagtcttgtatttatttttagtaaaaatggtgacagtttcattgtgaacccctctcaaaaaaaatgtatcagaaaagtttgattacctagaaagtgtgtatagaaactgcaaataaacgtgactgcaatt

SEQ ID NO: 157774 - DNA, 8860 bp, Homo sapiens
  Payload ID: 10918
  Gene Symbol: NHS
  Gene Name: Nance-Horan syndrome (congenital cataracts and dental anomalies)
  ENST ID: ENST00000615422
  CDS Start-End: 931-5346
ctggatctggatagtgtgtctggagggtaaagcagactgggccagttcatgccattcccgaggctgacaggctacccaggtgcttgtgaggtcctctttgcagccatttcttagtaaaaatcctcctggttcctaacatctgcttccagcagaatttctgtttaactcatggagagttccatcctaggatccctgtgtacatgaagaagatgagagtgagttaaatgctgtgtttgggggaaggaagccttccttccttgatctcttggatgagttgcaaaaactcatcttgcatctgcagtttccctcccttaatactcattacctctatgatggtttctttaatgcgtatgctcacccctgggtgaaaccaaggaagagcaatgctttgaaagatgacaggcaatggagccggtaggtgtagggcatgataaggataccttggggacgggaccacaagggacagaggcagggcaaggtataggccgaagttcaggtggacagcaggggcggcgtgcagaactacagctctgaggccctgcggccagaaggctggagctgaggcagcctttccattcatctctgaggctttcctccacatttttcagaaacaggacccccatctccacccccaagcaggctagccaggggcttgtcagtgttgatgagcgactgtgccaagggtgaggaatgaaggtacggagaggaaattagctagtcataggtagacggttggtgtcttggagcctcccgtgcctcggctcaggggcaaaagttgtccctatcagtatcataaatgccaaacctttctccggccttgagttagttcttaatgtgaatgcagtagtctggacttccactccacccagactttactcctgtcctcttccccaccccagggttggccaaaagcacaacttaaagccactgatggacaacgccctgtttcttgcagccgtctccaacctggacatagagagtaagctgagtgtgtactaccgcgccccgtggcaccagcagcgcaacatcttcctcccagccacaaggccaccctgcgtggaggagctgcaccgccacgcccggcagagcctgcaagccctgcgcagagaacaccggagccggagcgatcgccgagagcaaagagcagctgcccccctttccattgcagctcctccactgccagcctaccctccagctcacagccagaggaggcgtgagtttaaggaccgtcactttttaacgtttaacagcacccgttcgccctcccccactgaatgttgccacatgaccccgtggagtagaaagtcccatcccccagaggatgaagatacagatgtcatgttagggcagaggccgaaaaacccaatacacaatatcccttccacactggacaagcagaccaactggagcaaagcactacctctcccgacgccagaggagaagatgaaacaagatgcccaagtgatttcttcttgcattattcccatcaatgttactggagttggctttgacagagaggctagtatacgctgctctctggttcattcacaatcggtactacagcggagacgaaaattgaggaggaggaaaaccatctcgggtatccccagaagagttcaacaagaaatagattctgatgaatcaccagtggccagggaaaggaatgtgattgtgcacacaaacccagacccctccaacactgtcaataggatatccggaaccagggactctgagtgccaaaccgaggatattctgattgctgccccatccagaaggagaatcagagctcaaaggggtcaaagcattgcagcttccctttctcattctgctggcaacatttctgccctagcagacaaaggtgacaccatgtttactcctgcagtgagcagccgcacaagatctcggagccttccccgggaaggtaatagaggtggggatgctgagcccaaagttggcgctaaaccctcagcatatgaagagggagagtcttttgtgggtgaccatgaaagaacccctaatgatttcagtgaggctccaagcagcccgagtgcccaggaccaccagcctactttgggcctggcctgctctcaacatcttcacagcccccagcacaaattaagtgagaggggaaggtcacgtctgtcccgaatggctgctgactctggcagctgtgacatctcctccaactcagacacgtttgggagccccatccactgcatctccacggctggcgtcctccttagcagccacatggaccagaaagatgaccaccagtcatccagtggcaactggagtgggagcagctccacgtgcccctcgcagacctcagaaaccatccctcctgcagcttctcctccactcactggctcttcacactgtgactcggagttgtcactaaacacagcccctcatgccaatgaggatgccagtgttttcgtgacagagcaatacaatgaccacttggataaagtgagaggccatcgggcaaactcctttacctccactgttgcagacctgctggatgatcccaacaacagcaacacaagtgacagtgagtggaattacctacaccaccaccatgatgcctcctgccgccaggattttagtcctgagcgtcccaaggcagacagcctgggctgcccaagcttcacaagcatggccacttatgacagctttctggaaaagtctccatcagacaaagcggacactagctctcacttttcagtagacacggaaggatactatacctccatgcactttgactgtggtctcaaaggtaataagagctatgtctgtcactatgcagccctgggcccagagaatggccagggtgtaggggcttcccctggtcttccagattgtgcctggcaggactacttagaccacaagaggcagggaagaccaagcatctctttcaggaaaccaaaggcaaagccgaccccacctaaacgtagctcatcattgaggaagtctgatggaaacgcagatatttctgagaagaaagaaccaaagataagcagtggtcagcacctgcctcacagttccagggaaatgaagctgcctcttgatttcgccaacacgccttctcgaatggaaaacgccaatcttcccaccaagcaggaaccttcttggataaaccagagtgaacaaggcattaaggaacctcagttagatgcttcggatattccaccattcaaagatgaagttgccgaatccacacactatgcagacctctggctcctaaatgacttgaaaacaaatgatccttatagatctctatctaattcaagcaccgctacgggtaccacagtcattgaatgcatcaaatctccagagagctctgaatcccaaacatcacaatcagaatcaagagccaccaccccatctcttccttctgttgacaatgagtttaaactggcttcaccagaaaagctggctggcttggcatctccatcaagtggctattcaagccagtctgaaacgccaacatcctctttccctacagctttcttttcaggtccattgtctcccggaggtagcaaaagaaaacctaaagtcccagaaagaaaatcctcactacagcaaccctctttaaaagatggaactatatcactgagtaaagaccttgaacttccaattatacctcctacccatcttgatctaagtgctcttcataatgtcttgaacaaaccattccaccaccgtcatccactgcatgtttttactcataataagcagaacacagtaggagaaacactgaggtcgaatcctccaccgtcccttgcaattacaccaacgatcctgaaatctgttaaccttaggtccatcaacaagtctgaagaagttaagcaaaaagaagaaaacaatacagatctcccttatttagaggaaagcacactcacaacggctgccttgtctccaagtaagattaggccgcatacagcaaataaatcagtatctcgtcaatactccactgaagacaccatactgtcctttttagactcttctgcagttgagatgggaccagataaactacatttagaaaaaaactctacttttgatgtgaagaatcgctgcgatccagaaaccataacatcagctggtagcagtcttctagattcaaatgtcacaaaagaccaagtgcgtacagagactgagcctattccagaaaacacgccaaccaaaaactgtgcttttcccacagaaggatttcagagggtctctgctgcccgcccaaatgatttggatggtaaaataatacaatatggacctggtccagacgaaactctagaacaggtacagaaggcaccctctgcaggtctggaggaagttgcacaacctgaatctgtggatgtaatcacatctcagtcagactcaccaactagagcaacagatgtaagcaatcaatttaagcatcaatttgttatgagccgccaccatgacaaagtgcctggtactatcagctatgaatcggagataacatctgtaaattcattccctgaaaaatgttccaagcaggaaaatattgcttcaggtatttcagccaaaagtgcctctgataacagcaaagcagaggagacccaaggaaatgtggatgaggcttcattgaaagaatcatcaccgagtgatgactccatcatttcaccacttagtgaagactcccaagctgaagcagagggtgtgttcgtgtctccaaacaaacctcgaacaactgaggatttatttgcagtcattcacagatccaagaggaaagtacttggaagaaaagattccggggacatgtctgttcgaagcaaatcgagagctcccctcagcagtagcagcagcagcgccagttccatcacttcacccagcagtaatgtgacaacccccaacagccagaggtctcctggtctcatataccgaaatgccaaaaagtccaacacatccaatgaagagtttaagctgttactgctcaagaaaggcagtcgctcagattctagttaccgcatgtctgccactgagatcctgaagagccccatactgcccaaacctcctggggagctcacagcagagtcccctcagagcaccgatgatgcccatcaggggtcacaaggggctgaggcattgtccccactctctccatgctccccacgagttaatgcagaaggcttttcctcgaagagctttgccacctcagcatcagcaagggttggacgttctcgggcccctcctgcagccagcagcagccgctacagtgtccgctgccggctgtacaatacgcccatgcaggcaatctccgagggagagacggaaaattctgacgggagcccacatgacgaccgttcctcccagagttcaacatagactgcctgtaccaggctgcctggcaaaggccaaaacccttactcacatgaggatggaggaacagaacagaggacttgggaaaagtctcaacttgatggggtagcatcactgctaagcaatgaatgaatttctaaatacagtatgtgctgggtaaacagaaagtggtttagacattcttgattagtttccatattttaagtagctgcagtctttcatgtttttctttagcatagtttgatttacgcaatctccttccttgtgaaaatagaggatacaaaattgtctaattttcatgacacctagaaaacgttttcccagagctgcctattcagaaactaaagccctcactgtcattattctttaagaagatgaaattactctggatgtttggtatttttttacattaaaacaaactaaagcaaaatttagaagaaagaactacacatatgtaaataccatatttttgataaaaatgtgtaaatagatttatcaatgatgagtggacatgtggtcaattatctactgcacaccaactgtttatagaatacacaaaaataaaatgtaataactgtattctgtgaataccattttcatatcaaatgccatatttaaatgtccaccaatatgatttctgagtggtaaacctcaaatatgaattttaaactggtgaactaaaggaaatcttgaggtcatatactgaaatatgaataaattaaaataatgaattcagatctaatcatttttatgacaaattgcagcaccaaacaaactaatagcaacccatggctgtgatttgttgtgtggtaatttggacagaatgaaaagcatgcttttgattttttttttaatcagtgagagaagtcatcattctcaacacaaagccctgaacaacagcatttgacagtgtcctttagattttaattttttcaatggattgctttaaagagaatgagtagggaaaatagtagttaattttaggttatgttttatattaggctactggggacataaacggtcataactaatgactgtaatcattaaactccttaaacagtttagaaattagctccaggttcttaaactaacaaaaataaaacctaagcatgccacagagctattgattaatcagtaagtacctgtaatgagttttcagtgaagctttctctctgtgctgatgagattcatgctacctaaaaattaacagaaatgacactgtgaacaatgtagttggaaaataggtatgtgtatatgcattatttatactcattgttaaactgggaatggggaacagctctggttcacaatactacatacaactgagtttttgtctggttttactatagtgtctgcttgatggcaaaaggggagggtggagggtgggagaggaaatgtcagggcatgtgctctgataaaataaaggcagggaaacaagctgaattacttgaaattacttgaattttcttgtcttaaaactgaaaaaaaaatgtagttacacgttaaaatctgcaaatggtttttacacctctgattttaacatgaacttatactaatgtttggaatcttatgtcagaaatataagcagctatgtacttagaataggttttgaatgggagaggtagaacagagagagaattaagaagggatctgacttataaaagactagaatgtgattagagtgatagaacataccaatgttaccaagaaattgacaagctgctggctttaagcttatgcaagtggtagttgggaaagtaggaggtgtggaagagggtttgcattttggattaattcatgcaaaatgaaggaggaagcctggtctaagaagatactgtctttcaatagaaatgatttctaaactgctacagattaagaatagataatctgattgctgttgttttgtttgtttggaaagaaaaaaaatgtctggcttcttctactatttgttttcactaccaaactgtgttactaaatttcttgtcatccttgtatgtaaaatgggtgctgggggtggaggggtataagaggagggagagtcagagagagtgtgtatgggtgtgtgtgagtgtgagtgtgtgtgtacgcacacacactggggatagataagctacctggtaaagggtttgaacatttacaaaatgtcacactttttcttaaaagaaaaatattttggggtttgaataaaatggaccaccatttctcattggaacccattaattaagaaaaccagcatggtttgacaccacatgggaacatgaataaatctgtctcatgatttgaaaagtacaccttgcaaagttttaaaaataaagtttttaggcaaatgcgataagaaaccgtcatttccagtcacagtaggcgatctttcgtaatttcataaaagcagttcgtttgcagtatggcttttgtgtagttaggggttttttaagtgtgaagaaaggtatgtgggctttaaaagtgattctaaatcttgaatagaaaacacatgaattggctttaataaaaatgtcacctttttattattgacattaagtaatggtaccatatattttttaaaatacatattgacttgaattgtgaggcaataagataccttctatatgtaatgatcacagaactaacccttataatatagttttacttattttgtttactctaaaaatctatagcagagtttctctattttatatttcatagatttaaaaaacccaaataaagatggatttaaaattcactgtggaaaagagtattgagttacaaactgagaagaaaaagcaggaagttccctaataatctggaatattctacatggcttgattacatagcaaacaagaccaagatttagggctgtctttaacatcactgccgtcttgaagcagggtacacacgttaggtattgtgaagaacatcaatccgaacttttcttctgttgtttgcactgatgcgattttttgttcttttatgtttatacaacgtatctatgttgtgtaggggaaattttttcattttttaaaaattctactttggttttgttgttgttttgatttgtttttggctaagtagaggacatggactagttgtagcaaacagaacatgctgtttgctcttgccaaaggtcagtgagtgagtgcatttgctgcagtggtggcacgtagagaactagatggtaataaagatttaaaactatgaagaaggttacagtgtaactattttggtactagaaccagttcatgctggccgaaacgacaatggtttatggacttgcatccattttgtatttttgtaatatttgtaaatatgaactttttaaattgctgcaaagatggtttcttttgtaagatgttttcaacgtttacattcaatccaagcctttgtatattttagagctgtgcaacactttaagtcttgtatttatttttagtaaaaatggtgacagtttcattgtgaacccctctcaaaaaaaatgtatcagaaaagtttgattacctagaaagtgtgtatagaaactgcaaataaa

SEQ ID NO: 157775 - DNA, 5183 bp, Homo sapiens
  Payload ID: 10919
  Gene Symbol: NANOG
  Gene Name: Nanog homeobox
  Uniprot ID: Q9H9S0
  ENST ID: ENST00000229307
  CDS Start-End: 220-1137
ttcattataaatctagagactccaggattttaacgttctgctggactgagctggttgcctcatgttattatgcaggcaactcactttatcccaatttcttgatacttttccttctggaggtcctatttctctaacatcttccagaaaagtcttaaagctgccttaaccttttttccagtccacctcttaaattttttcctcctcttcctctatactaacatgagtgtggatccagcttgtccccaaagcttgccttgctttgaagcatccgactgtaaagaatcttcacctatgcctgtgatttgtgggcctgaagaaaactatccatccttgcaaatgtcttctgctgagatgcctcacacggagactgtctctcctcttccttcctccatggatctgcttattcaggacagccctgattcttccaccagtcccaaaggcaaacaacccacttctgcagagaagagtgtcgcaaaaaaggaagacaaggtcccggtcaagaaacagaagaccagaactgtgttctcttccacccagctgtgtgtactcaatgatagatttcagagacagaaatacctcagcctccagcagatgcaagaactctccaacatcctgaacctcagctacaaacaggtgaagacctggttccagaaccagagaatgaaatctaagaggtggcagaaaaacaactggccgaagaatagcaatggtgtgacgcagaaggcctcagcacctacctaccccagcctttactcttcctaccaccagggatgcctggtgaacccgactgggaaccttccaatgtggagcaaccagacctggaacaattcaacctggagcaaccagacccagaacatccagtcctggagcaaccactcctggaacactcagacctggtgcacccaatcctggaacaatcaggcctggaacagtcccttctataactgtggagaggaatctctgcagtcctgcatgcagttccagccaaattctcctgccagtgacttggaggctgccttggaagctgctggggaaggccttaatgtaatacagcagaccactaggtattttagtactccacaaaccatggatttattcctaaactactccatgaacatgcaacctgaagacgtgtgaagatgagtgaaactgatattactcaatttcagtctggacactggctgaatccttcctctcccctcctcccatccctcataggatttttcttgtttggaaaccacgtgttctggtttccatgatgcccatccagtcaatctcatggagggtggagtatggttggagcctaatcagcgaggtttctttttttttttttttcctattggatcttcctggagaaaatactttttttttttttttttttgaaacggagtcttgctctgtcgcccaggctggagtgcagtggcgcggtcttggctcactgcaagctccgtctcccgggttcacgccattctcctgcctcagcctcccgagcagctgggactacaggcgcccgccacctcgcccggctaatattttgtatttttagtagagacggggtttcactgtgttagccaggatggtctcgatctcctgaccttgtgatccacccgcctcggcctccctaacagctgggatttacaggcgtgagccaccgcgccctgcctagaaaagacattttaataaccttggctgccgtctctggctatagataagtagatctaatactagtttggatatctttagggtttagaatctaacctcaagaataagaaatacaagtacaaattggtgatgaagatgtattcgtattgtttgggattgggaggctttgcttattttttaaaaactattgaggtaaagggttaagctgtaacatacttaattgatttcttaccgtttttggctctgttttgctatatcccctaatttgttggttgtgctaatctttgtagaaagaggtctcgtatttgctgcatcgtaatgacatgagtactgctttagttggtttaagttcaaatgaatgaaacaactatttttcctttagttgattttaccctgatttcaccgagtgtttcaatgagtaaatatacagcttaaacataaatctttgttaaatttttggttggggtggagaaggaaattagctgaggacactgctatcttagaaatgcatagaaatagctgagcgtggtggcctatgcctgtagtcccagctatttgggaggctgaggcaggagaatcgcttgaacctggtaggtggaggttgtagtgagccaatatcacaccactgcactccagcttgggcgacaagagcaaaactcccatctcaaaaataaataaataaataagtaaataaatgaataataaataaatatgccagttttagaatgaatgaataataaatatgccagttttagaaaaaagggcacttacgtgcattgtacatgtgcatctacaaatgtaatgggttatttccgtgtatgaatctgtaattgatgctaacatttaaagtttcatcagaggcctatatgtaagtaaattctaaggctagttgaaacagatttatgttctcaccttaagagcagctacgcaggcatctgtgaattatactaataatcctttactgtccttttcccatcttgtgcctgccctaaatgtatctgatctgagagcacgtcccttcactctgaagcagcatgatgcaggttatcagagtggttttttccagtcttttctctcattatttccccaattgtccaatgttactaagactatccagtctaattccaagtgttttttttttgttttattttgtttttttttaagactggagtcttactctgttgcccaggctggagtgtagtggagcgatctcggctcaccgcaacctccgcctcccgagttcaagtgattctcctgcctcagcctcccaagtagctgggactacaggggtgagccaccatgcccagctaattgtatttttagtagagacagggtttcactatgttggccaggctggtcttgaactcctgacctcatgatccaccagccttggcctcccaaagtgttgggattacaggcgtgagccactgcgcctggcctatcgtttgtttttttagacagtctctctctattgcccaggctggagtgcagtggcacaatcttggctcactgcaacctccgcctcctgggttcgagcaattctcctgcgtcagcctcctaagtagctgggattacaggcacccaacattacacccggctaatttttggtatttttagtagagatggggtttcaccatgttggccagcctggtctcgaactcctgacctcaggtgatccacctgactcggcctcccaaagtggtgggattataggtgtgagccaccgtgtctgggcaatttttttttttttttttgagatggaacttcacttttgttactcaggctggagcacaatgatgcaatctctactcactgcaacctgcacctcccaggttcaagtgattctcttgcctcagcctttcgagtggctggtattacagggatttgccactatgcccagctaattctttgtatttagtagagatggggtttcaccgtattgaccaggctggtctcgaactcctgacctcaggtaatccaccctcctcggtctcccaaagtgctaggattacaggcatgagccacagtgcccagccttcttttttatttttttaagacgggcttattctgctgctcagactggggcttagtggcaccatttcacctcactgtagcctcgacttcccggattcaagcaatcctcctgcctgagtctctcaaatagcccagactataggtgcacaccaccatgccagctaacttttgtgtttttaggagagacggggtttccccatgttggcctggctagtctcaaactcctgagctcaagcagtctaccagccttggcctcccgaagtgctgagattacaggcatgagtcaccagcctagccctgtattatgttttctgaacttttttttttttaatcacccagtattaatcttcaacctcttggcaggtaagaatttagagatctatttggaataatctttaaagtaacaataataactacagtcaaaagcagtaagattagtgggccaggtgccgtggctcacacctgtaatcccagcacttcgggagaccaaggcaggtggatcacctgaggtcaggagttcaagtttagcatggccaatatggcgaaaccctgtctctactaaaaatacagaaatttgccagaggtcttggtttgcgcctgtaatctcagctacttggaaggcggaggcaggataatcacttgaacccgggaggttgcagtgaccccagataatgccaccccactccagcctgggcgacagagcgtcactgtctcaaaaataaacaaaaataataggagattaggcaaaaaggatagtacaaggctctctgtttaacatttcttcctttctctagaaaattttcctttcttttcccaaaaggaggtgtgtgttacttccaatgctatattttagtagctttaccatattttagtttttaaaattcattattttgatttctcagctttcattttcatttcagtttgtacctgaaggagagaagcatggattgaatttgcctgggttttccgaatttcataatataaatttaaaactcagaagtgggaggaatacaggccttgattagtgaatttcaagctcagttctcggggtgaaggacaaggttaattctactctgagtaattctaccgttcagaaaacctggtgtgtctacaggaaaaaatacaggctgtgactacaaacctaaaagtaaaggcaaacaactgccagacagaggcaggaaagtgggggagagcccttggtaaatattgcatgcctcctggggcccccatgggctttgactcaagggggagatgaagggaatttgttaaagaaagaagtcactgggacagacaaaagcttccggcacaggaagttagttcgactaaggataccgaaatgtaggaatttgaatgggttcctgggtgtgaggttgaagtgaaacttgattgaaaagaagctgctggtggtgagtctctccttaagctattcctggcttctgggtagttggtgtaaactctgtggtccttgaataaagtgtgcttgagaa

SEQ ID NO: 157776 - DNA, 870 bp, Homo sapiens
  Payload ID: 10919
  Gene Symbol: NANOG
  Gene Name: Nanog homeobox
  Uniprot ID: Q9H9S0
  ENST ID: ENST00000526286
  CDS Start-End: 1-870
atgagtgtggatccagcttgtccccaaagcttgccttgctttgaagcatccgactgtaaagaatcttcacctatgcctgtgatttgtgggcctgaagaaaactatccatccttgcaaatgtcttctgctgagatgcctcacacggagactgtctctcctcttccttcctccatggatctgcttattcaggacagccctgattcttccaccagtcccaaaggcaaacaacccacttctgcagagaagagtgtcgcaaaaaaggaagacaaggtcccggtcaagaaacagaagaccagaactgtgttctcttccacccagctgtgtgtactcaatgatagatttcagagacagaaatacctcagcctccagcagatgcaagaactctccaacatcctgaacctcagctacaaacaggtgaagacctggttccagaaccagagaatgaaatctaagaggtggcagaaaaacaactggccgaagaatagcaatggtgtgacgcagggatgcctggtgaacccgactgggaaccttccaatgtggagcaaccagacctggaacaattcaacctggagcaaccagacccagaacatccagtcctggagcaaccactcctggaacactcagacctggtgcacccaatcctggaacaatcaggcctggaacagtcccttctataactgtggagaggaatctctgcagtcctgcatgcagttccagccaaattctcctgccagtgacttggaggctgccttggaagctgctggggaaggccttaatgtaatacagcagaccactaggtattttagtactccacaaaccatggatttattcctaaactactccatgaacatgcaacctgaagacgtgtga

SEQ ID NO: 157777 - DNA, 836 bp, Homo sapiens
  Payload ID: 10919
  Gene Symbol: NANOG
  Gene Name: Nanog homeobox
  ENST ID: ENST00000541267
  CDS Start-End: 278-836
aaagcttctggtacctgccctttggagagctgcgggcaagctcagcctcgaaacacacacacccacacgagatgggcacggagtagtcttgaaagacatgacaaatcaccagacctgggaagaagctaaagagccagagggaaaaagccagaagtcgactacctgggaggagggatagacaagaaaccaaactaaaggaaactaaggtagtgtggatccagcttgtccccaaagcttgccttgctttgaagcatccgactgtaaagaatcttcacctatgcctgtgatttgtgggcctgaagaaaactatccatccttgcaaatgtcttctgctgagatgcctcacacggagactgtctctcctcttccttcctccatggatctgcttattcaggacagccctgattcttccaccagtcccaaaggcaaacaacccacttctgcagagaagagtgtcgcaaaaaaggaagacaaggtcccggtcaagaaacagaagaccagaactgtgttctcttccacccagctgtgtgtactcaatgatagatttcagagacagaaatacctcagcctccagcagatgcaagaactctccaacatcctgaacctcagctacaaacaggtgaagacctggttccagaaccagagaatgaaatctaagaggtggcagaaaaacaactggccgaagaatagcaatggtgtgacgcagaaggcctcagcacctacctaccccagcctttactcttcctaccaccagggatgcctggtgaacccgactgggaaccttccaatgtggagcaaccagacctggaacaattcaacctggagcaaccagaccc

SEQ ID NO: 157778 - DNA, 870 bp, Homo sapiens
  Payload ID: 10920
  Gene Symbol: NANOGP8
  Gene Name: Nanog homeobox pseudogene 8
  ENST ID: ENST00000629403
  CDS Start-End: 1-870
atgagtgtggatccagcttgtccccaaagcttgccttgctttgaagaatccgactgtaaagaatcttcacctatgcctgtgatttgtgggcctgaagaaaactatccatccttgcaaatgtcttctgctgagatgcctcacacagagactgtctctcctcttccttcctccatggatctgcttattcaggacagccctgattcttccaccagtcccaaaggcaaacaacccacttctgcagagaatagtgtcgcaaaaaaggaagacaaggtcccggtcaagaaacagaagaccagaactgtgttctcttccacccagctgtgtgtactcaatgatagatttcagagacagaaatacctcagcctccagcagatgcaagaactctccaacatcctgaacctcagctacaaacaggtgaagacctggttccagaaccagagaatgaaatctaagaggtggcagaaaaacaactggccgaagaatagcaatggtgtgacgcagggatgcctggtgaacccgactgggaaccttccaatgtggagcaaccagacctggaacaattcaacctggagcaaccagacccagaacatccagtcctggagcaaccactcctggaacactcagacctggtgcacccaatcctggaacaatcaggcctggaacagtcccttctataactgtggagaggaatctctgcagtcctgcatgcacttccagccaaattctcctgccagtgacttggaggctgccttggaagctgctggggaaggccttaatgtaatacagcagaccactaggtattttagtactccacaaaccatggatttattcctaaactactccatgaacatgcaacctgaagacgtgtga

SEQ ID NO: 157779 - DNA, 918 bp, Homo sapiens
  Payload ID: 10920
  Gene Symbol: NANOGP8
  Gene Name: Nanog homeobox pseudogene 8
  ENST ID: ENST00000528386
  CDS Start-End: 1-918
atgagtgtggatccagcttgtccccaaagcttgccttgctttgaagaatccgactgtaaagaatcttcacctatgcctgtgatttgtgggcctgaagaaaactatccatccttgcaaatgtcttctgctgagatgcctcacacagagactgtctctcctcttccttcctccatggatctgcttattcaggacagccctgattcttccaccagtcccaaaggcaaacaacccacttctgcagagaatagtgtcgcaaaaaaggaagacaaggtcccggtcaagaaacagaagaccagaactgtgttctcttccacccagctgtgtgtactcaatgatagatttcagagacagaaatacctcagcctccagcagatgcaagaactctccaacatcctgaacctcagctacaaacaggtgaagacctggttccagaaccagagaatgaaatctaagaggtggcagaaaaacaactggccgaagaatagcaatggtgtgacgcagaaggcctcagcacctacctaccccagcctctactcttcctaccaccagggatgcctggtgaacccgactgggaaccttccaatgtggagcaaccagacctggaacaattcaacctggagcaaccagacccagaacatccagtcctggagcaaccactcctggaacactcagacctggtgcacccaatcctggaacaatcaggcctggaacagtcccttctataactgtggagaggaatctctgcagtcctgcatgcacttccagccaaattctcctgccagtgacttggaggctgccttggaagctgctggggaaggccttaatgtaatacagcagaccactaggtattttagtactccacaaaccatggatttattcctaaactactccatgaacatgcaacctgaagacgtgtga

SEQ ID NO: 157780 - DNA, 907 bp, Homo sapiens
  Payload ID: 10921
  Gene Symbol: NANOGNB
  Gene Name: NANOG neighbor homeobox
  Uniprot ID: Q7Z5D8
  ENST ID: ENST00000382119
  CDS Start-End: 71-637
atctaccttatctggtcggtcatctctgtaacctccctaccaaggactaattggtctttaaaactcctcaatgcaccgggcgcggtggctcacgcctgtaatcccagcactttgggaggccgaggcgggcagatcacgaggtcaggaaatcgagaccatcttggctaacaagaaacaatcagctatgccttgggatcaagatccagaacaatcaactggaaattacagtgaagatgaacaaaatggaaagcagaaatggagagaagaaggagaagcaggcagaaagagagaacgagaaaaagaagaaaaaaacgaaaaggagctgcaagatgaacaggaaaacaaaaggaaaagggaaaatgagaaacagaaacagtatcccgagaaaagattagtcagcaaatccctcatgcatactctctgggcaaagtttaagttaaacaggtgccccactatacaagagagtctatcactgtcatttgaatttgacatgacacataaacagataagtcaatggttttgtaaaacgaggaagaaatataataaagaaatgtccaagagaaagcataagaaaaaacatatgagatggagatctctgtgttgccaaggctggtctcgaactcctgccctcaagtgatcttcctattttggcctccagaaatgctgtgattacaagcatgagccatcgcactggctaagacattttacatgacaccattctcaccaataaatggagttctgaaaggataaacaagaaaacattaacagtcgttgattccgtggagtagaactaaatgaggggtatgcaaaggagtttttatgtgttttatttttaccctactgtagatttaaagtttttataatggatgttaattgattttatttaagaaaaaaaatcgagtcaagg

SEQ ID NO: 157781 - DNA, 1108 bp, Homo sapiens
  Payload ID: 10922
  Gene Symbol: NANOS1
  Gene Name: nanos homolog 1 (Drosophila)
  ENST ID: ENST00000340087
  CDS Start-End: 1-255
cccgagctgcaggtgtgcgtgttctgccggaacaacaaggaggcgatggcgctctacaccacccatatcctcaagggccccgacgggcgagtgctgtgtcccgtgctgcgccgctacacgtgtcccctgtgcggcgccagcggcgacaacgcgcacaccatcaagtactgcccgctctccaaagtgccgccgccgcccgcccgcccgccgccccgcagcgccagggacggcccgcctggcaagaagctgcgctgaaggcccgggctcccggccgcccagggtcgccgccgcccctcgcaccgctaggtctgcgcaccatctcgcccccgccgtggggaggcgtgcggctcagcggtcggctcgacatgggacgtcgtcctggtggtttttgaaaagcagccgaccgtgtggagtacttccgtgctgaacgattgggactagacgctgaaatccccatttgtcttcagtttctagtttgcacatccagaacggcgaaggctgggtgtgtattccactaactgaaatatggcaacttagaggcgctgtttatttactgtatacgtcgacctattttagatgcgcatcagtatgaaattgtctcaatcttggatgtttcattttatgaatggaggcactttactaggtctagaatatttttttaaaagcctctgaactgagcttaaaactggcgattttatgaaatgtcggcaaaatgactattttattgtttgaagcgagttaatattctcagttgtctttaaaaatcagttactctaattccaggtgaagcaagccgctggtagcatcacccttatgagaagtgaaggttttgtaaactttccagtattaatttgggcgggtattccccgcttgtggcttgtttctgtcctagctggaggtgtaaaatgcacaatgtgtagcaggtagaatacagctccttatcgttctatgtaccaggtattttattactgaactagcaactagccttttccacctttaaaagttgtgccaagtcataatcatattgtgtataacttggaaatggtgctgtttaaaaaaattgtgtatttatacagtaacagtatgaattcattaatctcacctgtaa

SEQ ID NO: 157782 - DNA, 4017 bp, Homo sapiens
  Payload ID: 10922
  Gene Symbol: NANOS1
  Gene Name: nanos homolog 1 (Drosophila)
  Uniprot ID: Q8WY41
  ENST ID: ENST00000425699
  CDS Start-End: 87-965
ggcaggccggcgggcaggctcggcgtgtcccttccgtccggcccgcgccggcggcggggaggcggcgcgcggcccgcagcccgcccatggaggctttcccctgggcgccccgctcgccccgccgcggccgcgcccccccgcccatggcgctcgtgcccagcgcccgctacgtgagcgccccgggcccggcgcacccgcagcccttcagctcctggaacgactacctggggctcgccacgctcatcaccaaagcggtggacggcgagccgcgcttcggctgcgcccgcggtgggaacggcggcggcggctccccgccctcctcctcctcgtcgtcctgctgctccccccacacgggggccgggcctggggcgctggggccggcgctggggccgcccgactacgacgaggacgacgacgacgacagcgacgagccggggtcccggggccgctacctggggagcgcgctggaattgcgcgcgctggagctgtgcgcgggccccgccgaggccgggctgctggaggagcgcttcgccgagctgagcccgttcgcgggtcgtgccgccgccgtgctgctgggctgcgcgcccgccgccgccgccgccgccaccaccaccagcgaggcgacgccgcgcgaggagcgggccccggcgtgggcggccgagccccggctgcacgcggcctccggggcggcggccgcccggctgctgaagcccgagctgcaggtgtgcgtgttctgccggaacaacaaggaggcgatggcgctctacaccacccatatcctcaagggccccgacgggcgagtgctgtgtcccgtgctgcgccgctacacgtgtcccctgtgcggcgccagcggcgacaacgcgcacaccatcaagtactgcccgctctccaaagtgccgccgccgcccgcccgcccgccgccccgcagcgccagggacggcccgcctggcaagaagctgcgctgaaggcccgggctcccggccgcccagggtcgccgccgcccctcgcaccgctaggtctgcgcaccatctcgcccccgccgtggggaggcgtgcggctcagcggtcggctcgacatgggacgtcgtcctggtggtttttgaaaagcagccgaccgtgtggagtacttccgtgctgaacgattgggactagacgctgaaatccccatttgtcttcagtttctagtttgcacatccagaacggcgaaggctgggtgtgtattccactaactgaaatatggcaacttagaggcgctgtttatttactgtatacgtcgacctattttagatgcgcatcagtatgaaattgtctcaatcttggatgtttcattttatgaatggaggcactttactaggtctagaatatttttttaaaagcctctgaactgagcttaaaactggcgattttatgaaatgtcggcaaaatgactattttattgtttgaagcgagttaatattctcagttgtctttaaaaatcagttactctaattccaggtgaagcaagccgctggtagcatcacccttatgagaagtgaaggttttgtaaactttccagtattaatttgggcgggtattccccgcttgtggcttgtttctgtcctagctggaggtgtaaaatgcacaatgtgtagcaggtagaatacagctccttatcgttctatgtaccaggtattttattactgaactagcaactagccttttccacctttaaaagttgtgccaagtcataatcatattgtgtataacttggaaatggtgctgtttaaaaaaattgtgtatttatacagtaacagtatgaattcattaatctcacctgtaactttcctacttggcattttctctacacactcaccctcttccagttctttaaaaacgtttatgatattaagatcaaagggaggaagggaagacagcagtattaattcaccctagattactcaatttcagggttcctagtggaggaaagcccattccagctgttgcctgtcaaacaaatagaagatggatctctagctctgagctattcgtgtattaactcgtattcaagaaggttccaccgtgggctgcgtctgactttaatacaggcagtgctcaaactagaataagcactaattaaaggaattgttgggggtccttcatgtgttcccactcctactggaagacccatgtcggtttccggaaccccaccagtttacccataagcaagactaaacctgatccttgggcaaaagttcctaacccctactttaccctcccaccctcacttttaaatccaccatactgaatgccacactatggaatgcagctacctgccaagcaaggcaatagaaggcaaaaaatggaagtgaattaagatgaactcatctgaaatacacaaatgcattactatctgaagataccagcaagagtttagtctacgtgtataaggctcccagtaggatttagctaggctactagaagttagactgctttcgcattaaacagctaacttcatccacagcaaattgactcaatcaggaaccttcatttgaaggtgtgttagaggatggggtaaatacccgatagctgtctttttggtgaaagaaaaggtgcatttcaagaacttggggggcaggaggaaagcacaatgtttcttagccaggaaagacaaataatccaacgctgctagtcttaaccccagaccagagagaactgcagatctgactgggcctaaattaagtagcttaatgaaaccatgtaattacttgttctcctttcttttgctatagaaaatctaccagtttaaatgagcttcaccttctgggtgaagtttctaaggtcaacatgaatcctcttacctctctcactgctcgtgttctgccttttcaaaaggaccactatgaacagatcagcgcattctctaggccaaaagggctagccaggtggcaagatcaatttagctactttgtattttcagagtcaaattacagacggtttccaaaggtcttgagcatggggctttggcatagcctcaatatatgggagtcactgtgatgagatgtgcctaatgttaatttgatattctgacattgctattttaccagaactaagaacatattgagctggagcttcttgagggcaggagagtattggaaaaggaatccagaagaccctctccactactcaggcagccactattcatctatttttaaagtaccccattttcaggccgggtgtggtggctcatgcctgtaatcccagcactttgggaggcgaggcgggggtggatcacaaggtcaggagaccagcctggccaacatggcgaagccccgtctctactaaaaatacaaaaattagccgggtggtgtggtgggcgcctgtaatcccagctcctcaggaggctgaggcaggagaattgcttgaaaccaggaggcggaggttgcagtgagcccagatcacgccactgcactccagcctgagcaacagagcgactctgtctccaaaaaagaaaaaaagtaccccatgttcagcccctgtgccaaatttgcctaggttttccagctgacaatgaatactgggagttaaaacgcagagtattactatagttaattttctagggttctcttatgaaaagtatatgtaaacacattcatttaaaaatccttggaactcaatgtggaactttaaacattttgcaaaattacatttagagaaacccaatttttcaaagtttaagaaatatacaaagtatgacaaaattatcttcataagaacatgctgcatacttgcctagtagcaaaacaatacagggaagagtcaaaagggcttctccaactgtagaggtacagattgtcttaacctgttcttttctgtacagacttaaaatttctagtggcttttatttttctttgtattttaattttcctacaaagtcctttttggaagttgcagaattattagctttgatgagaacaacttttgtcatagatttgatttattaaaccaaaattatacatattaaaattatatcacaaatata

SEQ ID NO: 157783 - DNA, 1657 bp, Homo sapiens
  Payload ID: 10923
  Gene Symbol: NANOS2
  Gene Name: nanos homolog 2 (Drosophila)
  Uniprot ID: P60321
  ENST ID: ENST00000341294
  CDS Start-End: 178-594
ggcagggagtgagccctttaaatcctaagctccacctttacttagaagagtctctgggcgttataaaaggggatgcagctcccttctgctctgggaaacgcctgctgctcttgcccttgcccacgggcccccagccccagcccctctcctgtggcccaccacccctgctttggtgccatgcagctgccacccttcgacatgtggaaggactacttcaacctgagccaggtggtgtgggcgctgatcgcaagtcggggtcaaaggctggagacccaagagattgaggagccaagtcccgggcctccgctggggcaggatcaggggctgggggcgccaggggccaacgggggcctggggaccctgtgcaacttctgcaagcacaacggggagtcccgccacgtctactcctcacaccagctgaagacaccggatggcgtggtggtgtgtcccatcctgaggcactacgtgtgtcccgtgtgcggggccaccggtgaccaggcccatacgctcaagtactgcccgcttaacggtggccagcagtccctctaccgccgcagcgggcgcaactcggccggacgcagggtcaagcgctgagcatcgtgagatgctcaccacccgcacccctgaccctcctggtccatcccacccaagtccctaaactctctcttccagtcacccagccctttggaatttctggcccccagaactccaccctggctggatcctgaaacagtggaggctgctgggagccaggccagccccgcccccttggacctgtcagccctcggagctctggcctgtgggcgttggcctgagggtccttggtgccgcgggaacccttcctgcacggccctgtagcgccctctgggccccggttcatggatcttttgtcctcgtggggcctgctggtgactggagccctgccccttcgacttctctgttccttgtggagttcttggatttttgaacctccaggattccacggtgctgtcccaagccagcccttaggagatactgaacaaggctggctgagaagtgcctactcaagaacttcaagatgggatgtcgacttaagaccagccttctccatcttcagcctcctgcagaaccacggtgtcatcgtggaccacgcctgttcattccttccctgacctcagtacccatccgtcaggagcggagtaggactctggagagcaccgtatcactggagggcaccgtgtcttcgcaggctcacctgtggatggagagccgtggggtgagctgacacctttcaatgccccctggttgttcttccccttgttcagcccattgcacccggtacctgcccccatccccaaatcaccgatgggtcctttcccccagcgagaagcatatctctcgaccacctcccgtccgaccccccaaatcgtgatagttgactaaaggacatttttttttcctcctgtgtttttcaacctccaacgttcaagtcaaggaaccgccgataagaagggggtttgagtacccggatgggaatggcaatggcctagcttttattttaggggcaaagagaagaagggcccccgtcagattttaagttgttcagtttttggcacagggtcgggaccctgagtattgagctctggtgaataaaaaggttttctagtcgtctttgaaa

SEQ ID NO: 157784 - DNA, 581 bp, Homo sapiens
  Payload ID: 10924
  Gene Symbol: NANOS3
  Gene Name: nanos homolog 3 (Drosophila)
  Uniprot ID: P60323
  ENST ID: ENST00000339133
  CDS Start-End: 3-581
ctatggggacctttgacctgtggacagattacctgggtttggcacacctggttagggctctgagtgggaaagagggtcctgaaaccaggctgagcccccagccagagccagagccaatgctggagccggtgtcagccctggagccgatgccagcgccggagtcggtgccagtgccgggacccaaggatcagaagcgcagcctggagtcctcgccagctcccgaacgcctgtgctctttctgcaaacacaacggcgagtcccgggccatctaccagtcccacgtgctgaaggacgaggctggcagggtgctgtgtcccatcctgcgggactacgtgtgtccccagtgcggcgccacacgtgagcgcgcccacacccgacgcttctgcccacttactggccagggctacacctccgtctacagccacaccacccgaaactcggcaggcaagaagctggtccggcctgacaaggcgaagacacaggacacaggccaccgccgaggaggaggaggaggagcaggtttcagaggtgccgggaagtctgagccttcgccctcctgctctccctccatgtccacctag

SEQ ID NO: 157785 - DNA, 769 bp, Homo sapiens
  Payload ID: 10924
  Gene Symbol: NANOS3
  Gene Name: nanos homolog 3 (Drosophila)
  Uniprot ID: P60323
  ENST ID: ENST00000397555
  CDS Start-End: 1-522
atggggacctttgacctgtggacagattacctgggtttggcacacctggttagggctctgagtgggaaagagggtcctgaaaccaggctgagcccccagccagagccagagccaatgctggagccggatcagaagcgcagcctggagtcctcgccagctcccgaacgcctgtgctctttctgcaaacacaacggcgagtcccgggccatctaccagtcccacgtgctgaaggacgaggctggcagggtgctgtgtcccatcctgcgggactacgtgtgtccccagtgcggcgccacacgtgagcgcgcccacacccgacgcttctgcccacttactggccagggctacacctccgtctacagccacaccacccgaaactcggcaggcaagaagctggtccggcctgacaaggcgaagacacaggacacaggccaccgccgaggaggaggaggaggagcaggtttcagaggtgccgggaagtctgagccttcgccctcctgctctccctccatgtccacctaggaggctgcctacacctgggcaagggcacccgggctcggctggatttccaggaagacccaccctatgacgactgcccccactcccagaccctccccccagcctgggattgagccctggggatgacccggggttggcaagggaagagctgaaatcgccctgtccttggggaccccaccctttgtgccatctgccgtttccctagtgctgggcatccagtcagccctcaataaatgcttatgaatggatc

SEQ ID NO: 157786 - DNA, 1548 bp, Homo sapiens
  Payload ID: 10925
  Gene Symbol: NAPSA
  Gene Name: napsin A aspartic peptidase
  Uniprot ID: O96009
  ENST ID: ENST00000253719
  CDS Start-End: 210-1472
caggagcacaggatgctacttctgccaaccctacaaaaatactctgcacaaatcttcaaaaaacatccttgtcccactgcgtcacctgcggacagatttcatgtcctggtctccttctaaacctggaggtggggcatgaacagggtggagtcacaggggaaagaaaatgaggccccaggacacctgggttcacacccaggtccccagcgatgtctccaccaccgctgctgcaacccctgctgctgctgctgcctctgctgaatgtggagccttccggggccacactgatccgcatccctcttcatcgagtccaacctggacgcaggatcctgaacctactgaggggatggagagaaccagcagagctccccaagttgggggccccatcccctggggacaagcccatcttcgtacctctctcgaactacagggatgtgcagtattttggggaaattgggctgggaacgcctccacaaaacttcactgttgcctttgacactggctcctccaatctctgggtcccgtccaggagatgccacttcttcagtgtgccctgctggttacaccaccgatttgatcccaaagcctctagctccttccaggccaatgggaccaagtttgccattcaatatggaactgggcgggtagatggaatcctgagcgaggacaagctgactattggtggaatcaagggtgcatcagtgattttcggggaggctctctgggagcccagcctggtcttcgcttttgcccattttgatgggatattgggcctcggttttcccattctgtctgtggaaggagttcggcccccgatggatgtactggtggagcaggggctattggataagcctgtcttctccttttacctcaacagggaccctgaagagcctgatggaggagagctggtcctggggggctcggacccggcacactacatcccacccctcaccttcgtgccagtcacggtccctgcctactggcagatccacatggagcgtgtgaaggtgggcccagggctgactctctgtgccaagggctgtgctgccatcctggatacgggcacgtccctcatcacaggacccactgaggagatccgggccctgcatgcagccattgggggaatccccttgctggctggggagtacatcatcctgtgctcggaaatcccaaagctccccgcagtctccttccttcttgggggggtctggtttaacctcacggcccatgattacgtcatccagactactcgaaatggcgtccgcctctgcttgtccggtttccaggccctggatgtccctccgcctgcagggcccttctggatcctcggtgacgtcttcttggggacgtatgtggccgtcttcgaccgcggggacatgaagagcagcgcccgggtgggcctggcgcgcgctcgcactcgcggagcggacctcggatggggagagactgcgcaggcgcagttccccgggtgacgcccaagtgaagcgcatgcgcagcgggtggtcgcggaggtcctgctacccagtaaaaatccactatttccattga

SEQ ID NO: 157787 - DNA, 810 bp, Homo sapiens
  Payload ID: 10925
  Gene Symbol: NAPSA
  Gene Name: napsin A aspartic peptidase
  ENST ID: ENST00000598915
  CDS Start-End: 5-810
agcgatgtctccaccaccgctgctgcaacccctgctgctgctgctgcctctgctgaatgtggagccttccggggccacactgatccgcatccctcttcatcgagtccaacctggacgcaggatcctgaacctactgaggggatggagagaaccagcagagctccccaagttgggggccccatcccctggggacaagcccatcttcgtacctctctcgaactacagggatgtgcagtattttggggaaattgggctgggaacgcctccacaaaacttcactgttgcctttgacactggctcctccaatctctgggtcccgtccaggagatgccacttcttcagtgtgccctgctcctctagctccttccaggccaatgggaccaagtttgccattcaatatggaactgggcgggtagatggaatcctgagcgaggacaagctgactattggtggaatcaagggtgcatcagtgattttcggggaggctctctgggagcccagcctggtcttcgcttttgcccattttgatgggatattgggcctcggttttcccattctgtctgtggaaggagttcggcccccgatggatgtactggtggagcaggggctattggataagcctgtcttctccttttacctcaacagggaccctgaagagcctgatggaggagagctggtcctggggggctcggacccggcacactacatcccacccctcaccttcgtgccagtcacggtccctgcctactggcagatccacatggagcgtgtgaaggtgggcccagggctgactctctgtgccaagggctg

SEQ ID NO: 157788 - DNA, 867 bp, Homo sapiens
  Payload ID: 10925
  Gene Symbol: NAPSA
  Gene Name: napsin A aspartic peptidase
  ENST ID: ENST00000599233
  CDS Start-End: 210-524
caggagcacaggatgctacttctgccaaccctacaaaaatactctgcacaaatcttcaaaaaacatccttgtcccactgcgtcacctgcggacagatttcatgtcctggtctccttctaaacctggaggtggggcatgaacagggtggagtcacaggggaaagaaaatgaggccccaggacacctgggttcacacccaggtccccagcgatgtctccaccaccgctgctgcaacccctgctgctgctgctgcctctgctgaatgtggagccttccggggccacactgatccgcatccctcttcatcgagtccaacctggacgcaggatcctgaacctactgaggggatggagagaaccagcagagctccccaagttgggggccccatcccctggggacaagcccatcttcgtacctctctcgaactacagggatggttacaccaccgatttgatcccaaagcctctagctccttccaggccaatgggaccaagtttgccattcaatatggaactgggcgggtagatggaatcctgagcgaggacaagctgactattggtggaatcaagggtgcatcagtgattttcggggaggctctctgggagcccagcctggtcttcgcttttgcccattttgatgggatattgggcctcggttttcccattctgtctgtggaaggagttcggcccccgatggatgtactggtggagcaggggctattggataagcctgtcttctccttttacctcaacagggaccctgaagagcctgatggaggagagctggtcctggggggctcggacccggcacactacatcccacccctcaccttcgtgccagtcacggtccctgcctactggcagatcca

SEQ ID NO: 157789 - DNA, 3691 bp, Homo sapiens
  Payload ID: 10926
  Gene Symbol: NRD1
  Gene Name: nardilysin (N-arginine dibasic convertase)
  Uniprot ID: O43847
  ENST ID: ENST00000352171
  CDS Start-End: 191-3646
agtagcgtcatcggcggccgggagggcggagggacgagggaagtcggcgagagggagactgggttgggggaggggttcaggcctgttccccgcggctgcggcagcaccagggccggccgccaccgcctctagaacgcggaggaggtgggtcctgggaagcgggatgtccatcgctccagcttggtggtgaatgctgaggagagtcactgttgctgcagtctgtgccacccggaggaagttgtgtgaggccgggcgggagctcgcggcgctctggggaatcgaaacgcggggtcggtgcgaagactctgctgctgccagaccctttcctattctggccatgcctggaaggaacaaggcgaagtctacctgcagctgccctgacctgcagcccaatggacaggatctgggcgagaacagccgggttgcccgtctaggagcggatgaatctgaggaagagggacggagggggtctctcagtaatgctggggaccctgagatcgtcaagtctcccagcgaccccaagcaataccgatacatcaaattacagaatggcttgcaggcacttctgatttcagacctaagtaatatggaaggtaaaacaggaaatacaacagatgatgaagaagaagaggaggtggaggaagaagaagaagatgatgatgaagattctggagctgaaatagaagatgacgatgaagagggttttgatgatgaagatgagtttgatgatgaacatgatgatgatcttgatactgaggataatgaattggaagaattagaagagagagcagaagctagaaaaaaaactactgaaaaacagtctgcagcggctctttgtgttggagttgggagtttcgctgatccagatgacctgccggggctggcacactttttggagcacatggtattcatgggtagtttgaaatatccagatgagaatggatttgatgccttcctgaagaagcatgggggtagtgataatgcctcaactgattgtgaacgcactgtctttcagtttgatgtccagaggaagtacttcaaggaagctcttgatagatgggcgcagttcttcatccacccactaatgatcagagatgcaattgaccgtgaagttgaagctgttgatagtgaatatcaacttgcaaggccttctgatgcaaacagaaaggaaatgttgtttggaagccttgctagacctggacatcctatgggaaaatttttttggggaaatgctgagacgctcaagcatgagccaagaaagaataatattgatacacatgctagattgagagaattctggatgcgttactactcttctcattacatgactttagtggttcaatccaaagaaacactggatactttggaaaagtgggtgactgaaatcttctctcagataccaaacaatgggttacccagaccaaactttggccatttaacggatccatttgacacaccagcatttaacaaactttatagagttgttccaatcagaaaaattcatgctctgaccatcacatgggcacttcctcctcaacagcaacattacagggtgaagccacttcattatatatcctggctggttggacatgaaggcaaaggcagcattctttctttccttaggaaaaaatgctgggctcttgcactgtttggtggaaatggtgagacaggatttgagcaaaattctacttattcagtgttcagcatttctattacattgactgatgagggttatgaacatttttatgaggttgcttacactgtctttcagtatttaaaaatgctgcagaagctaggcccagaaaaaagaatttttgaagagattcggaaaattgaggataatgaatttcattaccaagaacagacagatccagttgagtatgtggaaaacatgtgtgagaacatgcagctgtacccattgcaggacattctcactggagatcagcttctttttgaatacaagccagaagtcattggtgaagccttgaatcagctagttcctcaaaaagcaaatcttgttttactgtctggtgctaatgagggaaaatgtgacctcaaggagaaatggtttggaactcaatatagtatagaagatattgaaaactcttgggctgaactgtggaatagtaatttcgaattaaatccagatcttcatcttccagctgaaaacaagtacatagccacggactttacgttgaaggctttcgattgcccggaaacagaatacccagttaaaattgtgaatactccacaaggttgcctgtggtataagaaagacaacaaattcaaaatccccaaagcatatatacgtttccatctaatttcaccgttgatacagaaatctgcagcaaatgtggtcctctttgatatctttgtcaatatccttacgcataaccttgcggaaccagcttatgaagcagatgtggcacagctggagtataaactggtagctggagaacatggtttaattattcgagtgaaaggatttaaccacaaactacctctactgtttcagctcattattgactacttagctgagttcaattccacaccagctgtctttacaatgataactgagcagttgaagaagacctactttaacatcctcatcaagcccgagactttggccaaagatgtacggcttttaatcttggaatatgcccgttggtctatgattgacaagtaccaggctttgatggacggcctttcccttgagtctctgctgagcttcgtcaaagaattcaaatcccagctctttgtggagggcctggtacaagggaatgtcacaagcacagaatctatggatttcctgaaatatgttgttgacaaactaaacttcaagcctctggagcaggagatgcctgtgcagttccaggtggtagagctgcccagtggccaccatctatgcaaagtgaaagctctgaacaagggtgatgccaactctgaagtcactgtgtactaccagtcaggtaccaggagtctaagagaatatacgcttatggagctgcttgtgatgcacatggaagaaccttgttttgacttccttcgaaccaagcagacccttgggtaccatgtctaccctacctgtaggaacacatccgggattctaggattttctgtcactgtggggactcaggcaaccaaatacaattctgaagttgttgataagaagatagaagagtttctttctagctttgaggagaagattgagaacctcactgaagaggcattcaacacccaggtcacagctctcatcaagctgaaggagtgtgaggatacccaccttggggaggaggtggataggaactggaatgaagtggttacacagcagtacctctttgaccgccttgcccacgagattgaagcactgaagtcattctcaaaatcagacctggtcaactggttcaaggcccatagagggccaggaagtaaaatgctcagcgttcatgttgttggatatgggaagtatgaactggaagaggatggtaccccttctagtgaggattcaaattcttcttgtgaagtgatgcagctgacctacctgccaacctctcctctgctggcagattgtatcatccccattactgatatcagggctttcacaacaacactcaaccttctcccctaccataaaatagtcaaataaataaactgcagtcacgttggcctgaagcaatgtgtattttaaaat

SEQ ID NO: 157790 - DNA, 3895 bp, Homo sapiens
  Payload ID: 10926
  Gene Symbol: NRD1
  Gene Name: nardilysin (N-arginine dibasic convertase)
  ENST ID: ENST00000354831
  CDS Start-End: 191-3850
agtagcgtcatcggcggccgggagggcggagggacgagggaagtcggcgagagggagactgggttgggggaggggttcaggcctgttccccgcggctgcggcagcaccagggccggccgccaccgcctctagaacgcggaggaggtgggtcctgggaagcgggatgtccatcgctccagcttggtggtgaatgctgaggagagtcactgttgctgcagtctgtgccacccggaggaagttgtgtgaggccgggcgggagctcgcggcgctctggggaatcgaaacgcggggtcggtgcgaagactctgctgctgccagaccctttcctattctggccatgcctggaaggaacaaggcgaagtctacctgcagctgccctgacctgcagcccaatggacaggatctgggcgagaacagccgggttgcccgtctaggagcggatgaatctgaggaagagggacggagggggtctctcagtaatgctggggaccctgagatcgtcaagtctcccagcgaccccaagcaataccgatacatcaaattacagaatggcttgcaggcacttctgatttcagacctaagtaatatggaaggtaaaacaggaaatacaacagatgatgaagaagaagaggaggtggaggaagaagaagaagatgatgatgaagattctggagctgaaatagaagatgacgatgaagagggttttgatgatgaagatgagtttgatgatgaacatgatgatgatcttgatactgaggataatgaattggaagaattagaagagagagcagaagctagaaaaaaaactactgaaaaacagcaattgcagagcctgtttttgctgtggtcaaagctgactgatagactgtggtttaagtcaacttattcaaaaatgtcttcaaccctgctggtcgagacaagaaatctttatggggtagttggagctgaaagcaggtctgcacctgttcagcatttggcaggatggcaagcggaggagcagcagggtgaaactgacacagttctgtctgcagcggctctttgtgttggagttgggagtttcgctgatccagatgacctgccggggctggcacactttttggagcacatggtattcatgggtagtttgaaatatccagatgagaatggatttgatgccttcctgaagaagcatgggggtagtgataatgcctcaactgattgtgaacgcactgtctttcagtttgatgtccagaggaagtacttcaaggaagctcttgatagatgggcgcagttcttcatccacccactaatgatcagagatgcaattgaccgtgaagttgaagctgttgatagtgaatatcaacttgcaaggccttctgatgcaaacagaaaggaaatgttgtttggaagccttgctagacctggacatcctatgggaaaatttttttggggaaatgctgagacgctcaagcatgagccaagaaagaataatattgatacacatgctagattgagagaattctggatgcgttactactcttctcattacatgactttagtggttcaatccaaagaaacactggatactttggaaaagtgggtgactgaaatcttctctcagataccaaacaatgggttacccagaccaaactttggccatttaacggatccatttgacacaccagcatttaacaaactttatagagttgttccaatcagaaaaattcatgctctgaccatcacatgggcacttcctcctcaacagcaacattacagggtgaagccacttcattatatatcctggctggttggacatgaaggcaaaggcagcattctttctttccttaggaaaaaatgctgggctcttgcactgtttggtggaaatggtgagacaggatttgagcaaaattctacttattcagtgttcagcatttctattacattgactgatgagggttatgaacatttttatgaggttgcttacactgtctttcagtatttaaaaatgctgcagaagctaggcccagaaaaaagaatttttgaagagattcggaaaattgaggataatgaatttcattaccaagaacagacagatccagttgagtatgtggaaaacatgtgtgagaacatgcagctgtacccattgcaggacattctcactggagatcagcttctttttgaatacaagccagaagtcattggtgaagccttgaatcagctagttcctcaaaaagcaaatcttgttttactgtctggtgctaatgagggaaaatgtgacctcaaggagaaatggtttggaactcaatatagtatagaagatattgaaaactcttgggctgaactgtggaatagtaatttcgaattaaatccagatcttcatcttccagctgaaaacaagtacatagccacggactttacgttgaaggctttcgattgcccggaaacagaatacccagttaaaattgtgaatactccacaaggttgcctgtggtataagaaagacaacaaattcaaaatccccaaagcatatatacgtttccatctaatttcaccgttgatacagaaatctgcagcaaatgtggtcctctttgatatctttgtcaatatccttacgcataaccttgcggaaccagcttatgaagcagatgtggcacagctggagtataaactggtagctggagaacatggtttaattattcgagtgaaaggatttaaccacaaactacctctactgtttcagctcattattgactacttagctgagttcaattccacaccagctgtctttacaatgataactgagcagttgaagaagacctactttaacatcctcatcaagcccgagactttggccaaagatgtacggcttttaatcttggaatatgcccgttggtctatgattgacaagtaccaggctttgatggacggcctttcccttgagtctctgctgagcttcgtcaaagaattcaaatcccagctctttgtggagggcctggtacaagggaatgtcacaagcacagaatctatggatttcctgaaatatgttgttgacaaactaaacttcaagcctctggagcaggagatgcctgtgcagttccaggtggtagagctgcccagtggccaccatctatgcaaagtgaaagctctgaacaagggtgatgccaactctgaagtcactgtgtactaccagtcaggtaccaggagtctaagagaatatacgcttatggagctgcttgtgatgcacatggaagaaccttgttttgacttccttcgaaccaagcagacccttgggtaccatgtctaccctacctgtaggaacacatccgggattctaggattttctgtcactgtggggactcaggcaaccaaatacaattctgaagttgttgataagaagatagaagagtttctttctagctttgaggagaagattgagaacctcactgaagaggcattcaacacccaggtcacagctctcatcaagctgaaggagtgtgaggatacccaccttggggaggaggtggataggaactggaatgaagtggttacacagcagtacctctttgaccgccttgcccacgagattgaagcactgaagtcattctcaaaatcagacctggtcaactggttcaaggcccatagagggccaggaagtaaaatgctcagcgttcatgttgttggatatgggaagtatgaactggaagaggatggtaccccttctagtgaggattcaaattcttcttgtgaagtgatgcagctgacctacctgccaacctctcctctgctggcagattgtatcatccccattactgatatcagggctttcacaacaacactcaaccttctcccctaccataaaatagtcaaataaataaactgcagtcacgttggcctgaagcaatgtgtattttaaaat

SEQ ID NO: 157791 - DNA, 1660 bp, Homo sapiens
  Payload ID: 10926
  Gene Symbol: NRD1
  Gene Name: nardilysin (N-arginine dibasic convertase)
  ENST ID: ENST00000440943
  CDS Start-End: 1-1615
gaaaattgaggataatgaatttcattaccaagaacagacagatccagttgagtatgtggaaaacatgtgtgagaacatgcagctgtacccattgcaggacattctcactggagatcagcttctttttgaatacaagccagaagtcattggtgaagccttgaatcagctagttcctcaaaaagcaaatcttgttttactgtctggtgctaatgagggaaaatgtgacctcaaggagaaatggtttggaactcaatatagtatagaagatattgaaaactcttgggctgaactgtggaatagtaatttcgaattaaatccagatcttcatcttccagctgaaaacaagtacatagcatatatacgtttccatctaatttcaccgttgatacagaaatctgcagcaaatgtggtcctctttgatatctttgtcaatatccttacgcataaccttgcggaaccagcttatgaagcagatgtggcacagctggagtataaactggtagctggagaacatggtttaattattcgagtgaaaggatttaaccacaaactacctctactgtttcagctcattattgactacttagctgagttcaattccacaccagctgtctttacaatgataactgagcagttgaagaagacctactttaacatcctcatcaagcccgagactttggccaaagatgtacggcttttaatcttggaatatgcccgttggtctatgattgacaagtaccaggctttgatggacggcctttcccttgagtctctgctgagcttcgtcaaagaattcaaatcccagctctttgtggagggcctggtacaagggaatgtcacaagcacagaatctatggatttcctgaaatatgttgttgacaaactaaacttcaagcctctggagcaggagatgcctgtgcagttccaggtggtagagctgcccagtggccaccatctatgcaaagtgaaagctctgaacaagggtgatgccaactctgaagtcactgtgtactaccagtcaggtaccaggagtctaagagaatatacgcttatggagctgcttgtgatgcacatggaagaaccttgttttgacttccttcgaaccaagcagacccttggttctgaagttgttgataagaagatagaagagtttctttctagctttgaggagaagattgagaacctcactgaagaggcattcaacacccaggtcacagctctcatcaagctgaaggagtgtgaggatacccaccttggggaggaggtggataggaactggaatgaagtggttacacagcagtacctctttgaccgccttgcccacgagattgaagcactgaagtcattctcaaaatcagacctggtcaactggttcaaggcccatagagggccaggaagtaaaatgctcagcgttcatgttgttggatatgggaagtatgaactggaagaggatggtaccccttctagtgaggattcaaattcttcttgtgaagtgatgcagctgacctacctgccaacctctcctctgctggcagattgtatcatccccattactgatatcagggctttcacaacaacactcaaccttctcccctaccataaaatagtcaaataaataaactgcagtcacgttggcctgaagcaatgtgtattttaaaat

SEQ ID NO: 157792 - DNA, 3819 bp, Homo sapiens
  Payload ID: 10926
  Gene Symbol: NRD1
  Gene Name: nardilysin (N-arginine dibasic convertase)
  ENST ID: ENST00000544028
  CDS Start-End: 323-3172
actttgggtttcgaaatgttcgctggctgttccgagaatcagtccgggtcacgttggtgcctctcctttcctgttctgattggttgcttacgtgagcgtgactactttcttgcctcatgattggctgaaatcagtagcgtcatcggcggccgggagggcggagggacgagggaagtcggcgagagggagactgggttgggggaggggttcaggcctgttccccgcggctgcggcagcaccagggccggccgccaccgcctctagaacgcggaggaggtgggtcctgggaagcgggatgtccatcgctccagcttggtggtgaatgctgaggagagtcactgttgctgcagtctgtgccacccggaggaagttgtgtgaggccgggcgggagctcgcggcgctctggggaatcgaaacgcggggtcggtgcgaagactctgctgctgccagaccctttcctattctggccatgcctggaaggaacaaggcgaagtctacctgcagctgccctgacctgcagcccaatggacaggatctgggcgagaacagccgggttgcccgtctaggagcggatgaatctgaggaagagggacggagggggtctctcagtaatgctggggaccctgagatcgtcaagtctcccagcgaccccaagcaataccgatacatcaaattacagaatggcttgcaggcacttctgatttcagacctaagtaatatggaaggtaaaacaggaaatacaacagatgatgaagaagaagaggaggtggaggaagaagaagaagatgatgatgaagattctggagctgaaatagaagatgacgatgaagagggttttgatgatgaagatgagtttgatgatgaacatgatgatgatcttgatactgaggataatgaattggaagaattagaagagagagcagaagctagaaaaaaaactactgaaaaacagtctgcagcggctctttgtgttggagttgggagtttcgctgatccagatgacctgccggggctggcacactttttggagcacatggtattcatgggtagtttgaaatatccagatgagaatggatttgatgccttcctgaagaagcatgggggtagtgataatgcctcaactgattgtgaacgcactgtctttcagtttgatgtccagaggaagtacttcaaggaagctcttgatagatgggcgcagttcttcatccacccactaatgatcagagatgcaattgaccgtgaagttgaagctgttgatagtgaatatcaacttgcaaggccttctgatgcaaacagaaaggaaatgttgtttggaagccttgctagacctggacatcctatgggaaaatttttttggggaaatgctgagacgctcaagcatgagccaagaaagaataatattgatacacatgctagattgagagaattctggatgcgttactactcttctcattacatgactttagtggttcaatccaaagaaacactggatactttggaaaagtgggtgactgaaatcttctctcagataccaaacaatgggttacccagaccaaactttggccatttaacggatccatttgacacaccagcatttaacaaactttatagagttgttccaatcagaaaaattcatgctctgaccatcacatgggcacttcctcctcaacagcaacattacagggtgaagccacttcattatatatcctggctggttggacatgaaggcaaaggcagcattctttctttccttaggaaaaaatgctgggctcttgcactgtttggtggaaatggtgagacaggatttgagcaaaattctacttattcagtgttcagcatttctattacattgactgatgagggttatgaacatttttatgaggttgcttacactgtctttcagtatttaaaaatgctgcagaagctaggcccagaaaaaagaatttttgaagagattcggaaaattgaggataatgaatttcattaccaagaacagacagatccagttgagtatgtggaaaacatgtgtgagaacatgcagctgtacccattgcaggacattctcactggagatcagcttctttttgaatacaagccagaagtcattggtgaagccttgaatcagctagttcctcaaaaagcaaatcttgttttactgtctggtgctaatgagggaaaatgtgacctcaaggagaaatggtttggaactcaatatagtatagaagatattgaaaactcttgggctgaactgtggaatagtaatttcgaattaaatccagatcttcatcttccagctgaaaacaagtacatagccacggactttacgttgaaggctttcgattgcccggaaacagaatacccagttaaaattgtgaatactccacaaggttgcctgtggtataagaaagacaacaaattcaaaatccccaaagcatatatacgtttccatctaatttcaccgttgatacagaaatctgcagcaaatgtggtcctctttgatatctttgtcaatatccttacgcataaccttgcggaaccagcttatgaagcagatgtggcacagctggagtataaactggtagctggagaacatggtttaattattcgagtgaaaggatttaaccacaaactacctctactgtttcagctcattattgactacttagctgagttcaattccacaccagctgtctttacaatgataactgagcagttgaagaagacctactttaacatcctcatcaagcccgagactttggccaaagatgtacggcttttaatcttggaatatgcccgttggtctatgattgacaagtaccaggctttgatggacggcctttcccttgagtctctgctgagcttcgtcaaagaattcaaatcccagctctttgtggagggcctggtacaagggaatgtcacaagcacagaatctatggatttcctgaaatatgttgttgacaaactaaacttcaagcctctggagcaggagatgcctgtgcagttccaggtggtagagctgcccagtggccaccatctatgcaaagtgaaagctctgaacaagggtgatgccaactctgaagtcactgtgtactaccaggtcaggtaccaggagtctaagagaatatacgcttatggagctgcttgtgatgcacatggaagaaccttgttttgacttccttcgaaccaagcagacccttgggtaccatgtctaccctacctgtaggaacacatccgggattctaggattttctgtcactgtggggactcaggcaaccaaatacaattctgaagttgttgataagaagatagaagagtttctttctagctttgaggagaagattgagaacctcactgaagaggcattcaacacccaggtcacagctctcatcaagctgaaggagtgtgaggatacccaccttggggaggaggtggataggaactggaatgaagtggttacacagcagtacctctttgaccgccttgcccacgagattgaagcactgaagtcattctcaaaatcagacctggtcaactggttcaaggcccatagagggccaggaagtaaaatgctcagcgttcatgttgttggatatgggaagtatgaactggaagaggatggtaccccttctagtgaggattcaaattcttcttgtgaagtgatgcagctgacctacctgccaacctctcctctgctggcagattgtatcatccccattactgatatcagggctttcacaacaacactcaaccttctcccctaccataaaatagtcaaataaataaactgcagtcacgttggcctgaagcaatgtgtatttt

SEQ ID NO: 157793 - DNA, 3417 bp, Homo sapiens
  Payload ID: 10926
  Gene Symbol: NRD1
  Gene Name: nardilysin (N-arginine dibasic convertase)
  ENST ID: ENST00000539524
  CDS Start-End: 114-3377
tttgaatacagtcgctaaagcaagaatgaaggtttctttgaggaacgcagcctgaatgatacatcaaattacagaatggcttgcaggcacttctgatttcagacctaagtaatatggaaggtaaaacaggaaatacaacagatgatgaagaagaagaggaggtggaggaagaagaagaagatgatgatgaagattctggagctgaaatagaagatgacgatgaagagggttttgatgatgaagatgagtttgatgatgaacatgatgatgatcttgatactgaggataatgaattggaagaattagaagagagagcagaagctagaaaaaaaactactgaaaaacagcaattgcagagcctgtttttgctgtggtcaaagctgactgatagactgtggtttaagtcaacttattcaaaaatgtcttcaaccctgctggtcgagacaagaaatctttatggggtagttggagctgaaagcaggtctgcacctgttcagcatttggcaggatggcaagcggaggagcagcagggtgaaactgacacagttctgtctgcagcggctctttgtgttggagttgggagtttcgctgatccagatgacctgccggggctggcacactttttggagcacatggtattcatgggtagtttgaaatatccagatgagaatggatttgatgccttcctgaagaagcatgggggtagtgataatgcctcaactgattgtgaacgcactgtctttcagtttgatgtccagaggaagtacttcaaggaagctcttgatagatgggcgcagttcttcatccacccactaatgatcagagatgcaattgaccgtgaagttgaagctgttgatagtgaatatcaacttgcaaggccttctgatgcaaacagaaaggaaatgttgtttggaagccttgctagacctggacatcctatgggaaaatttttttggggaaatgctgagacgctcaagcatgagccaagaaagaataatattgatacacatgctagattgagagaattctggatgcgttactactcttctcattacatgactttagtggttcaatccaaagaaacactggatactttggaaaagtgggtgactgaaatcttctctcagataccaaacaatgggttacccagaccaaactttggccatttaacggatccatttgacacaccagcatttaacaaactttatagagttgttccaatcagaaaaattcatgctctgaccatcacatgggcacttcctcctcaacagcaacattacagggtgaagccacttcattatatatcctggctggttggacatgaaggcaaaggcagcattctttctttccttaggaaaaaatgctgggctcttgcactgtttggtggaaatggtgagacaggatttgagcaaaattctacttattcagtgttcagcatttctattacattgactgatgagggttatgaacatttttatgaggttgcttacactgtctttcagtatttaaaaatgctgcagaagctaggcccagaaaaaagaatttttgaagagattcggaaaattgaggataatgaatttcattaccaagaacagacagatccagttgagtatgtggaaaacatgtgtgagaacatgcagctgtacccattgcaggacattctcactggagatcagcttctttttgaatacaagccagaagtcattggtgaagccttgaatcagctagttcctcaaaaagcaaatcttgttttactgtctggtgctaatgagggaaaatgtgacctcaaggagaaatggtttggaactcaatatagtatagaagatattgaaaactcttgggctgaactgtggaatagtaatttcgaattaaatccagatcttcatcttccagctgaaaacaagtacatagccacggactttacgttgaaggctttcgattgcccggaaacagaatacccagttaaaattgtgaatactccacaaggttgcctgtggtataagaaagacaacaaattcaaaatccccaaagcatatatacgtttccatctaatttcaccgttgatacagaaatctgcagcaaatgtggtcctctttgatatctttgtcaatatccttacgcataaccttgcggaaccagcttatgaagcagatgtggcacagctggagtataaactggtagctggagaacatggtttaattattcgagtgaaaggatttaaccacaaactacctctactgtttcagctcattattgactacttagctgagttcaattccacaccagctgtctttacaatgataactgagcagttgaagaagacctactttaacatcctcatcaagcccgagactttggccaaagatgtacggcttttaatcttggaatatgcccgttggtctatgattgacaagtaccaggctttgatggacggcctttcccttgagtctctgctgagcttcgtcaaagaattcaaatcccagctctttgtggagggcctggtacaagggaatgtcacaagcacagaatctatggatttcctgaaatatgttgttgacaaactaaacttcaagcctctggagcaggagatgcctgtgcagttccaggtggtagagctgcccagtggccaccatctatgcaaagtgaaagctctgaacaagggtgatgccaactctgaagtcactgtgtactaccagtcaggtaccaggagtctaagagaatatacgcttatggagctgcttgtgatgcacatggaagaaccttgttttgacttccttcgaaccaagcagacccttgggtaccatgtctaccctacctgtaggaacacatccgggattctaggattttctgtcactgtggggactcaggcaaccaaatacaattctgaagttgttgataagaagatagaagagtttctttctagctttgaggagaagattgagaacctcactgaagaggcattcaacacccaggtcacagctctcatcaagctgaaggagtgtgaggatacccaccttggggaggaggtggataggaactggaatgaagtggttacacagcagtacctctttgaccgccttgcccacgagattgaagcactgaagtcattctcaaaatcagacctggtcaactggttcaaggcccatagagggccaggaagtaaaatgctcagcgttcatgttgttggatatgggaagtatgaactggaagaggatggtaccccttctagtgaggattcaaattcttcttgtgaagtgatgcagctgacctacctgccaacctctcctctgctggcagattgtatcatccccattactgatatcagggctttcacaacaacactcaaccttctcccctaccataaaatagtcaaataaataaactgcagtcacgttggcctgaagcaatgtgtatttt

SEQ ID NO: 157794 - DNA, 3574 bp, Homo sapiens
  Payload ID: 10926
  Gene Symbol: NRD1
  Gene Name: nardilysin (N-arginine dibasic convertase)
  ENST ID: ENST00000615102
  CDS Start-End: 96-3542
ctgcggcagcaccagggccggccgccaccgcctctagaacgcggaggaggtgggtcctgggaagcgggatgtccatcgctccagcttggtggtgaatgctgaggagagtcactgttgctgcagtctgtgccacccggaggaagttgtgtgaggccgggcgggagctcgcggcgctctggggaatcgaaacgcggggtcggtgcgaagactctgctgctgccagaccctttcctattctggccatgcctggaaggaacaaggcgaagtctacctgcagctgccctgacctgcagcccaatggacaggatctgggcgagaacagccgggttgcccgtctaggagcggatgaatctgaggaagagggacggagggggtctctcagtaatgctggggaccctgagatcgtcaagtctcccagcgaccccaagcaataccgatacatcaaattacagaatggcttgcaggcacttctgatttcagacctaagtaatatggaaggtaaaacaggaaatacaacagatgatgaagaagaagaggaggtggaggaagaagaagaagatgatgatgaagattctggagctgaaatagaagatgacgatgaagagggttttgatgatgaagatgagtttgatgatgaacatgatgatgatcttgatactgaggataatgaattggaagaattagaagagagagcagaagctagaaaaaaaactactgaaaaacagtctgcagcggctctttgtgttggagttgggagtttcgctgatccagatgacctgccggggctggcacactttttggagcacatggtattcatgggtagtttgaaatatccagatgagaatggatttgatgccttcctgaagaagcatgggggtagtgataatgcctcaactgattgtgaacgcactgtctttcagtttgatgtccagaggaagtacttcaaggaagctcttgatagatgggcgcagttcttcatccacccactaatgatcagagatgcaattgaccgtgaagttgaagctgttgatagtgaatatcaacttgcaaggccttctgatgcaaacagaaaggaaatgttgtttggaagccttgctagacctggacatcctatgggaaaatttttttggggaaatgctgagacgctcaagcatgagccaagaaagaataatattgatacacatgctagattgagagaattctggatgcgttactactcttctcattacatgactttagtggttcaatccaaagaaacactggatactttggaaaagtgggtgactgaaatcttctctcagataccaaacaatgggttacccagaccaaactttggccatttaacggatccatttgacacaccagcatttaacaaactttatagagttgttccaatcagaaaaattcatgctctgaccatcacatgggcacttcctcctcaacagcaacattacagggtgaagccacttcattatatatcctggctggttggacatgaaggcaaaggcagcattctttctttccttaggaaaaaatgctgggctcttgcactgtttggtggaaatggtgagacaggatttgagcaaaattctacttattcagtgttcagcatttctattacattgactgatgagggttatgaacatttttatgaggttgcttacactgtctttcagtatttaaaaatgctgcagaagctaggcccagaaaaaagaatttttgaagagattcggaaaattgaggataatgaatttcattaccaagaacagacagatccagttgagtatgtggaaaacatgtgtgagaacatgcagctgtacccattgcaggacattctcactggagatcagcttctttttgaatacaagccagaagtcattggtgaagccttgaatcagctagttcctcaaaaagcaaatcttgttttactgtctggtgctaatgagggaaaatgtgacctcaaggagaaatggtttggaactcaatatagtatagaagatattgaaaactcttgggctgaactgtggaatagtaatttcgaattaaatccagatcttcatcttccagctgaaaacaagtacatagccacggactttacgttgaaggctttcgattgcccggaaacagaatacccagttaaaattgtgaatactccacaaggttgcctgtggtataagaaagacaacaaattcaaaatccccaaagcatatatacgtttccatctaatttcaccgttgatacagaaatctgcagcaaatgtggtcctctttgatatctttgtcaatatccttacgcataaccttgcggaaccagcttatgaagcagatgtggcacagctggagtataaactggtagctggagaacatggtttaattattcgagtgaaaggatttaaccacaaactacctctactgtttcagctcattattgactacttagctgagttcaattccacaccagctgtctttacaatgataactgagcagttgaagaagacctactttaacatcctcatcaagcccgagactttggccaaagatgtacggcttttaatcttggaatatgcccgttggtctatgattgacaagtaccaggctttgatggacggcctttcccttgagtctctgctgagcttcgtcaaagaattcaaatcccagctctttgtggagggcctggtacaagggaatgtcacaagcacagaatctatggatttcctgaaatatgttgttgacaaactaaacttcaagcctctggagcaggagatgcctgtgcagttccaggtggtagagctgcccagtggccaccatctatgcaaagtgaaagctctgaacaagggtgatgccaactctgaagtcactgtgtactaccagtcaggtaccaggagtctaagagaatatacgcttatggagctgcttgtgatgcacatggaagaaccttgttttgacttccttcgaaccaagcagacccttgggtaccatgtctaccctacctgtaggaacacatccgggattctaggattttctgtcactgtggggactcaggcaaccaaatacaattctgaagttgttgataagaagatagaagagtttctttctagctttgaggagaagattgagaacctcactgaagaggcattcaacacccaggtcacagctctcatcaagctgaaggagtgtgaggatacccaccttggggaggaggtggataggaactggaatgaagtggttacacagcagtacctctttgaccgccttgcccacgagattgaagcactgaagtcattctcaaaatcagacctggtcaactggttcaaggcccatagagggccaggaagtaaaatgctcagcgttcatgttgttggatatgggaagtatgaactggaagaggatggtaccccttctagtgaggattcaaattcttcttgtgaagtgatgcagctgacctacctgccaacctctcctctgctggcaattgtatcatccccattactgatatcagggctttcacaacaacactcaaccttctcccctaccataaaatagtcaaataaataaactgcagtcacgttggcctg

SEQ ID NO: 157795 - DNA, 2690 bp, Homo sapiens
  Payload ID: 10927
  Gene Symbol: NACA
  Gene Name: nascent polypeptide-associated complex alpha subunit
  Uniprot ID: Q13765
  ENST ID: ENST00000356769
  CDS Start-End: 1938-2585
tcccagctactctggaggctgagacgagaatcgcttgaacccgggaggccgaggttgcagtaagccgagatcgcgccactgcactccagcctgggcgacagagcgagactccgcctcaaaaaataaataaatgttgactggtttagctaattcaggtacagcaaatatttgttgagttcttttgtagggctgtgggaagatatgggaggcttttcattaacacaacactgattttacattctacttttcaaaaatacagttgtacaaagcatggtttaaggtggggtcccagacacctagaataaataagcttagaatatccaagaagtgccaggggcggtagttcacgcctgtaatcccagcactttgggaggccgaggcaggcggatcacctgaagtcaggaggagaccagcctggccaacatggagaaagcccgtctctactaaaaatacaaaaaatagactggcgtggtggcgcatgcctgtaatcccagctacccgggaggctgaggcaggagaatcgcttgacccgggaaggggaggttgcagtgagccgagatcgtgcctttgcaccccagcctgggcaataaaagtgagactgtcccaaaaacaaaacaaacaggctgggcatggtggctcacgcctgtaatcccagtagtttgggaggccgaggcaggcggattacctgaggtcaggagttcaagaccagcctggccaacatggtgaaacccgtctctactaaaaataaaaaattagccgggggtggtggcacacacctgtaatcccagctactcgggaggctgaggcgggacaactgcttgagccctggaggcggagattgcagtgagccgagatcgtgccactgcactctagcctggccgacagagcgactcaaaaaaaaaaaaaaaaaaatccaagaagtgcccaaaatagcaagcaaaggaattgtatatgtgcctatgttctttttttctgggaaggagaatctgcagctttataatttcaacatcggctaaattgtcgtgaacctaaaacaatcaaaagggccggaatctatttaaagagtttattcaagggcagtgtgaggatggaccaaccagaaaacctccaaagaatggagtcagccttcagaagtagagaagttacgatttcatttatttagggagacagaggagtttttagctggattacgttatccatacaaggttggaacataattacagaatttggttacaagaagtgttttttttggggggggggcgggggtacagctaacattgttttacgaagagtttaacacgcatgagttgctgtcatctggtgacatcgtttgagtctctctagtcattgaacagaacaagaaaaatcgaattaaatttataatctgaactgaagttatatgtgacccatcacatctctcaagttttaaaatgggtttttttgttgttgttgatggggggggagagggtccagcagcttttaaatgttttcacatcgtgtgttccaaaaataactggttagcctaagtcacttccaccctccaatgttgtgaatgcagtctctagcattcgctatttaatgtcttcttcctgcactatttgagaaatcgcgaggtcgacttaataccgcagtcgccacttcgcggaccggagggcggagtctgcttagttctgaggactgcgtgggtccgcgcagagagctcctgctaggcctgcgcgtcccgttctaaattcttaccctttagtccttgtcaccacccccgccgtgggaacggcctgacagtcactcgtcaaaggaagtggctgccggcagctcttgacccggaatcggatcctagtcccaccccctccgctccaggcttccttctgcaacaggcgtgggtcacgctctcgctcggtctttctgccgccatcttggttccgcgttccctgcacaaaatgcccggcgaagccacagaaaccgtccctgctacagagcaggagttgccgcagccccaggctgagacagggtctggaacagaatctgacagtgatgaatcagtaccagagcttgaagaacaggattccacccaggcaaccacacaacaagcccagctggcggcagcagctgaaattgatgaagaaccagtcagtaaagcaaaacagagtcggagtgaaaagaaggcacggaaggctatgtccaaactgggtcttcggcaggttacaggagttactagagtcactatccggaaatctaagaatatcctctttgtcatcacaaaaccagatgtctacaagagccctgcttcagatacttacatagtttttggggaagccaagatcgaagatttatcccagcaagcacaactagcagctgctgagaaattcaaagttcaaggtgaagctgtctcaaacattcaagaaaacacacagactccaactgtacaagaggagagtgaagaggaagaggtcgatgaaacaggtgtagaagttaaggacattgaattggtcatgtcacaagcaaatgtgtcgagagcaaaggcagtccgagccctgaagaacaacagtaatgatattgtaaatgcgattatggaattaacaatgtaaccatatggaagcaactttttttggtgtctcaaaggagtaactgcagcttggtttgaaatttgtactgtttctatcataaataaagttatggcttcttgttggatg

SEQ ID NO: 157796 - DNA, 1059 bp, Homo sapiens
  Payload ID: 10927
  Gene Symbol: NACA
  Gene Name: nascent polypeptide-associated complex alpha subunit
  Uniprot ID: Q13765
  ENST ID: ENST00000393891
  CDS Start-End: 309-956
gcacagtaagtactttctgtgccgctactgtctatccgcagccatccgcctttctttcgggctaagccgccccggggactgagagttaaggagagttggaggctttactgggccacagggttcctactcgcccctgggcctccggacaaaatggggtctgcggttggtgtcctggcaaaagcagggtagaagggctgcggggcgggcccagaatccgagcctgcagagatgggagcagttgcagtgttgagggcggaagaggagtgcgtcttgttttgggaactgcttcacaggatccagaaaaggaaatgcccggcgaagccacagaaaccgtccctgctacagagcaggagttgccgcagccccaggctgagacagggtctggaacagaatctgacagtgatgaatcagtaccagagcttgaagaacaggattccacccaggcaaccacacaacaagcccagctggcggcagcagctgaaattgatgaagaaccagtcagtaaagcaaaacagagtcggagtgaaaagaaggcacggaaggctatgtccaaactgggtcttcggcaggttacaggagttactagagtcactatccggaaatctaagaatatcctctttgtcatcacaaaaccagatgtctacaagagccctgcttcagatacttacatagtttttggggaagccaagatcgaagatttatcccagcaagcacaactagcagctgctgagaaattcaaagttcaaggtgaagctgtctcaaacattcaagaaaacacacagactccaactgtacaagaggagagtgaagaggaagaggtcgatgaaacaggtgtagaagttaaggacattgaattggtcatgtcacaagcaaatgtgtcgagagcaaaggcagtccgagccctgaagaacaacagtaatgatattgtaaatgcgattatggaattaacaatgtaaccatatggaagcaactttttttggtgtctcaaaggagtaactgcagcttggtttgaaatttgtactgtttctatcataaataaagttatggcttcttgttgga

SEQ ID NO: 157797 - DNA, 6629 bp, Homo sapiens
  Payload ID: 10927
  Gene Symbol: NACA
  Gene Name: nascent polypeptide-associated complex alpha subunit
  Uniprot ID: E9PAV3
  ENST ID: ENST00000454682
  CDS Start-End: 283-6519
ggagtctgcttagttctgaggactgcgtgggtccgcgcagagagctcctgctaggcctgcgcgtcccgttctaaattcttaccctttagtccttgtcaccacccccgccgtgggaacggcctgacagtcactcgtcaaaggaagtggctgccggcagctcttgacccggaatcggatcctagtcccaccccctccgctccaggcttccttctgcaacaggcgtgggtcacgctctcgctcggtctttctgccgccatcttggttccgcgttccctgcacaaaatgcccggcgaagccacagaaaccgtccctgctacagagcaggagttgccgcagccccaggctgagacagctgtgctacctatgtcttcagccttgagtgtcactgctgccttagggcagcctggacctaccctcccccctccttgctctcctgccccacaacagtgccctctctcagctgctaaccaggcttccccattcccttccccctctactattgcctcgacccctttagaagttccttttccccagtcatcctctggaacagccctacctttgggaactgcccctgaagccccaaccttcctaccaaacctaatagggcctcccatctccccagctgccttagctctagcctctcccatgatagctccaactctgaaagggaccccttcctcttcagctcccttagctctggttgccctggctccccactcagttcagaagagttctgcttttccacctaaccttcttacttcacctccttcagtggctgtagctgagtcagggtcagtgataactctgtcagctcccattgctccctcagaaccaaagactaatcttaataaagttccctctgaggtagtccctaatccaaaaggcacccccagccctccatgtatagtcagtactgttccttaccactgtgtgactcccatggcctctattcaatctggagtggcctcccttcctcagacaacacccacaactaccctagccatcgcttcccctcaagtcaaagataccaccatttcctcagttctgatttctccacaaaacccaggaagcctcagcctgaaggggcctgttagtccacctgctgccttatctctttcaactcagtctcttcctgtggtgacctcttctcaaaagactgcgggtcccaacacccccccagattttcccatttctctgggctctcatcttgcacctttacatcagagttcttttggttctgtccaacttttaggtcaaacaggtcctagtgctttgtcagaccctacagtgaagaccatttctgtagatcattcttccacaggggcctcttatccttctcagagatctgtaattcctccccttccttccagaaatgaggtagttcctgctactgtggctgcctttccagtggtggctccatctgttgacaaaggtccctctaccatctctagcataacctgcagcccttctggctccttaaatgtagctacctctttttcattatctcctacaacctctctcattctcaaaagctctcctaatgccacttatcattatcctttagtggcccaaatgcccgtttcttctgttggaaccaccccacttgtggtgactaacccctgtacaattgctgcagcacctactactacctttgaggtagctacttgtgtttctcctccaatgtcatcaggtcccataagtaacatagaaccaacttcccctgctgccttggttatggcacctgtggctcccaaagagccttctactcaagtagcaaccactctgaggataccagtctctcctcctctgccagaccctgaagacctcaaaaatctccccagttcagtattggttaaatttccaacacaaaaagacctccaaactgtacctgcctctcttgaaggagcccctttctctccagcccaagcaggactcaccaccaagaaagaccctactgtattaccgttagtccaggcagcccctaaaaattccccttctttccaaagtacatcctcttctccagagatacctctttctcctgaagccaccctagcaaagaaaagccttggggagcctctccctataggtaagccagccagcagtatgacctcccctctgggtgttaactcctcggcctctgtaatcaagacagattcttatgcaggcccagactctgctggtccgcttctcaaaagttctctcattaccccaacagtggctgcatttcctttggaaagtgctgaccctgccggggtggctcccacaactgccaaaggtacctcaacttatacaactacagccagcccttttctagaaggaactgtctctttagctcctaaaaaccacccagttaaggaaggtactcttactactttacccttggttcctacagcttcagaaaattgccctgtggctccatccccccagaatacctgtgctcctctggctaccttagtgctggcccctgaaatcccaaagtctgtgccctcaccctctcttcccccagctgggactcctccaggtacaaaaaaggttgatggtatttctcatacttcagcattggcacctgttgcttcctctcccaaagagtgcccaactgaggactctggtgcttctgctactgcatcttccaaaggaactctgacttacctagctgattccccatctcctttaggggttagtgtgtctcctcagactaaaagacctccaaccaagaagggttctgctggccctgatactcctattggaaatctctcatcccctgtttctccagttgaagcttcatttcttccagagaatagtctttctttccaaggctctaaagactcaccagccacgacgcattctcccactcctccatcccccaaaggggcccctactccctcagctgtgactcctctgtctcccaaaggagtaacactaccccccaaagagacccccactccttcagtggtgaatctgcccttccccaaagagggtccagctactccagcacccaaacaggctcctgctctatccatgacttcttcctcccccaaaaaggcccgagcaactccagcccctaaaggaatcccagcttccccatcccccaaaggggcccccacacccccagctgcaactcctccctcccctaaaggaggcccagctaccccatccccgaaatgggcccccacacccccagctgcaactcctccctccccaaaaggaggtccagctactccatcccccaaaggggcccccacacccccagctgcaactcctccctcccccaaaggaggtccagctactccatcccccaaaggggcccccacacccccagctgtgactcctccctcccccaaaggaagtccagcagctaccccattccccaaaggggcatccacacccccagctgcaactcctccctcccccaaaggaagtccagcagctaccccactccccaaaggggcccccacaaccccagctgcaactcttccctccccaaaaggaggtccagctaccccatccctcaagggggcccccactcccccagctgcgactcctccctccccaaaaggaggcccagctaccccatcccccaaaggggcccccatgcccccagctgcaactcctccctccccaaaaggaggtctagctaccccaccccacaaaggggcacccacaaccccagctgcaactcctccctccccaaaaggaggtctagctaccccacccccaaaaggggcccccacaaccccagctgcaactcctccttccccaaaaggaggtctagctaccccacccccaaaaggggcccccacaaccccagctgcaactcctccttccccaaaaggaggtctagctaccccatcccccaaaggggcccccacaaccccagctgcaactcctccctccccaaaaggaggtctagctaccccatcccccaaaggggcccccacaaccccagctgcaactcctccctccccaaaaggaggtctggctaccccatcccccaaaggggcccccacaaccccagctgcaactcctccctccccaaaaggaggcccagctaccccaccccccaaaggggcccccactcccccagctgcaactcctccctccctaaaaggaggtctagctaccccaccccacaaaggggcccccaatcccgcagttgtaactcctccctctccaaaaggaggcccagctacctcaccccccaaaggggcccccactcctccagctgcaactcctccctccccaaaaggaagcccaggtaccccaccccccaaaggggcccccactcccccagctgtaactcctccctcccctaaagggacccctactctcccagctacaactccctcctctaaaggaggcccaactactccatcctccaaagagggccccactcccccagctgcaaccccctcccacaaaggaggtcccgctatgactcctccctcccccaaaagaggaccagctatcccatctcccaaaggggaccccacttccccagcagtgattcctctctcccccaaaaaggctccagcaactccagtcaccagagaaggcgcagccaccccatccaaaggagatctcactcccccagcagtgactcctgtctccctcaaaaaggccccagcaacttcagcccccaaaggaggcccagctaccccatcctccaaaggggatcccaccctcccagcagtgactcctccttcccccaaggagcccccagcccccaaacaagttgccacttcttcctctcccaaaaaggccccagcaactccagcccccatgggggcccccactctgccagctgtgattccttcttcccccaaagaggtcccagctaccccatcctccagaagggaccccattgccccaacagcgactcttctctctaaaaagaccccagcaactctagcccccaaagaggccctcattcccccagctatgactgttccctcccctaaaaagaccccagcaattccaacccccaaagaagccccagctaccccatcctccaaagaggcctccagtcccccagcagtgactccttccacttacaaaggggccccatcccccaaagagctcctcattccaccagctgtgacttctccttcccccaaagaggcacctactcctccagctgtgactcctccatcccccgaaaagggcccagcaactccagcccccaaagggactcccacttccccacctgtgactccttcctccctcaaagactcccctacttccccagcttctgtcacatgtaaaatgggggccactgttcctcaagcatctaaagggcttccagcaaagaaaggccccacagctctgaaagaagtacttgttgccccagctccagaaagcacgccaatcatcacagctcccactcggaaaggtccacagaccaaaaagagttctgctacttcacctcctatatgcccagatccctcagctaagaatggttctaaaggacccctttccacagtggctccagcccctctactccctgttcagaaagactcttcaaagacagcaaaaggcaaagatgcttctcattccccaaagggccccttggctcctcctgagtctaaggcgtccacccctctaacagcagctgcctttgagaaggtccttcctaaacctgaatcagcatctgtctctgcagcaccctccccaccagtctctctgcctcttgctccctccccagttcccactctgcctcctaaacagcaatttctgccgtcctctcctgggctggtgttggaatcaccctctaaaccccttgcccctgctgatgaggatgagctgctgcctctgattcccccggaaccaatctctgggggagtgcctttccagtcggtcctcgtcaacatgcccacccctaaatctgctggaatccctgtcccaaccccctctgccaagcaacctgttacgaagaacaacaaggggtctggaacagaatctgacagtgatgaatcagtaccagagcttgaagaacaggattccacccaggcaaccacacaacaagcccagctggcggcagcagctgaaattgatgaagaaccagtcagtaaagcaaaacagagtcggagtgaaaagaaggcacggaaggctatgtccaaactgggtcttcggcaggttacaggagttactagagtcactatccggaaatctaagaatatcctctttgtcatcacaaaaccagatgtctacaagagccctgcttcagatacttacatagtttttggggaagccaagatcgaagatttatcccagcaagcacaactagcagctgctgagaaattcaaagttcaaggtgaagctgtctcaaacattcaagaaaacacacagactccaactgtacaagaggagagtgaagaggaagaggtcgatgaaacaggtgtagaagttaaggacattgaattggtcatgtcacaagcaaatgtgtcgagagcaaaggcagtccgagccctgaagaacaacagtaatgatattgtaaatgcgattatggaattaacaatgtaaccatatggaagcaactttttttggtgtctcaaaggagtaactgcagcttggtttgaaatttgtactgtttctatcataaataaagttatggcttcttgttggatgaattc

SEQ ID NO: 157798 - DNA, 543 bp, Homo sapiens
  Payload ID: 10927
  Gene Symbol: NACA
  Gene Name: nascent polypeptide-associated complex alpha subunit
  ENST ID: ENST00000547914
  CDS Start-End: 39-257
tttctgccgccatcttggttccgcgttccctgcacaaaatgcccggcgaagccacagaaaccgtccctgctacagagcaggagttgccgcagccccaggctgagacagggtctggaacagaatctgacagtgatgaatcagtaccagagcttgaagaacaggagttactagagtcactatccggaaatctaagaatatcctctttgtcatcacaaaaccagatgtctacaagagccctgcttcagatacttacatagtttttggggaagccaagatcgaagatttatcccagcaagcacaactagcagctgctgagaaattcaaagttcaaggtgaagctgtctcaaacattcaagaaaacacacagactccaactgtacaagaggagagtgaagaggaagaggtcgatgaaacaggtgtagaagttaaggacattgaattggtcatgtcacaagcaaatgtgtcgagagcaaaggcagtccgagccctgaagaacaacagtaatgatattgtaaatgcgattatggaattaacaatgtaacc

SEQ ID NO: 157799 - DNA, 802 bp, Homo sapiens
  Payload ID: 10927
  Gene Symbol: NACA
  Gene Name: nascent polypeptide-associated complex alpha subunit
  Uniprot ID: Q13765
  ENST ID: ENST00000546392
  CDS Start-End: 121-768
cccctccgctccaggcttccttctgcaacaggcgtgggtcacgctctcgctcggtctttctgccgccatcttggttccgcgttccctgcacagcctcctttttattcccttccttcagaaatgcccggcgaagccacagaaaccgtccctgctacagagcaggagttgccgcagccccaggctgagacagggtctggaacagaatctgacagtgatgaatcagtaccagagcttgaagaacaggattccacccaggcaaccacacaacaagcccagctggcggcagcagctgaaattgatgaagaaccagtcagtaaagcaaaacagagtcggagtgaaaagaaggcacggaaggctatgtccaaactgggtcttcggcaggttacaggagttactagagtcactatccggaaatctaagaatatcctctttgtcatcacaaaaccagatgtctacaagagccctgcttcagatacttacatagtttttggggaagccaagatcgaagatttatcccagcaagcacaactagcagctgctgagaaattcaaagttcaaggtgaagctgtctcaaacattcaagaaaacacacagactccaactgtacaagaggagagtgaagaggaagaggtcgatgaaacaggtgtagaagttaaggacattgaattggtcatgtcacaagcaaatgtgtcgagagcaaaggcagtccgagccctgaagaacaacagtaatgatattgtaaatgcgattatggaattaacaatgtaaccatatggaagcaactttttttggtgtctcaaag

SEQ ID NO: 157800 - DNA, 492 bp, Homo sapiens
  Payload ID: 10927
  Gene Symbol: NACA
  Gene Name: nascent polypeptide-associated complex alpha subunit
  ENST ID: ENST00000546862
  CDS Start-End: 279-492
cttggttccgcgttccctgcacaaaatgcccggcgaagccacagaaaccgtccctgctacagagcaggagttgccgcagccccaggctgagacagttgtttctcatcttagggtctggaacagaatctgacagtgatgaatcagtaccagagcttgaagaacaggattccacccaggcaaccacacaacaagcccagctggcggcagcagctgaaattgatgaagaaccagtcagtaaagcaaaacagagtcggagtgaaaagaaggcacggaaggctatgtccaaactgggtcttcggcaggttacaggagttactagagtcactatccggaaatctaagaatatcctctttgtcatcacaaaaccagatgtctacaagagccctgcttcagatacttacatagtttttggggaagccaagatcgaagatttatcccagcaagcacaactagcagctgctgagaaattcaaagttcaaggtgaagctgtct

SEQ ID NO: 157801 - DNA, 690 bp, Homo sapiens
  Payload ID: 10927
  Gene Symbol: NACA
  Gene Name: nascent polypeptide-associated complex alpha subunit
  ENST ID: ENST00000549259
  CDS Start-End: 97-690
gtgacaagcaagtgttggacttaaaacaccgtctttcccctcctggtaccccaaagtcggcaaacgtagtccaggaggccccagcccagccagtaaatgcccggcgaagccacagaaaccgtccctgctacagagcaggagttgccgcagccccaggctgagacagggtctggaacagaatctgacagtgatgaatcagtaccagagcttgaagaacaggattccacccaggcaaccacacaacaagcccagctggcggcagcagctgaaattgatgaagaaccagtcagtaaagcaaaacagagtcggagtgaaaagaaggcacggaaggctatgtccaaactgggtcttcggcaggttacaggagttactagagtcactatccggaaatctaagaatatcctctttgtcatcacaaaaccagatgtctacaagagccctgcttcagatacttacatagtttttggggaagccaagatcgaagatttatcccagcaagcacaactagcagctgctgagaaattcaaagttcaaggtgaagctgtctcaaacattcaagaaaacacacagactccaactgtacaagaggagagtgaagaggaagaggtcgatgaaacaggtgtagaagttaaggacattgaattggtcatgtcacaagcaaatgtgtcgagagcaaaggcagtccgagcc

SEQ ID NO: 157802 - DNA, 542 bp, Homo sapiens
  Payload ID: 10927
  Gene Symbol: NACA
  Gene Name: nascent polypeptide-associated complex alpha subunit
  ENST ID: ENST00000548084
  CDS Start-End: 312-416
cctgcacagtaagtactttctgtgccgctactgtctatccgcagccatccgcctttctttcgggctaagccgccccggggactgagagttaaggagagttggaggctttactgggccacagggttcctactcgcccctgggcctccggacaaaatggggtctgcggttggtgtcctggcaaaagcagggtagaagggctgcggggcgggcccagaatccgagcctgcagagatgggagcagttgcagtgttgagggcggaagaggagtgcgtcttgttttgggaactgcttcacaggatccagaaaaggaaatgcccggcgaagccacagaaaccgtccctgctacagagcaggagttgccgcagccccaggctgagacagttgtttctcatcttagggtctggaacagaatctgacagtgatgaatcagtaccagagcttgaagaacaggattccacccaggcaaccacacaacaagcccagctggcggcagcagctgaaattgatgaagaaccagtcagtaaagcaaaacagagtcggag

SEQ ID NO: 157803 - DNA, 299 bp, Homo sapiens
  Payload ID: 10927
  Gene Symbol: NACA
  Gene Name: nascent polypeptide-associated complex alpha subunit
  ENST ID: ENST00000546917
  CDS Start-End: 283-299
gtgggtccgcgcagagagctcctgctaggcctgcgcgtcccgttctaaattcttaccctttagtccttgtcaccacccccgccgtgggaacggcctgacagtcactcgtcaaaggaagtggctgccggcagctcttgacccggaatcggatcctagtcccaccccctccgctccaggcttccttctgcaacaggcgtgggtcacgctctcgctcggtctttctgccgccatcttggttccgcgttccctgcacagcctcctttttattcccttccttcagaaatgcccggcgaagccac

SEQ ID NO: 157804 - DNA, 827 bp, Homo sapiens
  Payload ID: 10927
  Gene Symbol: NACA
  Gene Name: nascent polypeptide-associated complex alpha subunit
  ENST ID: ENST00000548563
  CDS Start-End: 319-729
ctttctgccgccatcttggttccgcgttccctgcacagcctcctttttattcccttccttcagaaatgcccggcgaagccacagaaaccgtccctgctacagagcaggagttgccgcagccccaggctgagacagttgtttctcatcttagggtctggaacagaatctgacagtgatgaatcagtaccagagcttgaagaacaggattccacccaggcaaccacacaacaagcccagctggcggcagcagctgaaattgatgaagaaccagtcagtaaagcaaaacagagtcggagtgaaaagaaggcacggaaggctatgtccaaactgggtcttcggcaggttacaggagttactagagtcactatccggaaatctaagaatatcctctttgtcatcacaaaaccagatgtctacaagagccctgcttcagatacttacatagtttttggggaagccaagatcgaagatttatcccagcaagcacaactagcagctgctgagaaattcaaagttcaaggtgaagctgtctcaaacattcaagaaaacacacagactccaactgtacaagaggagagtgaagaggaagaggtcgatgaaacaggtgtagaagttaaggacattgaattggtcatgtcacaagcaaatgtgtcgagagcaaaggcagtccgagccctgaagaacaacagtaatgatattgtaaatgcgattatggaattaacaatgtaaccatatggaagcaactttttttggtgtctcaaaggagtaactgcagcttggtttgaaatttgtactgtttctatcataaataaagttatggcttcttg

SEQ ID NO: 157805 - DNA, 711 bp, Homo sapiens
  Payload ID: 10927
  Gene Symbol: NACA
  Gene Name: nascent polypeptide-associated complex alpha subunit
  ENST ID: ENST00000549855
  CDS Start-End: 333-711
aactatatatgtgtcttaaacctcaaagtaaattttccttgagaaataatttatgttgaaaagatttcctggccaagtgcagtggctcacacccgtaatcccagcactttgggaggccgaggcaggcggatcacctgagtccttgtcaccacccccgccgtgggaacggcctgacagtcactcgtcaaaggaagtggctgccggcagctcttgacccggaatcggatcctagtcccaccccctccgctccaggcttccttctgcaacaggcgtgggtcacgctctcgctcggtctttctgccgccatcttggttccgcgttccctgcacaaaatgcccggcgaagccacagaaaccgtccctgctacagagcaggagttgccgcagccccaggctgagacagggtctggaacagaatctgacagtgatgaatcagtaccagagcttgaagaacaggattccacccaggcaaccacacaacaagcccagctggcggcagcagctgaaattgatgaagaaccagtcagtaaagcaaaacagagtcggagtgaaaagaaggcacggaaggctatgtccaaactgggtcttcggcaggttacaggagttactagagtcactatccggaaatctaagaatatcctctttgtcatcacaaaaccagatgtctacaagagccctgcttcagatacttacatagtttttggggaagcca

SEQ ID NO: 157806 - DNA, 1074 bp, Homo sapiens
  Payload ID: 10927
  Gene Symbol: NACA
  Gene Name: nascent polypeptide-associated complex alpha subunit
  Uniprot ID: Q13765
  ENST ID: ENST00000552540
  CDS Start-End: 324-971
actttctgtgccgctactgtctatccgcagccatccgcctttctttcgggctaagccgccccggggactgagagttaaggagagttggaggctttactgggccacagggttcctactcgcccctgggcctccggacaaaatggggtctgcggttggtgtcctggcaaaagcagggtagaagggctgcggggcgggcccagaatccgagcctgcagagatgggagcagttgcagtgttgagggcggaagaggagtgcgtcttgttttgggaactgcttcacaggatccagaaaagggcctcctttttattcccttccttcagaaatgcccggcgaagccacagaaaccgtccctgctacagagcaggagttgccgcagccccaggctgagacagggtctggaacagaatctgacagtgatgaatcagtaccagagcttgaagaacaggattccacccaggcaaccacacaacaagcccagctggcggcagcagctgaaattgatgaagaaccagtcagtaaagcaaaacagagtcggagtgaaaagaaggcacggaaggctatgtccaaactgggtcttcggcaggttacaggagttactagagtcactatccggaaatctaagaatatcctctttgtcatcacaaaaccagatgtctacaagagccctgcttcagatacttacatagtttttggggaagccaagatcgaagatttatcccagcaagcacaactagcagctgctgagaaattcaaagttcaaggtgaagctgtctcaaacattcaagaaaacacacagactccaactgtacaagaggagagtgaagaggaagaggtcgatgaaacaggtgtagaagttaaggacattgaattggtcatgtcacaagcaaatgtgtcgagagcaaaggcagtccgagccctgaagaacaacagtaatgatattgtaaatgcgattatggaattaacaatgtaaccatatggaagcaactttttttggtgtctcaaaggagtaactgcagcttggtttgaaatttgtactgtttctatcataaataaagttatggcttcttgttgga

SEQ ID NO: 157807 - DNA, 2922 bp, Homo sapiens
  Payload ID: 10927
  Gene Symbol: NACA
  Gene Name: nascent polypeptide-associated complex alpha subunit
  Uniprot ID: E9PAV3
  ENST ID: ENST00000550952
  CDS Start-End: 40-2817
ctttctgccgccatcttggttccgcgttccctgcacaaaatgcccggcgaagccacagaaaccgtccctgctacagagcaggagttgccgcagccccaggctgagacagctgtgctacctatgtcttcagccttgagtgtcactgctgccttagggcagcctggacctaccctcccccctccttgctctcctgccccacaacagtgccctctctcagctgctaaccaggcttccccattcccttccccctctactattgcctcgacccctttagaagttccttttccccagtcatcctctggaacagccctacctttgggaactgcccctgaagccccaaccttcctaccaaacctaatagggcctcccatctccccagctgccttagctctagcctctcccatgatagctccaactctgaaagggaccccttcctcttcagctcccttagctctggttgccctggctccccactcagttcagaagagttctgcttttccacctaaccttcttacttcacctccttcagtggctgtagctgagtcagggtcagtgataactctgtcagctcccattgctccctcagaaccaaagactaatcttaataaagttccctctgaggtagtccctaatccaaaaggcacccccagccctccatgtatagtcagtactgttccttaccactgtgtgactcccatggcctctattcaatctggagtggcctcccttcctcagacaacacccacaactaccctagccatcgcttcccctcaagtcaaagataccaccatttcctcagttctgatttctccacaaaacccaggaagcctcagcctgaaggggcctgttagtccacctgctgccttatctctttcaactcagtctcttcctgtggtgacctcttctcaaaagactgcgggtcccaacacccccccagattttcccatttctctgggctctcatcttgcacctttacatcagagttcttttggttctgtccaacttttaggtcaaacaggtcctagtgctttgtcagaccctacagtgaagaccatttctgtagatcattcttccacaggggcctcttatccttctcagagatctgtaattcctccccttccttccagaaatgaggtagttcctgctactgtggctgcctttccagtggtggctccatctgttgacaaaggtccctctaccatctctagcataacctgcagcccttctggctccttaaatgtagctacctctttttcattatctcctacaacctctctcattctcaaaagctctcctaatgccacttatcattatcctttagtggcccaaatgcccgtttcttctgttggaaccaccccacttgtggtgactaacccctgtacaattgctgcagcacctactactacctttgaggtagctacttgtgtttctcctccaatgtcatcaggtcccataagtaacatagaaccaacttcccctgctgccttggttatggcacctgtggctcccaaagagccttctactcaagtagcaaccactctgaggataccagtctctcctcctctgccagaccctgaagacctcaaaaatctccccagttcagtattggttaaatttccaacacaaaaagacctccaaactgtacctgcctctcttgaaggagcccctttctctccagcccaagcaggactcaccaccaagaaagaccctactgtattaccgttagtccaggcagcccctaaaaattccccttctttccaaagtacatcctcttctccagagatacctctttctcctgaagccaccctagcaaagaaaagccttggggagcctctccctatagtggctgcatttcctttggaaagtgctgaccctgccggggtggctcccacaactgccaaagcagctgcctttgagaaggtccttcctaaacctgaatcagcatctgtctctgcagcaccctccccaccagtctctctgcctcttgctccctccccagttcccactctgcctcctaaacagcaatttctgccgtcctctcctgggctggtgttggaatcaccctctaaaccccttgcccctgctgatgaggatgagctgctgcctctgattcccccggaaccaatctctgggggagtgcctttccagtcggtcctcgtcaacatgcccacccctaaatctgctggaatccctgtcccaaccccctctgccaagcaacctgttacgaagaacaacaaggggtctggaacagaatctgacagtgatgaatcagtaccagagcttgaagaacaggattccacccaggcaaccacacaacaagcccagctggcggcagcagctgaaattgatgaagaaccagtcagtaaagcaaaacagagtcggagtgaaaagaaggcacggaaggctatgtccaaactgggtcttcggcaggttacaggagttactagagtcactatccggaaatctaagaatatcctctttgtcatcacaaaaccagatgtctacaagagccctgcttcagatacttacatagtttttggggaagccaagatcgaagatttatcccagcaagcacaactagcagctgctgagaaattcaaagttcaaggtgaagctgtctcaaacattcaagaaaacacacagactccaactgtacaagaggagagtgaagaggaagaggtcgatgaaacaggtgtagaagttaaggacattgaattggtcatgtcacaagcaaatgtgtcgagagcaaaggcagtccgagccctgaagaacaacagtaatgatattgtaaatgcgattatggaattaacaatgtaaccatatggaagcaactttttttggtgtctcaaaggagtaactgcagcttggtttgaaatttgtactgtttctatcataaataaagttatggcttcttgttggatg

SEQ ID NO: 157808 - DNA, 752 bp, Homo sapiens
  Payload ID: 10927
  Gene Symbol: NACA
  Gene Name: nascent polypeptide-associated complex alpha subunit
  ENST ID: ENST00000550920
  CDS Start-End: 1-642
acagtggctgcatttcctttggaaagtgctgaccctgccggggtggctcccacaactgccaaagggtctggaacagaatctgacagtgatgaatcagtaccagagcttgaagaacaggattccacccaggcaaccacacaacaagcccagctggcggcagcagctgaaattgatgaagaaccagtcagtaaagcaaaacagagtcggagtgaaaagaaggcacggaaggctatgtccaaactgggtcttcggcaggttacaggagttactagagtcactatccggaaatctaagaatatcctctttgtcatcacaaaaccagatgtctacaagagccctgcttcagatacttacatagtttttggggaagccaagatcgaagatttatcccagcaagcacaactagcagctgctgagaaattcaaagttcaaggtgaagctgtctcaaacattcaagaaaacacacagactccaactgtacaagaggagagtgaagaggaagaggtcgatgaaacaggtgtagaagttaaggacattgaattggtcatgtcacaagcaaatgtgtcgagagcaaaggcagtccgagccctgaagaacaacagtaatgatattgtaaatgcgattatggaattaacaatgtaaccatatggaagcaactttttttggtgtctcaaaggagtaactgcagcttggtttgaaatttgtactgtttctatcataaataaagttatggcttcttgttggatgaattc

SEQ ID NO: 157809 - DNA, 521 bp, Homo sapiens
  Payload ID: 10927
  Gene Symbol: NACA
  Gene Name: nascent polypeptide-associated complex alpha subunit
  ENST ID: ENST00000552055
  CDS Start-End: 78-521
ggagcagttgcagtgttgagggcggaagaggagtgcgtcttgttttgggaactgcttcacaggatccagaaaaggaaatgcccggcgaagccacagaaaccgtccctgctacagagcaggagttgccgcagccccaggctgagacagaatctgacagtgatgaatcagtaccagagcttgaagaacaggattccacccaggcaaccacacaacaagcccagctggcggcagcagctgaaattgatgaagaaccagtcagtaaagcaaaacagagtcggagtgaaaagaaggcacggaaggctatgtccaaactgggtcttcggcaggttacaggagttactagagtcactatccggaaatctaagaatatcctctttgtcatcacaaaaccagatgtctacaagagccctgcttcagatacttacatagtttttggggaagccaagatcgaagatttatcccagcaagcacaactagcagctgctgagaaattcaaagttcaaggtgaagctgtctcaaac

SEQ ID NO: 157810 - DNA, 777 bp, Homo sapiens
  Payload ID: 10928
  Gene Symbol: NACA2
  Gene Name: nascent polypeptide-associated complex alpha subunit 2
  Uniprot ID: Q9H009
  ENST ID: ENST00000521764
  CDS Start-End: 23-670
gcttccgcgttccctgcacaaaatgccgggcgaagccacagaaaccgtccctgctacagagcaggagttgccgcagtcccaggctgagacagggtctggaacagcatctgatagtggtgaatcagtaccagggattgaagaacaggattccacccagaccaccacacaaaaagcctggctggtggcagcagctgaaattgatgaagaaccagtcggtaaagcaaaacagagtcggagtgaaaagagggcacggaaggctatgtccaaactgggtcttctacaggttacaggagttactagagtcactatctggaaatctaagaatatcctctttgtcatcacaaaactggacgtctacaagagccctgcttcggatgcctacatagtttttggggaagccaagatccaagatttatctcagcaagcacaactagcagctgcggagaaattcagagttcaaggtgaagctgtcggaaacattcaagaaaacacacagactccaactgtacaagaggagagtgaagaggaagaggtcgatgaaacaggtgtagaagttaaagacgtgaaattggtcatgtcacaagcaaatgtgtcgagagcaaaggcagtccgagctctgaagaacaacagtaatgatattgtaaatgcgattatggaattaacagtgtaaccatctgaaagcaactttttttggtgtctcaaaggagtaactgcagcttggtttgaaatttgtactgtttctatcataaataaagttatgacttcttgctggaaaaa

SEQ ID NO: 157811 - DNA, 728 bp, Homo sapiens
  Payload ID: 10929
  Gene Symbol: NPPA
  Gene Name: natriuretic peptide A
  ENST ID: ENST00000376476
  CDS Start-End: 293-598
ggactgccaggggtgaaggcagccctgtctgaggccagaggtctgcccacgtggcggatgaggcaggtgtgaggccagcttgagcatctggatccatttgtctcgggctgctggctgcctgccatttcctcctctccacccttatttggaggccctgacagctgagccacaaacaaaccaggggagctgggcaccagccaagcgtcaccctctgtttccccgcacgggtaccagcgtcgaggagaaagaatcctgaggcacggcgaatttgctggaccatttggaagaaaagatgcctttagaagatgaggtcgtgcccccacaagtgctcagtgagccgaatgaagaagcgggggctgctctcagccccctccctgaggtgcctccctggaccggggaagtcagcccagcccagagagatggaggtgccctcgggcggggcccctgggactcctctgatcgatctgccctcctaaaaagcaagctgagggcgctgctcactgcccctcggagcctgcggagatccagctgcttcgggggcaggatggacaggattggagcccagagcggactgggctgtaacagcttccggtactgaagataacagccagggaggacaagcagggctgggcctagggacagactgcaagaggctcctgtcccctggggtctctgctgcatttgtgtcatcttgttgccatggagttgtgatcatcccatctaagctg

SEQ ID NO: 157812 - DNA, 855 bp, Homo sapiens
  Payload ID: 10929
  Gene Symbol: NPPA
  Gene Name: natriuretic peptide A
  Uniprot ID: P01160
  ENST ID: ENST00000376480
  CDS Start-End: 100-555
gagacagggacagacgtaggccaagagaggggaaccagagaggaaccagaggggagagacagagcagcaagcagtggattgctccttgacgacgccagcatgagctccttctccaccaccaccgtgagcttcctccttttactggcattccagctcctaggtcagaccagagctaatcccatgtacaatgccgtgtccaacgcagacctgatggatttcaagaatttgctggaccatttggaagaaaagatgcctttagaagatgaggtcgtgcccccacaagtgctcagtgagccgaatgaagaagcgggggctgctctcagccccctccctgaggtgcctccctggaccggggaagtcagcccagcccagagagatggaggtgccctcgggcggggcccctgggactcctctgatcgatctgccctcctaaaaagcaagctgagggcgctgctcactgcccctcggagcctgcggagatccagctgcttcgggggcaggatggacaggattggagcccagagcggactgggctgtaacagcttccggtactgaagataacagccagggaggacaagcagggctgggcctagggacagactgcaagaggctcctgtcccctggggtctctgctgcatttgtgtcatcttgttgccatggagttgtgatcatcccatctaagctgcagcttcctgtcaacacttctcacatcttatgctaactgtagataaagtggtttgatggtgacttcctcgcctctcccaccccatgcattaaattttaaggtagaacctcacctgttactgaaagtggtttgaaagtgaataaacttcagcaccatggacagaagacaaa

SEQ ID NO: 157813 - DNA, 849 bp, Homo sapiens
  Payload ID: 10929
  Gene Symbol: NPPA
  Gene Name: natriuretic peptide A
  ENST ID: ENST00000610706
  CDS Start-End: 100-558
gagacagggacagacgtaggccaagagaggggaaccagagaggaaccagaggggagagacagagcagcaagcagtggattgctccttgacgacgccagcatgagctccttctccaccaccaccgtgagcttcctccttttactggcattccagctcctaggtcagaccagagctaatcccatgtacaatgccgtgtccaacgcagacctgatggatttcaagaatttgctggaccatttggaagaaaagatgcctttagaagatgaggtcgtgcccccacaagtgctcagtgagccgaatgaagaagcgggggctgctctcagccccctccctgaggtgcctccctggaccggggaagtcagcccagcccagagagatggaggtgccctcgggcggggcccctgggactcctctgatcgatctgccctcctaaaaagcaagctgagggcgctgctcactgcccctcggagcctgcggagatccagctgcttcgggggcaggatggacaggattggagcccagagcggactgggctgtaacagcttccggtacagataacagccagggaggacaagcagggctgggcctagggacagactgcaagaggctcctgtcccctggggtctctgctgcatttgtgtcatcttgttgccatggagttgtgatcatcccatctaagctgcagcttcctgtcaacacttctcacatcttatgctaactgtagataaagtggtttgatggtgacttcctcgcctctcccaccccatgcattaaattttaaggtagaacctcacctgttactgaaagtggtttgaaagtgaataaacttcagcaccatggacagaagac

SEQ ID NO: 157814 - DNA, 694 bp, Homo sapiens
  Payload ID: 10930
  Gene Symbol: NPPB
  Gene Name: natriuretic peptide B
  Uniprot ID: P16860
  ENST ID: ENST00000376468
  CDS Start-End: 99-503
gcaggctgagggcaggtgggaagcaaacccggacgcatcgcagcagcagcagcagcagcagaagcagcagcagcagcctccgcagtccctccagagacatggatccccagacagcaccttcccgggcgctcctgctcctgctcttcttgcatctggctttcctgggaggtcgttcccacccgctgggcagccccggttcagcctcggacttggaaacgtccgggttacaggagcagcgcaaccatttgcagggcaaactgtcggagctgcaggtggagcagacatccctggagcccctccaggagagcccccgtcccacaggtgtctggaagtcccgggaggtagccaccgagggcatccgtgggcaccgcaaaatggtcctctacaccctgcgggcaccacgaagccccaagatggtgcaagggtctggctgctttgggaggaagatggaccggatcagctcctccagtggcctgggctgcaaagtgctgaggcggcattaagaggaagtcctggctgcagacacctgcttctgattccacaaggggctttttcctcaaccctgtggccgcctttgaagtgactcatttttttaatgtatttatgtatttatttgattgttttatataagatggtttcttacctttgagcacaaaatttccacggtgaaataaagtcaacattataagcttta

SEQ ID NO: 157815 - DNA, 500 bp, Homo sapiens
  Payload ID: 10931
  Gene Symbol: NPPC
  Gene Name: natriuretic peptide C
  Uniprot ID: P23582
  ENST ID: ENST00000295440
  CDS Start-End: 80-460
cgcatccccctgctggtctgcccgccgacctgcgcgccctcgctgccgcccgtgtgcgcccctcgaccccagcggcaccatgcatctctcccagctgctggcctgcgccctgctgctcacgctgctctccctccggccctccgaagccaagcccggggcgccgccgaaggtcccgcgaaccccgccggcagaggagctggccgagccgcaggctgcgggcggcggtcagaagaagggcgacaaggctcccgggggcgggggcgccaatctcaagggcgaccggtcgcgactgctccgggacctgcgcgtggacaccaagtcgcgggcagcgtgggctcgccttctgcaagagcaccccaacgcgcgcaaatacaaaggagccaacaagaagggcttgtccaagggctgcttcggcctcaagctggaccgaatcggctccatgagcggcctgggatgttagtgcggcgccccctggcggcggtgagtacggcccacccgac

SEQ ID NO: 157816 - DNA, 1051 bp, Homo sapiens
  Payload ID: 10931
  Gene Symbol: NPPC
  Gene Name: natriuretic peptide C
  Uniprot ID: P23582
  ENST ID: ENST00000409852
  CDS Start-End: 155-535
cgggctcagagcgcacccagccggcgccgcgcagcactgggaccctgctcgccctgcagcccagccagcctgctccgcatccccctgctggtctgcccgccgacctgcgcgccctcgctgccgcccgtgtgcgcccctcgaccccagcggcaccatgcatctctcccagctgctggcctgcgccctgctgctcacgctgctctccctccggccctccgaagccaagcccggggcgccgccgaaggtcccgcgaaccccgccggcagaggagctggccgagccgcaggctgcgggcggcggtcagaagaagggcgacaaggctcccgggggcgggggcgccaatctcaagggcgaccggtcgcgactgctccgggacctgcgcgtggacaccaagtcgcgggcagcgtgggctcgccttctgcaagagcaccccaacgcgcgcaaatacaaaggagccaacaagaagggcttgtccaagggctgcttcggcctcaagctggaccgaatcggctccatgagcggcctgggatgttagtgcggcgccccctggcggcggatcgggaactggctccgttgtgctgaggtcatctttggtcatcagcctccagcatctggaaacacctccaacgcaatgtggcttttacatttctttctttctttctttttttttcctggtactgggaatacacaacaccagctgttttattattatttggggagggggttgtgattttattatttgtttttttaaaatgaaaaataaaaagttatatattatatatatattatatacatgaaacacacacacctacaccgacttgatgacaagggacagtttttaagagactgacagaaccagctgtaaaacattgctgtttgtaaattcatgtcatgcataaatgtatttatgttgtaaagctatttatattgtttataaagagatatttataaaaattttatttatgtaactaaatgaaagaagtcaatcattgtaatgtttttgtcctaactagttaaaaaaaatgtaaaaaaaaaaaagtcattccatgaa

SEQ ID NO: 157817 - DNA, 4236 bp, Homo sapiens
  Payload ID: 10932
  Gene Symbol: NPR1
  Gene Name: natriuretic peptide receptor 1
  Uniprot ID: P16066
  ENST ID: ENST00000368680
  CDS Start-End: 473-3658
ggttccctccggatagccggagacttgggccggccggacgccccttctggcacactccctggggcaggcgctcacgcacgctacaaacacacactcctctttcctccctcgcgcgccctctctcatccttcttcacgaagcgctcactcgcaccctttctctctctctctctctctctctaacacgcacgcacactcccagttgttcacactcgggtcctctccagcccgacgttctcctggcacccacctgctccgcggcgccctgcgcgcccccctcggtcgcgccccttgcgctctcggcccagaccgtcgcagctacagggggcctcgagccccggggtgagcgtccccgtcccgctcctgctccttcccatagggacgcgcctgatgcctgggaccggccgctgagcccaaggggaccgaggaggccatggtaggagcgctcgcctgctgcggtgcccgctgaggccatgccggggccccggcgccccgctggctcccgcctgcgcctgctcctgctcctgctgctgccgccgctgctgctgctgctccggggcagccacgcgggcaacctgacggtagccgtggtactgccgctggccaatacctcgtacccctggtcgtgggcgcgcgtgggacccgccgtggagctggccctggcccaggtgaaggcgcgccccgacttgctgccgggctggacggtccgcacggtgctgggcagcagcgaaaacgcgctgggcgtctgctccgacaccgcagcgcccctggccgcggtggacctcaagtgggagcacaaccccgctgtgttcctgggccccggctgcgtgtacgccgccgccccagtggggcgcttcaccgcgcactggcgggtcccgctgctgaccgccggcgccccggcgctgggcttcggtgtcaaggacgagtatgcgctgaccacccgcgcggggcccagctacgccaagctgggggacttcgtggcggcgctgcaccgacggctgggctgggagcgccaagcgctcatgctctacgcctaccggccgggtgacgaagagcactgcttcttcctcgtggaggggctgttcatgcgggtccgcgaccgcctcaatattacggtggaccacctggagttcgccgaggacgacctcagccactacaccaggctgctgcggaccatgccgcgcaaaggccgagttatctacatctgcagctcccctgatgccttcagaaccctcatgctcctggccctggaagctggcttgtgtggggaggactacgttttcttccacctggatatctttgggcaaagcctgcaaggtggacagggccctgctccccgcaggccctgggagagaggggatgggcaggatgtcagtgcccgccaggcctttcaggctgccaaaatcattacatataaagacccagataatcccgagtacttggaattcctgaagcagttaaaacacctggcctatgagcagttcaacttcaccatggaggatggcctggtgaacaccatcccagcatccttccacgacgggctcctgctctatatccaggcagtgacggagactctggcacatgggggaactgttactgatggggagaacatcactcagcggatgtggaaccgaagctttcaaggtgtgacaggatacctgaaaattgatagcagtggcgatcgggaaacagacttctccctctgggatatggatcccgagaatggtgccttcagggttgtactgaactacaatgggacttcccaagagctggtggctgtgtcggggcgcaaactgaactggcccctggggtaccctcctcctgacatccccaaatgtggctttgacaacgaagacccagcatgcaaccaagatcacctttccaccctggaggtgctggctttggtgggcagcctctccttgctcggcattctgattgtctccttcttcatatacaggaagatgcagctggagaaggaactggcctcggagctgtggcgggtgcgctgggaggacgttgagcccagtagccttgagaggcacctgcggagtgcaggcagccggctgaccctgagcgggagaggctccaattacggctccctgctaaccacagagggccagttccaagtctttgccaagacagcatattataagggcaacctcgtggctgtgaaacgtgtgaaccgtaaacgcattgagctgacacgaaaagtcctgtttgaactgaagcatatgcgggatgtgcagaatgaacacctgaccaggtttgtgggagcctgcaccgacccccccaatatctgcatcctcacagagtactgtccccgtgggagcctgcaggacattctggagaatgagagcatcaccctggactggatgttccggtactcactcaccaatgacatcgtcaagggcatgctgtttctacacaatggggctatctgttcccatgggaacctcaagtcatccaactgcgtggtagatgggcgctttgtgctcaagatcaccgactatgggctggagagcttcagggacctggacccagagcaaggacacaccgtttatgccaaaaagctgtggacggcccctgagctcctgcgaatggcttcaccccctgtgcggggctcccaggctggtgacgtatacagctttgggatcatccttcaggagattgccctgaggagtggggtcttccacgtggaaggtttggacctgagccccaaagagatcatcgagcgggtgactcggggtgagcagccccccttccggccctccctggccctgcagagtcacctggaggagttggggctgctcatgcagcggtgctgggctgaggacccacaggagaggccaccattccagcagatccgcctgacgttgcgcaaatttaacagggagaacagcagcaacatcctggacaacctgctgtcccgcatggagcagtacgcgaacaatctggaggaactggtggaggagcggacccaggcatacctggaggagaagcgcaaggctgaggccctgctctaccagatcctgcctcactcagtggctgagcagctgaagcgtggggagacggtgcaggccgaagcctttgacagtgttaccatctacttcagtgacattgtgggtttcacagcgctgtcggcggagagcacacccatgcaggtggtgaccctgctcaatgacctgtacacttgctttgatgctgtcatagacaactttgatgtgtacaaggtggagacaattggcgatgcctacatggtggtgtcagggctccctgtgcggaacgggcggctacacgcctgcgaggtagcccgcatggccctggcactgctggatgctgtgcgctccttccgaatccgccaccggccccaggagcagctgcgcttgcgcattggcatccacacaggacctgtgtgtgctggagtggtgggactgaagatgccccgttactgtctctttggggatacagtcaacacagcctcaagaatggagtctaatggggaagccctgaagatccacttgtcttctgagaccaaggctgtcctggaggagtttggtggtttcgagctggagcttcgaggggatgtagaaatgaagggcaaaggcaaggttcggacctactggctccttggggagagggggagtagcacccgaggctgacctgcctcctctcctatccctccacacctccctaccctgtgccagaagcaacagaggtgccaggcctcagcctcacccacagcagccccatcgccaaaggatggaagtaatttgaatagctcaggtgtgctgaccccagtgaagacaccagataggacctctgagaggggactggcatggggggatctcagagcttacaggctgagccaagcccacggccatgcacagggacactcacacaggcacacgcacctgctctccacctggactcaggccgggctgggctgtggattcctgatcccctcccctccccatgctctcctccctcagccttgctaccctgtgacttactgggaggagaaagagtcacctgaaggggaacatgaaaagagactaggtgaagagagggcaggggagcccacatctggggctggcccacaatacctgctcccccgaccccctccacccagcagtagacacagtgcacaggggagaagaggggtggcgcagaagggttgggggcctgtatgccttgcttctaccatgagcagagacaattaaaatctttattccagtga

SEQ ID NO: 157818 - DNA, 3686 bp, Homo sapiens
  Payload ID: 10933
  Gene Symbol: NPR2
  Gene Name: natriuretic peptide receptor 2
  Uniprot ID: P20594
  ENST ID: ENST00000342694
  CDS Start-End: 256-3399
tccccctgccaccccgttctcagtcctcagtccttgccctaggctggtagcccactccttgcccgccccccgccttcctcccatctccccctcctctccccggcccccagcaccttctgcatcccagcctacctagcctactcctcctcttcctggccctcttccccaggctccaggctggggggtgctcgcgtctcccctgtaggccagagcagccccaagttctgggggcggtggggctgctgctttatccccatggcgctgccatcacttctgctgttggtggcagccctggcaggtggggtgcgtcctcccggggcgcggaacctgacgctggcggtggtgctgccagaacacaacctgagctatgcctgggcctggccacgggtgggacccgctgtggcactagctgtggaggctctgggccgggcactgcccgtggacctgcggtttgtcagctccgaactggaaggcgcctgctctgagtacctggcaccgctgagcgctgtggacctcaagctgtaccatgaccccgacctgctgttaggtcccggttgcgtgtaccctgctgcctctgtggcccgctttgcctcccactggcgccttcccctgctgactgcgggtgctgtggcctctggtttttcggctaagaatgaccattatcgtaccctggttcgcactggcccctctgctcccaagctgggtgagtttgtggtgacactacacgggcacttcaattggactgcccgtgctgccttgctgtacctggatgctcgcacagatgaccggcctcactacttcaccatcgagggcgtctttgaggccctgcagggcagcaacctcagtgtgcagcaccaggtgtatgcccgagagccagggggccccgagcaggccacccacttcatccgggccaacgggcgcattgtgtatatctgcggccctctggagatgctgcatgagatcctgcttcaggcccagagggagaatctgaccaatggggattatgtcttcttttacctggatgtctttggggagagtctccgtgcaggccccacacgtgctacaggccggccctggcaggacaatcgcacccgggaacaggcccaggccctcagagaggcctttcagactgtattggtgatcacgtaccgagaacccccaaatcctgagtatcaggaattccagaatcgtctgctgataagagcccgggaagactttggtgtggagctgggcccttccctgatgaacctcatcgctggctgcttctatgatgggatcctgctatatgctgaagtcctgaatgagacaatacaggaaggaggcacccgggaggatggacttcgaattgtggaaaagatgcagggacgaagatatcacggtgtaactgggctggttgtcatggacaagaacaatgaccgagagactgactttgtcctctgggccatgggagacctggattctggggactttcagcctgcagcccactactcgggagctgagaagcagatttggtggacgggacggcctattccctgggtgaagggggctcctccctcggacaatcccccctgtgcctttgacttggacgacccatcctgtgataaaactccactttcaaccctggcaattgtggctctgggcacaggaatcaccttcatcatgtttggtgtttccagcttcctaattttccgaaagctgatgctggagaaggagctggctagcatgttgtggcgtattcgctgggaagaactgcagtttggcaactcagagcgttatcacaaaggtgcaggcagtcgcctcacactgtcgctgcggggatccagttacggctcgctcatgacagcccatgggaaataccagatctttgccaacaccggtcacttcaagggaaatgttgtcgccatcaaacatgtgaataagaagcgcattgagctgacccggcaggttctgtttgaactcaaacatatgagagatgttcagttcaaccatctcactcgcttcattggcgcctgcatagaccctcccaacatttgcattgtcactgaatactgtcctcgtgggagtttacaggatattctagaaaatgacagcatcaacttggactggatgtttcgttattcactcattaatgaccttgttaagggcatggcctttctccacaacagcattatttcatcgcatgggagtctcaagtcctccaactgtgtggtggatagtcgttttgtgctcaaaatcacagactatggcctggccagcttccgatcaactgctgaacctgatgacagccatgccctctatgccaagaagctgtggactgccccagaactgctcagtgggaaccccttgccaaccacaggcatgcagaaggctgacgtctatagctttgggatcatcctgcaggagatagcacttcgcagtggtcctttctacttggagggcctggacctcagccccaaagagattgtccagaaggtacgaaatggtcagcggccatatttccggccaagcattgaccggacccaactgaatgaagagctagttttgctgatggagcgatgttgggctcaggacccagctgagcggccagactttggacagattaagggcttcattcggcgctttaacaaggagggtggcaccagcatattggacaacctcctgctgcgcatggaacagtatgccaataacttggagaagctggtggaggaacgcacacaggcctatctggaggaaaaacgcaaggctgaagctctgctctaccaaatcctaccccattcagtggcagagcagttaaaacggggagagactgtacaggctgaggcctttgacagtgttaccatctacttcagtgacattgttggcttcacagcattgtcagcagagagcacccccatgcaggtagtgacacttcttaatgacctgtatacctgctttgatgccataattgacaactttgatgtctacaaggtggagacgattggggatgcttacatggtggtatctggcctcccaggccgaaatggtcaacgccatgcaccagaaattgctcgtatggccctagcattactagatgcagtttcttcctttcgcatccgccaccgaccccatgaccagctgaggctacgcataggggtccatactgggccagtctgtgctggggttgttggcctgaagatgccccgttattgtctttttggagacacagtgaacactgcttctcgaatggagtctaatggtcaagcgctgaagatccatgtctcctctaccaccaaggatgccctagatgagctaggatgcttccagctagagcttcggggggatgtggaaatgaagggaaaaggaaagatgcgaacatactggctcttaggagagcggaaaggacctcctggactcctgtaaacccccattctttccaagtcagatagtcttctgctgctggtacctgggtgggcaatggccaccatgtctgcacacaccagaaatggacattttcatatgcaatggaaaacagccacaaaaaaacctaccttatatggaagttgtagccctctgcagctcagccctgtacatatacctgtccctctctggcttggtccccttcctccctactttctgtaaatatctgtatctaaaccagaatattttggtcaaatataaaacaataataaaaaaagttctgatgtcat

SEQ ID NO: 157819 - DNA, 543 bp, Homo sapiens
  Payload ID: 10933
  Gene Symbol: NPR2
  Gene Name: natriuretic peptide receptor 2
  ENST ID: ENST00000447210
  CDS Start-End: 1-495
aatggtcagcggccatatttccggccaagcattgaccggacccaactgaatgaagagctagttttgctgatggagcgatgttgggctcaggacccagctgagcggccagactttggacagattaagggcttcattcggcgctttaacaaggagggtggcaccagcatattggacaacctcctgctgcgcatggaacagtatgccaataacttggagaagctggtggaggaacgcacacaggcctatctggaggaaaaacgcaaggctgaagctctgctctaccaaatcctaccccattcagtggcagagcagttaaaacggggagagactgtacaggctgaggcctttgacagtgttaccatctacttcagtgacattgttggcttcacagcattgtcagcagagagcacccccatgcaggtagtgacacttcttaatgacctgtatacctgctttgatgccataattgacaactttgatgtctactttctgtaaatatctgtatctaaaccagaatattttggtcaaatataaaacaataat

SEQ ID NO: 157820 - DNA, 824 bp, Homo sapiens
  Payload ID: 10933
  Gene Symbol: NPR2
  Gene Name: natriuretic peptide receptor 2
  ENST ID: ENST00000421267
  CDS Start-End: 1-824
acagcattatttcatcgcatgggagtctcaagtcctccaactgtgtggtggatagtcgttttgtgctcaaaatcacagactatggcctggccagcttccgatcaactgctgaacctgatgacagccatgccctctatgccagcatgcagaaggctgacgtctatagctttgggatcatcctgcaggagatagcacttcgcagtggtcctttctacttggagggcctggacctcagccccaaagagattgtccagaaggtacgaaatggtcagcggccatatttccggccaagcattgaccggacccaactgaatgaagagctagttttgctgatggagcgatgttgggctcaggacccagctgagcggccagactttggacagattaagggcttcattcggcgctttaacaaggagggtggcaccagcatattggacaacctcctgctgcgcatggaacagtatgccaataacttggagaagctggtggaggaacgcacacaggcctatctggaggaaaaacgcaaggctgaagctctgctctaccaaatcctaccccattcagtggcagagcagttaaaacggggagagactgtacaggctgaggcctttgacagtgttaccatctacttcagtgacattgttggcttcacagcattgtcagcagagagcacccccatgcaggtagtgacacttcttaatgacctgtatacctgctttgatgccataattgacaactttgatgtctacaaggtggagacgattggggatgcttacatggtggtatctggcctcccaggccgaaatggtcaacgccatgcacca

SEQ ID NO: 157821 - DNA, 730 bp, Homo sapiens
  Payload ID: 10933
  Gene Symbol: NPR2
  Gene Name: natriuretic peptide receptor 2
  ENST ID: ENST00000448821
  CDS Start-End: 1-229
accccattcagtggcagagcagttaaaacggggagagactgtacaggctgaggcctttgacagtgttaccatctacttcagtgacattgttggcttcacagcattgtcagcagagagcacccccatgcaggtagtgacacttcttaatgacctgtatacctgctttgatgccataattgacaactttgatgtctacaagggccagtctgtgctggggttgttggcctgaagatgccccgttattgtctttttggagacacagtgaacactgcttctcgaatggagtctaatggtcaagcgctgaagatccatgtctcctctaccaccaaggatgccctagatgagctaggatgcttccagctagagcttcggggggatgtggaaatgaagggaaaaggaaagatgcgaacatactggctcttaggagagcggaaaggacctcctggactcctgtaaacccccattctttccaagtcagatagtcttctgctgctggtacctgggtgggcaatggccaccatgtctgcacacaccagaaatggacattttcatatgcaatggaaaacagccacaaaaaaacctaccttatatggaagttgtagccctctgcagctcagccctgtacatatacctgtccctctctggcttggtccccttcctccctactttctgtaaatatctgtatctaaaccagaatattttggtcaaatataaaacaataataaaaaaa

SEQ ID NO: 157822 - DNA, 7344 bp, Homo sapiens
  Payload ID: 10934
  Gene Symbol: NPR3
  Gene Name: natriuretic peptide receptor 3
  Uniprot ID: P17342
  ENST ID: ENST00000265074
  CDS Start-End: 344-1969
acgcccaaataagaagccacctctaagcaaaatagtatatgtataaacggagggcgaatatatacaagtatatatatatgtatattacagacgcacaggtttacacccggtgaactttttctttttctttttcttttttttttaagaaaaactagtgacattgcagagaaggacgcttcctctctatcttttggcgcattagtgaagggggtattctattttgttaaagcgcccaagggggcgcagggaccttggagagaagagtggggaggaaagaggaagggtgggtggggggcagagggcgagtcggcggcggcgagggcaagctctttcttgcggcacgatgccgtctctgctggtgctcactttctccccgtgcgtactactcggctgggcgttgctggccggcggcaccggtggcggtggcgttggcggcggcggcggtggcgcgggcataggcggcggacgccaggagagagaggcgctgccgccacagaagatcgaggtgctggtgttactgccccaggatgactcgtacttgttttcactcacccgggtgcggccggccatcgagtatgctctgcgcagcgtggagggcaacgggactgggaggcggcttctgccgccgggcactcgcttccaggtggcttacgaggattcagactgtgggaaccgtgcgctcttcagcttggtggaccgcgtggcggcggcgcggggcgccaagccagaccttatcctggggccagtgtgcgagtatgcagcagcgccagtggcccggcttgcatcgcactgggacctgcccatgctgtcggctggggcgctggccgctggcttccagcacaaggactctgagtactcgcacctcacgcgcgtggcgcccgcctacgccaagatgggcgagatgatgctcgccctgttccgccaccaccactggagccgcgctgcactggtctacagcgacgacaagctggagcggaactgctacttcaccctcgagggggtccacgaggtcttccaggaggagggtttgcacacgtccatctacagtttcgacgagaccaaagacttggatctggaagacatcgtgcgcaatatccaggccagtgagagagtggtgatcatgtgtgcgagcagtgacaccatccggagcatcatgctggtggcgcacaggcatggcatgaccagtggagactacgccttcttcaacattgagctcttcaacagctcttcctatggagatggctcatggaagagaggagacaaacacgactttgaagctaagcaagcatactcgtccctccagacagtcactctactgaggacagtgaaacctgagtttgagaagttttccatggaggtgaaaagttcagttgagaaacaagggctcaatatggaggattacgttaacatgtttgttgaaggattccacgatgccatcctcctctacgtcttggctctacatgaagtactcagagctggttacagcaaaaaggatggagggaaaattatacagcagacttggaacagaacatttgaaggtatcgccgggcaggtgtccatagatgccaacggagaccgatatggggatttctctgtgattgccatgactgatgtggaggcgggcacccaggaggttattggtgattattttggaaaagaaggtcgttttgaaatgcggccgaatgtcaaatatccttggggccctttaaaactgagaatagatgaaaaccgaattgtagagcatacaaacagctctccctgcaaatcatcaggtggcctagaagaatcggcagtgacaggaattgtcgtgggggctttactaggagctggcttgctaatggccttctactttttcaggaagaaatacagaataaccattgagaggcgaacccagcaagaagaaagtaaccttggaaaacatcgggaattacgggaagattccatcagatcccatttttcagtagcttaaaggaagccccccactttttttttttctgcctgagattctttaaggagatagacgggttgaaagacatcaatgaaacagaaggggcgttcttgaagaattcataattttaagcagttagtaatttcattttaaaatttctgtagaagctcaggaattatgattaatcaccatctgcctccaggcctttcatctcatgacaaacaaatataataatgatatcgtgtcactctgttaaatgttcatactgtttcaagcccatatgattagatttatgtttttaaaatctgttgtctccatatcttgatggcttttgggagcatttcacacaaggatataaaatgcggttttcttaaatgaaatgttttgtagctagaataaaatcatttttacaagtacagcattcttggaaagaatttaacacccaaaaaggggaaaatgtaatgaaaaatctcaaggttggaaatacagccttactctctctagagctggaggacaggtttgtggttgaggacttctctgtccgatgtctacattcaggttctgacttcatatcttgaaaaaggatttcctccctgtctttttcagtgtctcataaacgctactctggattgttgtaaatattagtgagatgggaggatttacagaagaaaagcaagtcaaaaatatttcctttttgatgtaaaaaaaaaaagccctatttcgcactaacattttattttacaagtattttaatcttatattttggtattagaaaaatttgtctattttttcattttgaagattaaatgttgcttacattttaaaagcatgggtgaagtgtacaacaaaccaataatgataaaaaatacttctctttttctccctgtttccctttttcccttggccacagccaaatgctaattgctgctttaattacagagatgtgtaaatgtattcagattacaaactctacaggaatacatcaacattttaactcttttgcgtttttactgtttaactgttttaaatgcaagttattttagggtgacactccttccagttctggccagatcatgagtttcaagatcaagagtaaaaagttattagaattaaacagttttataaagggaggcagcccttttccctcaagaacaactttgttgagagttactacttgacagcaagcacagaaatgacaaatttaaaacttttacacatggcatttaccaaaattcccagtgattattttgtttaaaagagggaacctaaatatctactctattccctttcagttaactccacagaactttgtaggcatccatgaatacctgtaatagtgggttaggtgtggagataaggaatttggacaaagttgagtaagtttttactgggtatctgctttgcacccagtagtctgcaacatgagtttaaactcaggttactactttcacttatactttatggagaagatagacagtgagggaggaatgggaagctgtcatgagagtgcaccgtcttggaattacataactggggtctttcctcaataacattttgagcatctgaaaaatagtttaaaaaattgtcttaatatctattaaaaggcatgtctagtgaggaaacaggagagtctgagcaatcccttggtggcgatgaaggtggtagttcacacaagtaacagtggaggcaaaggtaagcgcaagctgcctgtcccagatgctggcccatgtgtgagtgcttccctggagaagtccgcttctgttgctcccacctgagtcacagttaacagattatttctgtgtgaggcacatttcccttctgttgtttaagaaatgggagctgggaggcagctgagagggcgtgataaaagaattaagtgtgatcaactgaaacaactatgttgtagttctccatgctggatgcaaaggaaaaagtgtcgaattccaaaaaggatggaagaagaaggcaagaagggcaaactccagaagttctagtgcaggaagagagtttgagaagtaaaatccaggcaagcaaagcgttgtaccacttgggactccccaaagtgaaacagcaaggaaggattgtgtccatcttacttacttgaattggagagcttgtttctctctcatttttatttttcaatgatgttttctttatattttagagatattcattttctcttatcttgtgcttgtaaaaagcatttacatttcaagtctatgtgcttattacaggggaaaaataatctacctggttgcagtctttgagtataaacatttctaacctttttaaaacttctatagcagcccattaacactaacatttttagagcaaatatattctattttaacttcaggtagaggaatagtcctaaacttaatatgatagctctagataagatcttagagataagtgagcatttagtattctaaaagtggcagaacaaatcatgaggtttctggatgctataccaatttaaaatcaattcttatgttaatattgattgcttatttacatgtcagtcatctactttttttctttgaaatctgcatatgggttacaaaaactctgttaggttttgaaaattccattaagttggaaaccttggttaaaaatgtaggtgcctggcccatggttaccctggattcaggtctctcatgattatatttggggatttacgttcctaactgctaagcaacatctttgacaactagtaattcatactctactagtagtcacatgtcatatagtaaaataaatagggctttagttcttaagtaattctataggattttaccctgaaatccagggtgttcagatttcaaaaaggataatttatcagtattttctcatccagtcaaacttcagctgacattgatacaggtcaaaatgcgtagatgctttttggtgttggaaataagtgtctgtcttatggtcatcattgtcttcttagatttttgggtaggggggccaggtagggggagactcagaaataaaagcgttccccagataacttcaatctggaaagaattttttgtatagagtccatctctccctcaagactgaccacaggtttcatgagaaggtccctgaaaacatcacatttctctgaagaaccatcaacttgtcttttcttgaaccacaggaatggttctacagaccctactataattcttcacatttcagaacccatgtttaatggagggaagagagaaatgcatgggaaaagaacacctccttttctcctttctcttaaattcaaagacgtttgctttggaatgccctcacttctccctattcacaggcttctaaaatcattaatttactcaaggcacatgtgccttctttgccccaaatgcatcactttccttttagttatggctgattttgggtgtgtgtgtgtaagacatgcagtcaacaatgagatgaaggccattgcatagatctcatgcagatagtgatggattcagaaagtaggttccagtggcgtcactaccttcttgtaagccagtatacactggctatttgtggaaatctctttgggagatcaaatagagtattatgccactgtgagtgtttataaactggaaggaacaagtacctgtgtttcttgggacacaaagcactcagatcctgagtggatgcagacatgagagtaaatgtcagcccaaattaggcccctcgacctacagacatttcatgggttttatttaatcacaccccatggtttggggctacatgaggaagttggtaatgagctgaatttcttattcagtggaaaaaactgaaactgtctaaaaacacgggatatattttagaggcaattgtggaagcggagagaatgagatgatggtgttcagagggaccagcttctttttcagttgtctttagaactcaagaataatcaataatttagtgccccttcaacagccatactcagcaagaagaatcagaagcttgatcctctaacagaaatagaagagggtagctttgcccattgccactgtctttactgccccttctgcccctccacccacatccacattcagcatcactccaaggatgtgtcagcatcttgcccatgcaggtagaaatttgtgagtaggcctccatacttcctcgggggaagaaagagaaactagtgctggttttaagaatgtagctggcttttcatcagaacccttatgctaacctgaccacacttgctctcggggaagttcaagcctgtgatgtgcataaactccaacaagcctggctttggtgttcagcatgcacattccataaatatctcttgcaggcataccccacagctagactgcaggattaaaataacttccaaaaggtgctggattggagtttgttcaaatttctcattaaccactaatgttaattcataccaaatgcaaagtattctaaaccagctgatgctgtcagtgttcaagttttaagtgacttcaaacacaatggaagtgtttcaatgggagccagatctcatgagtaaaaatccattttataatagctctgtgatatatcagtgggagatgattcataggggagagatttgaacaagcagaattaagtgttagcaaaaatgctgcattgctttgattcatgtttaaagacctaaatttctatgcacaaggaataaagggcctacttaccaagtgtaaatcacaacataggctaccaaaatatttcttatttgctaggagaacaaagctgtcacggtgcatgatagttggacagagatggctaaaaaagaggcaaattcagatttggaaacagggtggcctcttcattatttattgccaagatctgaaaatcttcaacatcttataagacaacaatgaagtagcccctgaacagcatggagttgctgtgagtttgttcgttgcagacctttgtgttgggtcctgggaatctgagctttgttccctgtgcatggtggataattgaaaccaagaggacatgggatagaccttgtgacagaccaattctgtgacccctgtcttctgggtcacattattcattgttgatttaaatacaggactaccaaacagtacaaatctatcatgagtctggtagaaaagtaaaagtaaaagctgcacacgttacatactgtttattgttctaatgtacaactaactatttgcatataatgtgatttaatttattgctgttttgtgtagaaaaggagaactaatgactgtggatataacccatgttttgtataatatattttatttcttgtgcgaactggtcatttaaaatatctacttcatttgatgtttggatataaatgtgtatgtgtccttgtaaatgtttctatcaagcaagaatgccacgtactcagagtataacaatgtgttctcattaaaaaatacatcccacggaaa

SEQ ID NO: 157823 - DNA, 6380 bp, Homo sapiens
  Payload ID: 10934
  Gene Symbol: NPR3
  Gene Name: natriuretic peptide receptor 3
  Uniprot ID: P17342
  ENST ID: ENST00000326958
  CDS Start-End: 27-1001
ggccagccgggcacaccaggtccgcgatggagccatctgcactgggaccttggtccttgttccctgaccttgcgccgagggaccaggaaggtcaggtgctcgccccgcgtcggtgcttcaggagggaatgtggccagaacgagaaagtggtgatcatgtgtgcgagcagtgacaccatccggagcatcatgctggtggcgcacaggcatggcatgaccagtggagactacgccttcttcaacattgagctcttcaacagctcttcctatggagatggctcatggaagagaggagacaaacacgactttgaagctaagcaagcatactcgtccctccagacagtcactctactgaggacagtgaaacctgagtttgagaagttttccatggaggtgaaaagttcagttgagaaacaagggctcaatatggaggattacgttaacatgtttgttgaaggattccacgatgccatcctcctctacgtcttggctctacatgaagtactcagagctggttacagcaaaaaggatggagggaaaattatacagcagacttggaacagaacatttgaaggtatcgccgggcaggtgtccatagatgccaacggagaccgatatggggatttctctgtgattgccatgactgatgtggaggcgggcacccaggaggttattggtgattattttggaaaagaaggtcgttttgaaatgcggccgaatgtcaaatatccttggggccctttaaaactgagaatagatgaaaaccgaattgtagagcatacaaacagctctccctgcaaatcatgtggcctagaagaatcggcagtgacaggaattgtcgtgggggctttactaggagctggcttgctaatggccttctactttttcaggaagaaatacagaataaccattgagaggcgaacccagcaagaagaaagtaaccttggaaaacatcgggaattacgggaagattccatcagatcccatttttcagtagcttaaaggaagccccccactttttttttttctgcctgagattctttaaggagatagacgggttgaaagacatcaatgaaacagaaggggcgttcttgaagaattcataattttaagcagttagtaatttcattttaaaatttctgtagaagctcaggaattatgattaatcaccatctgcctccaggcctttcatctcatgacaaacaaatataataatgatatcgtgtcactctgttaaatgttcatactgtttcaagcccatatgattagatttatgtttttaaaatctgttgtctccatatcttgatggcttttgggagcatttcacacaaggatataaaatgcggttttcttaaatgaaatgttttgtagctagaataaaatcatttttacaagtacagcattcttggaaagaatttaacacccaaaaaggggaaaatgtaatgaaaaatctcaaggttggaaatacagccttactctctctagagctggaggacaggtttgtggttgaggacttctctgtccgatgtctacattcaggttctgacttcatatcttgaaaaaggatttcctccctgtctttttcagtgtctcataaacgctactctggattgttgtaaatattagtgagatgggaggatttacagaagaaaagcaagtcaaaaatatttcctttttgatgtaaaaaaaaaaagccctatttcgcactaacattttattttacaagtattttaatcttatattttggtattagaaaaatttgtctattttttcattttgaagattaaatgttgcttacattttaaaagcatgggtgaagtgtacaacaaaccaataatgataaaaaatacttctctttttctccctgtttccctttttcccttggccacagccaaatgctaattgctgctttaattacagagatgtgtaaatgtattcagattacaaactctacaggaatacatcaacattttaactcttttgcgtttttactgtttaactgttttaaatgcaagttattttagggtgacactccttccagttctggccagatcatgagtttcaagatcaagagtaaaaagttattagaattaaacagttttataaagggaggcagcccttttccctcaagaacaactttgttgagagttactacttgacagcaagcacagaaatgacaaatttaaaacttttacacatggcatttaccaaaattcccagtgattattttgtttaaaagagggaacctaaatatctactctattccctttcagttaactccacagaactttgtaggcatccatgaatacctgtaatagtgggttaggtgtggagataaggaatttggacaaagttgagtaagtttttactgggtatctgctttgcacccagtagtctgcaacatgagtttaaactcaggttactactttcacttatactttatggagaagatagacagtgagggaggaatgggaagctgtcatgagagtgcaccgtcttggaattacataactggggtctttcctcaataacattttgagcatctgaaaaatagtttaaaaaattgtcttaatatctattaaaaggcatgtctagtgaggaaacaggagagtctgagcaatcccttggtggcgatgaaggtggtagttcacacaagtaacagtggaggcaaaggtaagcgcaagctgcctgtcccagatgctggcccatgtgtgagtgcttccctggagaagtccgcttctgttgctcccacctgagtcacagttaacagattatttctgtgtgaggcacatttcccttctgttgtttaagaaatgggagctgggaggcagctgagagggcgtgataaaagaattaagtgtgatcaactgaaacaactatgttgtagttctccatgctggatgcaaaggaaaaagtgtcgaattccaaaaaggatggaagaagaaggcaagaagggcaaactccagaagttctagtgcaggaagagagtttgagaagtaaaatccaggcaagcaaagcgttgtaccacttgggactccccaaagtgaaacagcaaggaaggattgtgtccatcttacttacttgaattggagagcttgtttctctctcatttttatttttcaatgatgttttctttatattttagagatattcattttctcttatcttgtgcttgtaaaaagcatttacatttcaagtctatgtgcttattacaggggaaaaataatctacctggttgcagtctttgagtataaacatttctaacctttttaaaacttctatagcagcccattaacactaacatttttagagcaaatatattctattttaacttcaggtagaggaatagtcctaaacttaatatgatagctctagataagatcttagagataagtgagcatttagtattctaaaagtggcagaacaaatcatgaggtttctggatgctataccaatttaaaatcaattcttatgttaatattgattgcttatttacatgtcagtcatctactttttttctttgaaatctgcatatgggttacaaaaactctgttaggttttgaaaattccattaagttggaaaccttggttaaaaatgtaggtgcctggcccatggttaccctggattcaggtctctcatgattatatttggggatttacgttcctaactgctaagcaacatctttgacaactagtaattcatactctactagtagtcacatgtcatatagtaaaataaatagggctttagttcttaagtaattctataggattttaccctgaaatccagggtgttcagatttcaaaaaggataatttatcagtattttctcatccagtcaaacttcagctgacattgatacaggtcaaaatgcgtagatgctttttggtgttggaaataagtgtctgtcttatggtcatcattgtcttcttagatttttgggtaggggggccaggtagggggagactcagaaataaaagcgttccccagataacttcaatctggaaagaattttttgtatagagtccatctctccctcaagactgaccacaggtttcatgagaaggtccctgaaaacatcacatttctctgaagaaccatcaacttgtcttttcttgaaccacaggaatggttctacagaccctactataattcttcacatttcagaacccatgtttaatggagggaagagagaaatgcatgggaaaagaacacctccttttctcctttctcttaaattcaaagacgtttgctttggaatgccctcacttctccctattcacaggcttctaaaatcattaatttactcaaggcacatgtgccttctttgccccaaatgcatcactttccttttagttatggctgattttgggtgtgtgtgtgtaagacatgcagtcaacaatgagatgaaggccattgcatagatctcatgcagatagtgatggattcagaaagtaggttccagtggcgtcactaccttcttgtaagccagtatacactggctatttgtggaaatctctttgggagatcaaatagagtattatgccactgtgagtgtttataaactggaaggaacaagtacctgtgtttcttgggacacaaagcactcagatcctgagtggatgcagacatgagagtaaatgtcagcccaaattaggcccctcgacctacagacatttcatgggttttatttaatcacaccccatggtttggggctacatgaggaagttggtaatgagctgaatttcttattcagtggaaaaaactgaaactgtctaaaaacacgggatatattttagaggcaattgtggaagcggagagaatgagatgatggtgttcagagggaccagcttctttttcagttgtctttagaactcaagaataatcaataatttagtgccccttcaacagccatactcagcaagaagaatcagaagcttgatcctctaacagaaatagaagagggtagctttgcccattgccactgtctttactgccccttctgcccctccacccacatccacattcagcatcactccaaggatgtgtcagcatcttgcccatgcaggtagaaatttgtgagtaggcctccatacttcctcgggggaagaaagagaaactagtgctggttttaagaatgtagctggcttttcatcagaacccttatgctaacctgaccacacttgctctcggggaagttcaagcctgtgatgtgcataaactccaacaagcctggctttggtgttcagcatgcacattccataaatatctcttgcaggcataccccacagctagactgcaggattaaaataacttccaaaaggtgctggattggagtttgttcaaatttctcattaaccactaatgttaattcataccaaatgcaaagtattctaaaccagctgatgctgtcagtgttcaagttttaagtgacttcaaacacaatggaagtgtttcaatgggagccagatctcatgagtaaaaatccattttataatagctctgtgatatatcagtgggagatgattcataggggagagatttgaacaagcagaattaagtgttagcaaaaatgctgcattgctttgattcatgtttaaagacctaaatttctatgcacaaggaataaagggcctacttaccaagtgtaaatcacaacataggctaccaaaatatttcttatttgctaggagaacaaagctgtcacggtgcatgatagttggacagagatggctaaaaaagaggcaaattcagatttggaaacagggtggcctcttcattatttattgccaagatctgaaaatcttcaacatcttataagacaacaatgaagtagcccctgaacagcatggagttgctgtgagtttgttcgttgcagacctttgtgttgggtcctgggaatctgagctttgttccctgtgcatggtggataattgaaaccaagaggacatgggatagaccttgtgacagaccaattctgtgacccctgtcttctgggtcacattattcattgttgatttaaatacaggactaccaaacagtacaaatctatcatgagtctggtagaaaagtaaaagtaaaagctgcacacgttacatactgtttattgttctaatgtacaactaactatttgcatataatgtgatttaatttattgctgttttgtgtagaaaaggagaactaatgactgtggatataacccatgttttgtataatatattttatttcttgtgcgaactggtcatttaaaatatctacttcatttgatgtttggatataaatgtgtatgtgtccttgtaaatgtttctatcaagcaagaatgccacgtactcagagtataacaatgtgttctcattaaaaaatacatcccacggaaacctc

SEQ ID NO: 157824 - DNA, 2715 bp, Homo sapiens
  Payload ID: 10934
  Gene Symbol: NPR3
  Gene Name: natriuretic peptide receptor 3
  ENST ID: ENST00000434067
  CDS Start-End: 1257-2234
ttctttttttttttttttaatctgtgctgccataaacgcctgcccttctgcaaattcaggaaagatttaattgctgtggagcactaaatctcaatttccagtgtgtgtggattaccctgtttgtggaattaaattttatacagatgtctcttttgctcctggttagtggctctaattaaataaatggaaattctcgcaggaattagaagctcctacttaacagtgaagatttcgggatcacagtgcataatctgaatataaatgacccagaagctgaaacattacccataatcacattgacggttccagaaagagcgataaggagagtgctgttaagggaggcgagcgctgacgccagaagttgccatatccccagaaaccccagtttgccttttcaccgtcgcaagtgagaaccagagcgcgttaaaggcctcggagtaaaaaacgcagcgtctgggactgcggcacccgggttgagtcgggtgcaagtttctgccgaaagagggcgtcggtctgagactaaaagaaatttgtggacacggacgcctagtcaaatgaaagaccattttaacacattttcaatgtatttaaatgtgcgggacttaattgtcagaattctcccgcccagtgtagcccgttcacattgcaaatgacttggctgcagtaggcacagaaggtccagttccattttgacccgccccgccgcgcggcggactcccgcgatgctcctctggtcacggacttctccagagccgcttccctccggtctccaccgctgctgtggctatggccagtgggaggactgggtctccgaggcaggacctttcttggagtcgcggaaccccagcacagtgcctcgagcgctccagagaaggagcggttggatctttgagcactcaggttggaggggagcgtgtgtcgtacccgggggacctaccgggaacgttttgggaaagacagtccctttatttaggtacctggtttagcaaacaaagccccgaggacgctttggggatgctttccaagctttgtgacacctccagaagttgaaccattccctcgcctttgggagcaacaagtttcactttcctgctctcagtgcgctgacagagggtccgtgagctgggacactgtgacctcggcaccgctgcgattccagcgcaaacctgcgtggcccagggggagggggctggcgcggggctgaggaaggcggggtgtaggtgacgcccgggccagccgggcacaccaggtccgcgatggagccatctgcactgggaccttggtccttgttccctgaccttgcgccgagggaccaggaaggtcaggtgctcgccccgcgtcggtgcttcaggagggaatgtggccagaacgagaaagtggtgatcatgtgtgcgagcagtgacaccatccggagcatcatgctggtggcgcacaggcatggcatgaccagtggagactacgccttcttcaacattgagctcttcaacagctcttcctatggagatggctcatggaagagaggagacaaacacgactttgaagctaagcaagcatactcgtccctccagacagtcactctactgaggacagtgaaacctgagtttgagaagttttccatggaggtgaaaagttcagttgagaaacaagggctcaatatggaggattacgttaacatgtttgttgaaggattccacgatgccatcctcctctacgtcttggctctacatgaagtactcagagctggttacagcaaaaaggatggagggaaaattatacagcagacttggaacagaacatttgaaggtatcgccgggcaggtgtccatagatgccaacggagaccgatatggggatttctctgtgattgccatgactgatgtggaggcgggcacccaggaggttattggtgattattttggaaaagaaggtcgttttgaaatgcggccgaatgtcaaatatccttggggccctttaaaactgagaatagatgaaaaccgaattgtagagcatacaaacagctctccctgcaaatcatcaggtggcctagaagaatcggcagtgacaggaattgtcgtgggggctttactaggagctggcttgctaatggccttctactttttcaggaagaaatacagaataaccattgagaggcgaacccagcaagaagaaagtaaccttggaaaacatcgggaattacgggaagattccatcagatcccatttttcagtagcttaaaggaagccccccactttttttttttctgcctgagattctttaaggagatagacgggttgaaagacatcaatgaaacagaaggggcgttcttgaagaattcataattttaagcagttagtaatttcattttaaaatttctgtagaagctcaggaattatgattaatcaccatctgcctccaggcctttcatctcatgacaaacaaatataataatgatatcgtgtcactctgttaaatgttcatactgtttcaagcccatatgattagatttatgtttttaaaatctgttgtctccatatcttgatggcttttgggagcatttcacacaaggatataaaatgcggttttcttaaatgaaatgttttgtagctagaataaaatcatttttacaagtacagcattcttggaaagaatttaacacccaaaaaggggaaaatgtaatgaaaaatctcaaggttggaaatacagccttactctctct

SEQ ID NO: 157825 - DNA, 1753 bp, Homo sapiens
  Payload ID: 10934
  Gene Symbol: NPR3
  Gene Name: natriuretic peptide receptor 3
  Uniprot ID: P17342
  ENST ID: ENST00000415167
  CDS Start-End: 55-1677
ggggggcagagggcgagtcggcggcggcgagggcaagctctttcttgcggcacgatgccgtctctgctggtgctcactttctccccgtgcgtactactcggctgggcgttgctggccggcggcaccggtggcggtggcgttggcggcggcggcggtggcgcgggcataggcggcggacgccaggagagagaggcgctgccgccacagaagatcgaggtgctggtgttactgccccaggatgactcgtacttgttttcactcacccgggtgcggccggccatcgagtatgctctgcgcagcgtggagggcaacgggactgggaggcggcttctgccgccgggcactcgcttccaggtggcttacgaggattcagactgtgggaaccgtgcgctcttcagcttggtggaccgcgtggcggcggcgcggggcgccaagccagaccttatcctggggccagtgtgcgagtatgcagcagcgccagtggcccggcttgcatcgcactgggacctgcccatgctgtcggctggggcgctggccgctggcttccagcacaaggactctgagtactcgcacctcacgcgcgtggcgcccgcctacgccaagatgggcgagatgatgctcgccctgttccgccaccaccactggagccgcgctgcactggtctacagcgacgacaagctggagcggaactgctacttcaccctcgagggggtccacgaggtcttccaggaggagggtttgcacacgtccatctacagtttcgacgagaccaaagacttggatctggaagacatcgtgcgcaatatccaggccagtgagagagtggtgatcatgtgtgcgagcagtgacaccatccggagcatcatgctggtggcgcacaggcatggcatgaccagtggagactacgccttcttcaacattgagctcttcaacagctcttcctatggagatggctcatggaagagaggagacaaacacgactttgaagctaagcaagcatactcgtccctccagacagtcactctactgaggacagtgaaacctgagtttgagaagttttccatggaggtgaaaagttcagttgagaaacaagggctcaatatggaggattacgttaacatgtttgttgaaggattccacgatgccatcctcctctacgtcttggctctacatgaagtactcagagctggttacagcaaaaaggatggagggaaaattatacagcagacttggaacagaacatttgaaggtatcgccgggcaggtgtccatagatgccaacggagaccgatatggggatttctctgtgattgccatgactgatgtggaggcgggcacccaggaggttattggtgattattttggaaaagaaggtcgttttgaaatgcggccgaatgtcaaatatccttggggccctttaaaactgagaatagatgaaaaccgaattgtagagcatacaaacagctctccctgcaaatcatgtggcctagaagaatcggcagtgacaggaattgtcgtgggggctttactaggagctggcttgctaatggccttctactttttcaggaagaaatacagaataaccattgagaggcgaacccagcaagaagaaagtaaccttggaaaacatcgggaattacgggaagattccatcagatcccatttttcagtagcttaaaggaagccccccactttttttttttctgcctgagattctttaaggagatagacgggttgaaagacatcaatgaaac

SEQ ID NO: 157826 - DNA, 660 bp, Homo sapiens
  Payload ID: 10934
  Gene Symbol: NPR3
  Gene Name: natriuretic peptide receptor 3
  ENST ID: ENST00000507141
  CDS Start-End: 1-265
cgagatgatgctcgccctgttccgccaccaccactggagccgcgctgcactggtctacagcgacgacaagctggagcggaactgctacttcaccctcgagggggtccacgaggtcttccaggaggagggtttgcacacgtccatctacagtttcgacgagaccaaagacttggatctggaagacatcgtgcgcaatatccaggccagtgagagagttttaggtcttatctgttggaatcccagtggaagaaaattctcttcttgatcattctactgcctgttaaccacacatgcaagctttctttccagtcatctttccaatatggttgtgccaaaatttttctcagtaggctgaggcaggaggattgcttgagtccaagagtttgaggctatggattgccctatttgaatagccactgcattccagcctgggcaacatagctagaccccatctcttacacaatattttttagttagttcagtattcagtataaatattatcattactttctaaatgatatttaaggttaagtcacataggcttctatgttgacatttccttttttccccctacctattttccttggagttaaaacagtctgtttttgtttatttgcttaatttcctatggatttataattaaataatcttctaattctt

SEQ ID NO: 157827 - DNA, 774 bp, Homo sapiens
  Payload ID: 10934
  Gene Symbol: NPR3
  Gene Name: natriuretic peptide receptor 3
  ENST ID: ENST00000509104
  CDS Start-End: 18-774
cttctttgcgtggcagcatggcagagggatgtgctgtgtacggaacctggccctggggagggatgttccagctgttccggccttctgcccttgctggcctctgctccataggactggtggtgatcatgtgtgcgagcagtgacaccatccggagcatcatgctggtggcgcacaggcatggcatgaccagtggagactacgccttcttcaacattgagctcttcaacagctcttcctatggagatggctcatggaagagaggagacaaacacgactttgaagctaagcaagcatactcgtccctccagacagtcactctactgaggacagtgaaacctgagtttgagaagttttccatggaggtgaaaagttcagttgagaaacaagggctcaatatggaggattacgttaacatgtttgttgaaggattccacgatgccatcctcctctacgtcttggctctacatgaagtactcagagctggttacagcaaaaaggatggagggaaaattatacagcagacttggaacagaacatttgaaggtatcgccgggcaggtgtccatagatgccaacggagaccgatatggggatttctctgtgattgccatgactgatgtggaggcgggcacccaggaggttattggtgattattttggaaaagaaggtcgttttgaaatgcggccgaatgtcaaatatccttggggccctttaaaactgagaatagatgaaaaccgaattgtagagcatacaaacagctctccctgcaaatcat

SEQ ID NO: 157828 - DNA, 1155 bp, Homo sapiens
  Payload ID: 10935
  Gene Symbol: NCR1
  Gene Name: natural cytotoxicity triggering receptor 1
  ENST ID: ENST00000291890
  CDS Start-End: 39-953
tccccactgctcagcactaggccggcagaatctgagcgatgtcttccacactccctgccctgctctgcgtcgggctgtgtctgagtcagaggatcagcgcccagcagcagactctcccaaaaccgttcatctgggccgagccccatttcatggttccaaaggaaaagcaagtgaccatctgttgccagggaaattatggggctgttgaataccagctgcactttgaaggaagcctttttgccgtggacagaccaaaaccccctgagcggattaacaaagtccaattctacatcccggacatgaactcccgcatggcagggcaatacagctgcatctatcgggttggggagctctggtcagagcccagcaacttgctggatctggtggtaacagaaatgtatgacacacccaccctctcggttcatcctggacccgaagtgatctcgggagagaaggtgaccttctactgccgtctagacactgcaacaagcatgttcttactgctcaaggagggaagatccagccacgtacagcgcggatacgggaaggtccaggcggagttccccctgggccctgtgaccacagcccacagagggacataccgatgttttggctcctataacaaccatgcctggtctttccccagtgagccagtgaagctcctggtcacaggcgacattgagaacaccagccttgcacctgaagaccccacctttcctgcagacacttggggcacctaccttttaaccacagagacgggactccagaaagaccatgccctctgggatcacactgcccagaatctccttcggatgggcctggcctttctagtcctggtggctctagtgtggttcctggttgaagactggctcagcaggaagaggactagagagcgagccagcagagcttccacttgggaaggcaggagaaggctgaacacacagactctttgaagaatgaccatgagacacagtggccatgggtggatctgaaagctggtgttgagcctgggcggcgtgagctctgtgttggacccacggaggagggagtcactgcagggaaagagggacactggcattccatttgtcagagcatcccggacgatgcagagggtgggagaactacatgctaaatttctttttttttttttttgag

SEQ ID NO: 157829 - DNA, 973 bp, Homo sapiens
  Payload ID: 10935
  Gene Symbol: NCR1
  Gene Name: natural cytotoxicity triggering receptor 1
  ENST ID: ENST00000338835
  CDS Start-End: 8-871
ctgagcgatgtcttccacactccctgccctgctctgcgtcgggctgtgtctgagtcagaggatcagcgcccagcagcagactctcccaaaaccgttcatctgggccgagccccatttcatggttccaaaggaaaagcaagtgaccatctgttgccagggaaattatggggctgttgaataccagctgcactttgaaggaagcctttttgccgtggacagaccaaaaccccctgagcggattaacaaagtccaattctacatcccggacatgaactcccgcatggcagggcaatacagctgcatctatcgggttggggagctctggtcagagcccagcaacttgctggatctggtggtaacagaaatgtatgacacacccaccctctcggttcatcctggacccgaagtgatctcgggagagaaggtgaccttctactgccgtctagacactgcaacaagcatgttcttactgctcaaggagggaagatccagccacgtacagcgcggatacgggaaggtccaggcggagttccccctgggccctgtgaccacagcccacagagggacataccgatgttttggctcctataacaaccatgcctggtctttccccagtgagccagtgaagctcctggtcacaggcgacattgagaacaccagccttgcacctgaagaccccacctttcctgaccatgccctctgggatcacactgcccagaatctccttcggatgggcctggcctttctagtcctggtggctctagtgtggttcctggttgaagactggctcagcaggaagaggactagagagcgagccagcagagcttccacttgggaaggcaggagaaggctgaacacacagactctttgaagaatgaccatgagacacagtggccatgggtggatctgaaagctggtgttgagcctgggcggcgtgagctctgtgttggacccacggaggagggagtcactg

SEQ ID NO: 157830 - DNA, 739 bp, Homo sapiens
  Payload ID: 10935
  Gene Symbol: NCR1
  Gene Name: natural cytotoxicity triggering receptor 1
  Uniprot ID: O76036
  ENST ID: ENST00000350790
  CDS Start-End: 8-637
ctgagcgatgtcttccacactccctgccctgctctgcgtcgggctgtgtctgagtcagaggatcagcgcccagcagcaaatgtatgacacacccaccctctcggttcatcctggacccgaagtgatctcgggagagaaggtgaccttctactgccgtctagacactgcaacaagcatgttcttactgctcaaggagggaagatccagccacgtacagcgcggatacgggaaggtccaggcggagttccccctgggccctgtgaccacagcccacagagggacataccgatgttttggctcctataacaaccatgcctggtctttccccagtgagccagtgaagctcctggtcacaggcgacattgagaacaccagccttgcacctgaagaccccacctttcctgcagacacttggggcacctaccttttaaccacagagacgggactccagaaagaccatgccctctgggatcacactgcccagaatctccttcggatgggcctggcctttctagtcctggtggctctagtgtggttcctggttgaagactggctcagcaggaagaggactagagagcgagccagcagagcttccacttgggaaggcaggagaaggctgaacacacagactctttgaagaatgaccatgagacacagtggccatgggtggatctgaaagctggtgttgagcctgggcggcgtgagctctgtgttggacccacggaggagggagtcactg

SEQ ID NO: 157831 - DNA, 594 bp, Homo sapiens
  Payload ID: 10935
  Gene Symbol: NCR1
  Gene Name: natural cytotoxicity triggering receptor 1
  Uniprot ID: O76036
  ENST ID: ENST00000357397
  CDS Start-End: 1-594
atgtcttccacactccctgccctgctctgcgtcgaaatgtatgacacacccaccctctcggttcatcctggacccgaagtgatctcgggagagaaggtgaccttctactgccgtctagacactgcaacaagcatgttcttactgctcaaggagggaagatccagccacgtacagcgcggatacgggaaggtccaggcggagttccccctgggccctgtgaccacagcccacagagggacataccgatgttttggctcctataacaaccatgcctggtctttccccagtgagccagtgaagctcctggtcacaggcgacattgagaacaccagccttgcacctgaagaccccacctttcctgcagacacttggggcacctaccttttaaccacagagacgggactccagaaagaccatgccctctgggatcacactgcccagaatctccttcggatgggcctggcctttctagtcctggtggctctagtgtggttcctggttgaagactggctcagcaggaagaggactagagagcgagccagcagagcttccacttgggaaggcaggagaaggctgaacacacagactctttga

SEQ ID NO: 157832 - DNA, 996 bp, Homo sapiens
  Payload ID: 10935
  Gene Symbol: NCR1
  Gene Name: natural cytotoxicity triggering receptor 1
  ENST ID: ENST00000598576
  CDS Start-End: 33-908
ctgctcagcactaggccggcagaatctgagcgatgtcttccacactccctgccctgctctgcgtcgagactctcccaaaaccgttcatctgggccgagccccatttcatggttccaaaggaaaagcaagtgaccatctgttgccagggaaattatggggctgttgaataccagctgcactttgaaggaagcctttttgccgtggacagaccaaaaccccctgagcggattaacaaagtccaattctacatcccggacatgaactcccgcatggcagggcaatacagctgcatctatcgggttggggagctctggtcagagcccagcaacttgctggatctggtggtaacagaaatgtatgacacacccaccctctcggttcatcctggacccgaagtgatctcgggagagaaggtgaccttctactgccgtctagacactgcaacaagcatgttcttactgctcaaggagggaagatccagccacgtacagcgcggatacgggaaggtccaggcggagttccccctgggccctgtgaccacagcccacagagggacataccgatgttttggctcctataacaaccatgcctggtctttccccagtgagccagtgaagctcctggtcacaggcgacattgagaacaccagccttgcacctgaagaccccacctttcctgacacttggggcacctaccttttaaccacagagacgggactccagaaagaccatgccctctgggatcacactgcccagaatctccttcggatgggcctggcctttctagtcctggtggctctagtgtggttcctggttgaagactggctcagcaggaagaggactagagagcgagccagcagagcttccacttgggaaggcaggagaaggctgaacacacagactctttgaagaatgaccatgagacacagtggccatgggtggatctgaaagctggtgttgagcctgggcggcgtgagctctgtgttggacccacgga

SEQ ID NO: 157833 - DNA, 1612 bp, Homo sapiens
  Payload ID: 10935
  Gene Symbol: NCR1
  Gene Name: natural cytotoxicity triggering receptor 1
  ENST ID: ENST00000594765
  CDS Start-End: 26-937
gcactaggccggcagaatctgagcgatgtcttccacactccctgccctgctctgcgtcgggctgtgtctgagtcagaggatcagcgcccagcagcagactctcccaaaaccgttcatctgggccgagccccatttcatggttccaaaggaaaagcaagtgaccatctgttgccagggaaattatggggctgttgaataccagctgcactttgaaggaagcctttttgccgtggacagaccaaaaccccctgagcggattaacaaagtccaattctacatcccggacatgaactcccgcatggcagggcaatacagctgcatctatcgggttggggagctctggtcagagcccagcaacttgctggatctggtggtaacagaaatgtatgacacacccaccctctcggttcatcctggacccgaagtgatctcgggagagaaggtgaccttctactgccgtctagacactgcaacaagcatgttcttactgctcaaggagggaagatccagccacgtacagcgcggatacgggaaggtccaggcggagttccccctgggccctgtgaccacagcccacagagggacataccgatgttttggctcctataacaaccatgcctggtctttccccagtgagccagtgaagctcctggtcacaggcgacattgagaacaccagccttgcacctgaagaccccacctttcctgacacttggggcacctaccttttaaccacagagacgggactccagaaagaccatgccctctgggatcacactgcccagaatctccttcggatgggcctggcctttctagtcctggtggctctagtgtggttcctggttgaagactggctcagcaggaagaggactagagagcgagccagcagagcttccacttgggaaggcaggagaaggctgaacacacagactctttgaagaatgaccatgagacacagtggccatgggtggatctgaaagctggtgttgagcctgggcggcgtgagctctgtgttggacccacggaggagggagtcactgcagggaaagagggacactggcattccatttgtcagagcatcccggacgatgcagagggtgggagaactacatgctaaatttctttttttttttttttgagacagagttttctcttgttgcccaggctggagtgcaatggcgcgatcttggctcactgcaacctctagctctccatccctcgggagaatcgcttgaacctgggaggcggaggttgcggtgagccaaaatcgtgccactgcactccagcctgggcgacagagcgagactccatctcaaaaaaaaaaaaaaaaaaaccacataggctcagtcttttcagtatctgctttactggttcagtaaaagccaggaaacacaactttgtggtaatctgaatgttattgaactgtattttgttcactttattgtaaatactagtgaacagtgaataaatggttgtatattcctaataagaaaaaaaaaaaaaaagacccaaagtacagcgagctgatgccgatctcatttcgcagaggtccgcctgctctcccctctccaagagtgtaatcctatgcttaataaacttatgccgctttgcta

SEQ ID NO: 157834 - DNA, 688 bp, Homo sapiens
  Payload ID: 10935
  Gene Symbol: NCR1
  Gene Name: natural cytotoxicity triggering receptor 1
  Uniprot ID: O76036
  ENST ID: ENST00000621652
  CDS Start-End: 8-586
ctgagcgatgtcttccacactccctgccctgctctgcgtcgggctgtgtctgagtcagaggatcagcgcccagcagcaaatgtatgacacacccaccctctcggttcatcctggacccgaagtgatctcgggagagaaggtgaccttctactgccgtctagacactgcaacaagcatgttcttactgctcaaggagggaagatccagccacgtacagcgcggatacgggaaggtccaggcggagttccccctgggccctgtgaccacagcccaccgagggacataccgatgttttggctcctataacaaccatgcctggtctttccccagtgagccagtgaagctcctggtcacaggcgacattgagaacaccagccttgcacctgaagaccccacctttcctgaccatgccctctgggatcacactgcccagaatctccttcggatgggcctggcctttctagtcctggtggctctagtgtggttcctggttgaagactggctcagcaggaagaggactagagagcgagccagcagagcttccacttgggaaggcaggagaaggctgaacacacagactctttgaagaatgaccatgagacacagtggccatgggtggatctgaaagctggtgttgagcctgggcggcgtgagctctgtgttggacccacggaggagggagtcactg

SEQ ID NO: 157835 - DNA, 678 bp, Homo sapiens
  Payload ID: 10935
  Gene Symbol: NCR1
  Gene Name: natural cytotoxicity triggering receptor 1
  ENST ID: ENST00000616747
  CDS Start-End: 33-678
ctgctcagcactaggccggcagaatctgagcgatgtcttccacactccctgccctgctctgcgtcgagactctcccaaaaccgttcatctgggccgagccccatttcatggttccaaaggaaaagcaagtgaccatctgttgccagggaaattatggggctgttgaataccagctgcactttgaaggaagcctttttgccgtggacagaccaaaaccccctgagcggattaacaaagtccaattctacatcccggacatgaactcccgcatggcagggcaatacagctgcatctatcgggttggggagctctggtcagagcccagcaacttgctggatctggtggtaacagaaatgtatgacacacccaccctctcggttcatcctggacccgaagtgatctcgggagagaaggtgaccttctactgccgtctagacactgcaacaagcatgttcttactgctcaaggagggaagatccagccacgtacagcgcggatacgggaaggtccaggcggagttccccctgggccctgtgaccacagcccacagagggacataccgatgttttggctcctataacaaccatgcctggtctttccccagtgagccagtgaagctcctggtcacaggcgacattgagaacaccagccttgcacctgaagaccccacctttcctg

SEQ ID NO: 157836 - DNA, 720 bp, Homo sapiens
  Payload ID: 10935
  Gene Symbol: NCR1
  Gene Name: natural cytotoxicity triggering receptor 1
  ENST ID: ENST00000611233
  CDS Start-End: 39-720
tccccactgctcagcactaggccggcagaatctgagcgatgtcttccacactccctgccctgctctgcgtcgggctgtgtctgagtcagaggatcagcgcccagcagcagactctcccaaaaccgttcatctgggccgagccccatttcatggttccaaaggaaaagcaagtgaccatctgttgccagggaaattatggggctgttgaataccagctgcactttgaaggaagcctttttgccgtggacagaccaaaaccccctgagcggattaacaaagtccaattctacatcccggacatgaactcccgcatggcagggcaatacagctgcatctatcgggttggggagctctggtcagagcccagcaacttgctggatctggtggtaacagaaatgtatgacacacccaccctctcggttcatcctggacccgaagtgatctcgggagagaaggtgaccttctactgccgtctagacactgcaacaagcatgttcttactgctcaaggagggaagatccagccacgtacagcgcggatacgggaaggtccaggcggagttccccctgggccctgtgaccacagcccacagagggacataccgatgttttggctcctataacaaccatgcctggtctttccccagtgagccagtgaagctcctggtcacaggcgacattgagaacaccagccttgcacctgaagaccccacctttcctg

SEQ ID NO: 157837 - DNA, 678 bp, Homo sapiens; identical to SEQ ID NO: 157835
  Payload ID: 10935
  Gene Symbol: NCR1
  Gene Name: natural cytotoxicity triggering receptor 1
  ENST ID: ENST00000619741
  CDS Start-End: 33-678

SEQ ID NO: 157838 - DNA, 707 bp, Homo sapiens
  Payload ID: 10935
  Gene Symbol: NCR1
  Gene Name: natural cytotoxicity triggering receptor 1
  ENST ID: ENST00000622620
  CDS Start-End: 26-707
gcactaggccggcagaatctgagcgatgtcttccacactccctgccctgctctgcgtcgggctgtgtctgagtcagaggatcagcgcccagcagcagactctcccaaaaccgttcatctgggccgagccccatttcatggttccaaaggaaaagcaagtgaccatctgttgccagggaaattatggggctgttgaataccagctgcactttgaaggaagcctttttgccgtggacagaccaaaaccccctgagcggattaacaaagtccaattctacatcccggacatgaactcccgcatggcagggcaatacagctgcatctatcgggttggggagctctggtcagagcccagcaacttgctggatctggtggtaacagaaatgtatgacacacccaccctctcggttcatcctggacccgaagtgatctcgggagagaaggtgaccttctactgccgtctagacactgcaacaagcatgttcttactgctcaaggagggaagatccagccacgtacagcgcggatacgggaaggtccaggcggagttccccctgggccctgtgaccacagcccacagagggacataccgatgttttggctcctataacaaccatgcctggtctttccccagtgagccagtgaagctcctggtcacaggcgacattgagaacaccagccttgcacctgaagaccccacctttcctg

SEQ ID NO: 157839 - DNA, 404 bp, Homo sapiens
  Payload ID: 10935
  Gene Symbol: NCR1
  Gene Name: natural cytotoxicity triggering receptor 1
  ENST ID: ENST00000611120
  CDS Start-End: 8-404
ctgagcgatgtcttccacactccctgccctgctctgcgtcgggctgtgtctgagtcagaggatcagcgcccagcagcaaatgtatgacacacccaccctctcggttcatcctggacccgaagtgatctcgggagagaaggtgaccttctactgccgtctagacactgcaacaagcatgttcttactgctcaaggagggaagatccagccacgtacagcgcggatacgggaaggtccaggcggagttccccctgggccctgtgaccacagcccacagagggacataccgatgttttggctcctataacaaccatgcctggtctttccccagtgagccagtgaagctcctggtcacaggcgacattgagaacaccagccttgcacctgaagaccccacctttcctg

SEQ ID NO: 157840 - DNA, 996 bp, Homo sapiens
  Payload ID: 10935
  Gene Symbol: NCR1
  Gene Name: natural cytotoxicity triggering receptor 1
  ENST ID: ENST00000611318
  CDS Start-End: 33-908
ctgctcagcactaggccggcagaatctgagcgatgtcttccacactccctgccctgctctgcgtcgagactctcccaaaaccgttcatctgggccgagccccatttcatggttccaaaggaaaagcaagtgaccatctgttgccagggaaattatggggctgttgaataccagctgcactttgaaggaagcctttttgccgtggacagaccaaaaccccctgagcggattaacaaagtcaaattctacatcccggacatgaactcccgcatggcagggcaatacagctgcatctatcgggttggggagctctggtcagagcccagcaacttgctggatctggtggtaacagaaatgtatgacacacccaccctctcggttcatcctggacccgaagtgatctcgggagagaaggtgaccttctactgccgtctagacactgcaacaagcatgttcttactgctcaaggagggaagatccagccacgtacagcgcggatacgggaaggtccaggcggagttccccctgggccctgtgaccacagcccaccgagggacataccgatgttttggctcctataacaaccatgcctggtctttccccagtgagccagtgaagctcctggtcacaggcgacattgagaacaccagccttgcacctgaagaccccacctttcctgacacttggggcacctaccttttaaccacagagacgggactccagaaagaccatgccctctgggatcacactgcccagaatctccttcggatgggcctggcctttctagtcctggtggctctagtgtggttcctggttgaagactggctcagcaggaagaggactagagagcgagccagcagagcttccacttgggaaggcaggagaaggctgaacacacagactctttgaagaatgaccatgagacacagtggccatgggtggatctgaaagctggtgttgagcctgggcggcgtgagctctgtgttggacccacgga

SEQ ID NO: 157841 - DNA, 1628 bp, Homo sapiens
  Payload ID: 10935
  Gene Symbol: NCR1
  Gene Name: natural cytotoxicity triggering receptor 1
  Uniprot ID: O76036
  ENST ID: ENST00000615622
  CDS Start-End: 39-953
tccccactgctcagcactaggccggcagaatctgagcgatgtcttccacactccctgccctgctctgcgtcgggctgtgtctgagtcagaggatcagcgcccagcagcagactctcccaaaaccgttcatctgggccgagccccatttcatggttccaaaggaaaagcaagtgaccatctgttgccagggaaattatggggctgttgaataccagctgcactttgaaggaagcctttttgccgtggacagaccaaaaccccctgagcggattaacaaagtcaaattctacatcccggacatgaactcccgcatggcagggcaatacagctgcatctatcgggttggggagctctggtcagagcccagcaacttgctggatctggtggtaacagaaatgtatgacacacccaccctctcggttcatcctggacccgaagtgatctcgggagagaaggtgaccttctactgccgtctagacactgcaacaagcatgttcttactgctcaaggagggaagatccagccacgtacagcgcggatacgggaaggtccaggcggagttccccctgggccctgtgaccacagcccaccgagggacataccgatgttttggctcctataacaaccatgcctggtctttccccagtgagccagtgaagctcctggtcacaggcgacattgagaacaccagccttgcacctgaagaccccacctttcctgcagacacttggggcacctaccttttaaccacagagacgggactccagaaagaccatgccctctgggatcacactgcccagaatctccttcggatgggcctggcctttctagtcctggtggctctagtgtggttcctggttgaagactggctcagcaggaagaggactagagagcgagccagcagagcttccacttgggaaggcaggagaaggctgaacacacagactctttgaagaatgaccatgagacacagtggccatgggtggatctgaaagctggtgttgagcctgggcggcgtgagctctgtgttggacccacggaggagggagtcactgcagggaaagagggacactggcattccatttgtcagagcatcccggacgatgcagagggtgggagaactacatgctaaatttctttttttttttttttgagacagagttttctcttgttgcccaggctggagtgcaatggcgcgatcttggctcactgcaacctctagctctccatccctcgggagaatcgcttgaacctgggaggcggaggttgcggtgagccaaaatcgtgccactgcactccagcctgggcgacagagcgagactccatctcaaaaaaaaaaaaaaaaaaaccacataggctcagtcttttcagtatctgctttactggttcagtaaaagccaggaaacacaactttgtggtaatctgaatgttattgaactgtattttgttcactttattgtaaatactagtgaacagtgaataaatggttgtatattcctaataagaaaaaaaaaaaaaaagacccaaagtacagcgagctgatgccgatctcatttcgcagaggtccgcctgctctcccctctccaagagtgtaatcctatgcttaataaacttatgccgctttgcta

SEQ ID NO: 157842 - DNA, 689 bp, Homo sapiens
  Payload ID: 10935
  Gene Symbol: NCR1
  Gene Name: natural cytotoxicity triggering receptor 1
  ENST ID: ENST00000611792
  CDS Start-End: 8-689
ctgagcgatgtcttccacactccctgccctgctctgcgtcgggctgtgtctgagtcagaggatcagcgcccagcagcagactctcccaaaaccgttcatctgggccgagccccatttcatggttccaaaggaaaagcaagtgaccatctgttgccagggaaattatggggctgttgaataccagctgcactttgaaggaagcctttttgccgtggacagaccaaaaccccctgagcggattaacaaagtccaattctacatcccggacatgaactcccgcatggcagggcaatacagctgcatctatcgggttggggagctctggtcagagcccagcaacttgctggatctggtggtaacagaaatgtatgacacacccaccctctcggttcatcctggacccgaagtgatctcgggagagaaggtgaccttctactgccgtctagacactgcaacaagcatgttcttactgctcaaggagggaagatccagccacgtacagcgcggatacgggaaggtccaggcggagttccccctgggccctgtgaccacagcccacagagggacataccgatgttttggctcctataacaaccatgcctggtctttccccagtgagccagtgaagctcctggtcacaggcgacattgagaacaccagccttgcacctgaagaccccacctttcctg

SEQ ID NO: 157843 - DNA, 1161 bp, Homo sapiens
  Payload ID: 10935
  Gene Symbol: NCR1
  Gene Name: natural cytotoxicity triggering receptor 1
  ENST ID: ENST00000611561
  CDS Start-End: 39-953
tccccactgctcagcactaggccggcagaatctgagcgatgtcttccacactccctgccctgctctgcgtcgggctgtgtctgagtcagaggatcagcgcccagcagcagactctcccaaaaccgttcatctgggccgagccccatttcatggttccaaaggaaaagcaagtgaccatctgttgccagggaaattatggggctgttgaataccagctgcactttgaaggaagcctttttgccgtggacagaccaaaaccccctgagcggattaacaaagtcaaattctacatcccggacatgaactcccgcatggcagggcaatacagctgcatctatcgggttggggagctctggtcagagcccagcaacttgctggatctggtggtaacagaaatgtatgacacacccaccctctcggttcatcctggacccgaagtgatctcgggagagaaggtgaccttctactgccgtctagacactgcaacaagcatgttcttactgctcaaggagggaagatccagccacgtacagcgcggatacgggaaggtccaggcggagttccccctgggccctgtgaccacagcccaccgagggacataccgatgttttggctcctataacaaccatgcctggtctttccccagtgagccagtgaagctcctggtcacaggcgacattgagaacaccagccttgcacctgaagaccccacctttcctgcagacacttggggcacctaccttttaaccacagagacgggactccagaaagaccatgccctctgggatcacactgcccagaatctccttcggatgggcctggcctttctagtcctggtggctctagtgtggttcctggttgaagactggctcagcaggaagaggactagagagcgagccagcagagcttccacttgggaaggcaggagaaggctgaacacacagactctttgaagaatgaccatgagacacagtggccatgggtggatctgaaagctggtgttgagcctgggcggcgtgagctctgtgttggacccacggaggagggagtcactgcagggaaagagggacactggcattccatttgtcagagcatcccggacgatgcagagggtgggagaactacatgctaaatttctttttttttttttttgagacagag

SEQ ID NO: 157844 - DNA, 720 bp, Homo sapiens; identical to SEQ ID NO: 157836
  Payload ID: 10935
  Gene Symbol: NCR1
  Gene Name: natural cytotoxicity triggering receptor 1
  ENST ID: ENST00000614976
  CDS Start-End: 39-720

SEQ ID NO: 157845 - DNA, 1102 bp, Homo sapiens
  Payload ID: 10935
  Gene Symbol: NCR1
  Gene Name: natural cytotoxicity triggering receptor 1
  ENST ID: ENST00000614638
  CDS Start-End: 39-902
tccccactgctcagcactaggccggcagaatctgagcgatgtcttccacactccctgccctgctctgcgtcgggctgtgtctgagtcagaggatcagcgcccagcagcagactctcccaaaaccgttcatctgggccgagccccatttcatggttccaaaggaaaagcaagtgaccatctgttgccagggaaattatggggctgttgaataccagctgcactttgaaggaagcctttttgccgtggacagaccaaaaccccctgagcggattaacaaagtcaaattctacatcccggacatgaactcccgcatggcagggcaatacagctgcatctatcgggttggggagctctggtcagagcccagcaacttgctggatctggtggtaacagaaatgtatgacacacccaccctctcggttcatcctggacccgaagtgatctcgggagagaaggtgaccttctactgccgtctagacactgcaacaagcatgttcttactgctcaaggagggaagatccagccacgtacagcgcggatacgggaaggtccaggcggagttccccctgggccctgtgaccacagcccaccgagggacataccgatgttttggctcctataacaaccatgcctggtctttccccagtgagccagtgaagctcctggtcacaggcgacattgagaacaccagccttgcacctgaagaccccacctttcctgaccatgccctctgggatcacactgcccagaatctccttcggatgggcctggcctttctagtcctggtggctctagtgtggttcctggttgaagactggctcagcaggaagaggactagagagcgagccagcagagcttccacttgggaaggcaggagaaggctgaacacacagactctttgaagaatgaccatgagacacagtggccatgggtggatctgaaagctggtgttgagcctgggcggcgtgagctctgtgttggacccacggaggagggagtcactgcagggaaagagggacactggcattccatttgtcagagcatcccggacgatgcagagggtgggagaactacatgctaaatttctttttttttttttttg

SEQ ID NO: 157846 - DNA, 361 bp, Homo sapiens
  Payload ID: 10935
  Gene Symbol: NCR1
  Gene Name: natural cytotoxicity triggering receptor 1
  ENST ID: ENST00000611122
  CDS Start-End: 1-361
atgtcttccacactccctgccctgctctgcgtcgaaatgtatgacacacccaccctctcggttcatcctggacccgaagtgatctcgggagagaaggtgaccttctactgccgtctagacactgcaacaagcatgttcttactgctcaaggagggaagatccagccacgtacagcgcggatacgggaaggtccaggcggagttccccctgggccctgtgaccacagcccacagagggacataccgatgttttggctcctataacaaccatgcctggtctttccccagtgagccagtgaagctcctggtcacaggcgacattgagaacaccagccttgcacctgaagaccccacctttcctg

SEQ ID NO: 157847 - DNA, 594 bp, Homo sapiens
  Payload ID: 10935
  Gene Symbol: NCR1
  Gene Name: natural cytotoxicity triggering receptor 1
  Uniprot ID: O76036
  ENST ID: ENST00000611098
  CDS Start-End: 1-594
atgtcttccacactccctgccctgctctgcgtcgaaatgtatgacacacccaccctctcggttcatcctggacccgaagtgatctcgggagagaaggtgaccttctactgccgtctagacactgcaacaagcatgttcttactgctcaaggagggaagatccagccacgtacagcgcggatacgggaaggtccaggcggagttccccctgggccctgtgaccacagcccaccgagggacataccgatgttttggctcctataacaaccatgcctggtctttccccagtgagccagtgaagctcctggtcacaggcgacattgagaacaccagccttgcacctgaagaccccacctttcctgcagacacttggggcacctaccttttaaccacagagacgggactccagaaagaccatgccctctgggatcacactgcccagaatctccttcggatgggcctggcctttctagtcctggtggctctagtgtggttcctggttgaagactggctcagcaggaagaggactagagagcgagccagcagagcttccacttgggaaggcaggagaaggctgaacacacagactctttga

SEQ ID NO: 157848 - DNA, 404 bp, Homo sapiens; identical to SEQ ID NO: 157839
  Payload ID: 10935
  Gene Symbol: NCR1
  Gene Name: natural cytotoxicity triggering receptor 1
  ENST ID: ENST00000612194
  CDS Start-End: 8-404

SEQ ID NO: 157849 - DNA, 594 bp, Homo sapiens; identical to SEQ ID NO: 157847
  Payload ID: 10935
  Gene Symbol: NCR1
  Gene Name: natural cytotoxicity triggering receptor 1
  Uniprot ID: O76036
  ENST ID: ENST00000616677
  CDS Start-End: 1-594

SEQ ID NO: 157850 - DNA, 1102 bp, Homo sapiens; identical to SEQ ID NO: 157845
  Payload ID: 10935
  Gene Symbol: NCR1
  Gene Name: natural cytotoxicity triggering receptor 1
  ENST ID: ENST00000619679
  CDS Start-End: 39-902

SEQ ID NO: 157851 - DNA, 720 bp, Homo sapiens; identical to SEQ ID NO: 157836
  Payload ID: 10935
  Gene Symbol: NCR1
  Gene Name: natural cytotoxicity triggering receptor 1
  ENST ID: ENST00000616780
  CDS Start-End: 39-720

SEQ ID NO: 157852 - DNA, 1161 bp, Homo sapiens; identical to SEQ ID NO: 157843
  Payload ID: 10935
  Gene Symbol: NCR1
  Gene Name: natural cytotoxicity triggering receptor 1
  ENST ID: ENST00000612403
  CDS Start-End: 39-953

SEQ ID NO: 157853 - DNA, 594 bp, Homo sapiens; identical to SEQ ID NO: 157847
  Payload ID: 10935
  Gene Symbol: NCR1
  Gene Name: natural cytotoxicity triggering receptor 1
  ENST ID: ENST00000615207
  CDS Start-End: 1-594

SEQ ID NO: 157854 - DNA, 868 bp, Homo sapiens
  Payload ID: 10935
  Gene Symbol: NCR1
  Gene Name: natural cytotoxicity triggering receptor 1
  ENST ID: ENST00000612577
  CDS Start-End: 39-668
tccccactgctcagcactaggccggcagaatctgagcgatgtcttccacactccctgccctgctctgcgtcgggctgtgtctgagtcagaggatcagcgcccagcagcaaatgtatgacacacccaccctctcggttcatcctggacccgaagtgatctcgggagagaaggtgaccttctactgccgtctagacactgcaacaagcatgttcttactgctcaaggagggaagatccagccacgtacagcgcggatacgggaaggtccaggcggagttccccctgggccctgtgaccacagcccaccgagggacataccgatgttttggctcctataacaaccatgcctggtctttccccagtgagccagtgaagctcctggtcacaggcgacattgagaacaccagccttgcacctgaagaccccacctttcctgcagacacttggggcacctaccttttaaccacagagacgggactccagaaagaccatgccctctgggatcacactgcccagaatctccttcggatgggcctggcctttctagtcctggtggctctagtgtggttcctggttgaagactggctcagcaggaagaggactagagagcgagccagcagagcttccacttgggaaggcaggagaaggctgaacacacagactctttgaagaatgaccatgagacacagtggccatgggtggatctgaaagctggtgttgagcctgggcggcgtgagctctgtgttggacccacggaggagggagtcactgcagggaaagagggacactggcattccatttgtcagagcatcccggacgatgcagagggtgggagaactacatgctaaatttctttttttttttttttg

SEQ ID NO: 157855 - DNA, 720 bp, Homo sapiens; identical to SEQ ID NO: 157836
  Payload ID: 10935
  Gene Symbol: NCR1
  Gene Name: natural cytotoxicity triggering receptor 1
  ENST ID: ENST00000617741
  CDS Start-End: 39-720

SEQ ID NO: 157856 - DNA, 1102 bp, Homo sapiens; identical to SEQ ID NO: 157845
  Payload ID: 10935
  Gene Symbol: NCR1
  Gene Name: natural cytotoxicity triggering receptor 1
  ENST ID: ENST00000617861
  CDS Start-End: 39-902

SEQ ID NO: 157857 - DNA, 1161 bp, Homo sapiens; identical to SEQ ID NO: 157843
  Payload ID: 10935
  Gene Symbol: NCR1
  Gene Name: natural cytotoxicity triggering receptor 1
  ENST ID: ENST00000621792
  CDS Start-End: 39-953

SEQ ID NO: 157858 - DNA, 1102 bp, Homo sapiens; identical to SEQ ID NO: 157845
  Payload ID: 10935
  Gene Symbol: NCR1
  Gene Name: natural cytotoxicity triggering receptor 1
  Uniprot ID: O76036
  ENST ID: ENST00000617304
  CDS Start-End: 39-902

SEQ ID NO: 157859 - DNA, 594 bp, Homo sapiens; identical to SEQ ID NO: 157847
  Payload ID: 10935
  Gene Symbol: NCR1
  Gene Name: natural cytotoxicity triggering receptor 1
  Uniprot ID: O76036
  ENST ID: ENST00000613135
  CDS Start-End: 1-594

SEQ ID NO: 157860 - DNA, 594 bp, Homo sapiens; identical to SEQ ID NO: 157847
  Payload ID: 10935
  Gene Symbol: NCR1
  Gene Name: natural cytotoxicity triggering receptor 1
  ENST ID: ENST00000621164
  CDS Start-End: 1-594

SEQ ID NO: 157861 - DNA, 361 bp, Homo sapiens; identical to SEQ ID NO: 157846
  Payload ID: 10935
  Gene Symbol: NCR1
  Gene Name: natural cytotoxicity triggering receptor 1
  ENST ID: ENST00000613253
  CDS Start-End: 1-361

SEQ ID NO: 157862 - DNA, 978 bp, Homo sapiens
  Payload ID: 10935
  Gene Symbol: NCR1
  Gene Name: natural cytotoxicity triggering receptor 1
  ENST ID: ENST00000618585
  CDS Start-End: 12-890
gaatctgagcgatgtcttccacactccctgccctgctctgcgtcgagactctcccaaaaccgttcatctgggccgagccccatttcatggttccaaaggaaaagcaagtgaccatctgttgccagggaaattatggggctgttgaataccagctgcactttgaaggaagcctttttgccgtggacagaccaaaaccccctgagcggattaacaaagtcaaattctacatcccggacatgaactcccgcatggcagggcaatacagctgcatctatcgggttggggagctctggtcagagcccagcaacttgctggatctggtggtaacagaaatgtatgacacacccaccctctcggttcatcctggacccgaagtgatctcgggagagaaggtgaccttctactgccgtctagacactgcaacaagcatgttcttactgctcaaggagggaagatccagccacgtacagcgcggatacgggaaggtccaggcggagttccccctgggccctgtgaccacagcccaccgagggacataccgatgttttggctcctataacaaccatgcctggtctttccccagtgagccagtgaagctcctggtcacaggcgacattgagaacaccagccttgcacctgaagaccccacctttcctgcagacacttggggcacctaccttttaaccacagagacgggactccagaaagaccatgccctctgggatcacactgcccagaatctccttcggatgggcctggcctttctagtcctggtggctctagtgtggttcctggttgaagactggctcagcaggaagaggactagagagcgagccagcagagcttccacttgggaaggcaggagaaggctgaacacacagactctttgaagaatgaccatgagacacagtggccatgggtggatctgaaagctggtgttgagcctgggcggcgtgagctctgtgttggacccacgga

SEQ ID NO: 157863 - DNA, 1161 bp, Homo sapiens; identical to SEQ ID NO: 157843
  Payload ID: 10935
  Gene Symbol: NCR1
  Gene Name: natural cytotoxicity triggering receptor 1
  ENST ID: ENST00000615717
  CDS Start-End: 39-953

SEQ ID NO: 157864 - DNA, 678 bp, Homo sapiens; identical to SEQ ID NO: 157835
  Payload ID: 10935
  Gene Symbol: NCR1
  Gene Name: natural cytotoxicity triggering receptor 1
  ENST ID: ENST00000616589
  CDS Start-End: 33-678

SEQ ID NO: 157865 - DNA, 404 bp, Homo sapiens; identical to SEQ ID NO: 157839
  Payload ID: 10935
  Gene Symbol: NCR1
  Gene Name: natural cytotoxicity triggering receptor 1
  ENST ID: ENST00000614704
  CDS Start-End: 8-404

SEQ ID NO: 157866 - DNA, 1102 bp, Homo sapiens; identical to SEQ ID NO: 157845
  Payload ID: 10935
  Gene Symbol: NCR1
  Gene Name: natural cytotoxicity triggering receptor 1
  ENST ID: ENST00000620757
  CDS Start-End: 39-902

SEQ ID NO: 157867 - DNA, 678 bp, Homo sapiens; identical to SEQ ID NO: 157835
  Payload ID: 10935
  Gene Symbol: NCR1
  Gene Name: natural cytotoxicity triggering receptor 1
  ENST ID: ENST00000614280
  CDS Start-End: 33-678

SEQ ID NO: 157868 - DNA, 975 bp, Homo sapiens
  Payload ID: 10935
  Gene Symbol: NCR1
  Gene Name: natural cytotoxicity triggering receptor 1
  ENST ID: ENST00000620906
  CDS Start-End: 12-887
gaatctgagcgatgtcttccacactccctgccctgctctgcgtcgagactctcccaaaaccgttcatctgggccgagccccatttcatggttccaaaggaaaagcaagtgaccatctgttgccagggaaattatggggctgttgaataccagctgcactttgaaggaagcctttttgccgtggacagaccaaaaccccctgagcggattaacaaagtcaaattctacatcccggacatgaactcccgcatggcagggcaatacagctgcatctatcgggttggggagctctggtcagagcccagcaacttgctggatctggtggtaacagaaatgtatgacacacccaccctctcggttcatcctggacccgaagtgatctcgggagagaaggtgaccttctactgccgtctagacactgcaacaagcatgttcttactgctcaaggagggaagatccagccacgtacagcgcggatacgggaaggtccaggcggagttccccctgggccctgtgaccacagcccaccgagggacataccgatgttttggctcctataacaaccatgcctggtctttccccagtgagccagtgaagctcctggtcacaggcgacattgagaacaccagccttgcacctgaagaccccacctttcctgacacttggggcacctaccttttaaccacagagacgggactccagaaagaccatgccctctgggatcacactgcccagaatctccttcggatgggcctggcctttctagtcctggtggctctagtgtggttcctggttgaagactggctcagcaggaagaggactagagagcgagccagcagagcttccacttgggaaggcaggagaaggctgaacacacagactctttgaagaatgaccatgagacacagtggccatgggtggatctgaaagctggtgttgagcctgggcggcgtgagctctgtgttggacccacgga

SEQ ID NO: 157869 - DNA, 739 bp, Homo sapiens
  Payload ID: 10935
  Gene Symbol: NCR1
  Gene Name: natural cytotoxicity triggering receptor 1
  Uniprot ID: O76036
  ENST ID: ENST00000612645
  CDS Start-End: 8-637
ctgagcgatgtcttccacactccctgccctgctctgcgtcgggctgtgtctgagtcagaggatcagcgcccagcagcaaatgtatgacacacccaccctctcggttcatcctggacccgaagtgatctcgggagagaaggtgaccttctactgccgtctagacactgcaacaagcatgttcttactgctcaaggagggaagatccagccacgtacagcgcggatacgggaaggtccaggcggagttccccctgggccctgtgaccacagcccaccgagggacataccgatgttttggctcctataacaaccatgcctggtctttccccagtgagccagtgaagctcctggtcacaggcgacattgagaacaccagccttgcacctgaagaccccacctttcctgcagacacttggggcacctaccttttaaccacagagacgggactccagaaagaccatgccctctgggatcacactgcccagaatctccttcggatgggcctggcctttctagtcctggtggctctagtgtggttcctggttgaagactggctcagcaggaagaggactagagagcgagccagcagagcttccacttgggaaggcaggagaaggctgaacacacagactctttgaagaatgaccatgagacacagtggccatgggtggatctgaaagctggtgttgagcctgggcggcgtgagctctgtgttggacccacggaggagggagtcactg

SEQ ID NO: 157870 - DNA, 689 bp, Homo sapiens; identical to SEQ ID NO: 157842
  Payload ID: 10935
  Gene Symbol: NCR1
  Gene Name: natural cytotoxicity triggering receptor 1
  ENST ID: ENST00000620721
  CDS Start-End: 8-689

SEQ ID NO: 157871 - DNA, 1102 bp, Homo sapiens; identical to SEQ ID NO: 157845
  Payload ID: 10935
  Gene Symbol: NCR1
  Gene Name: natural cytotoxicity triggering receptor 1
  ENST ID: ENST00000617973
  CDS Start-End: 39-902

SEQ ID NO: 157872 - DNA, 1612 bp, Homo sapiens
  Payload ID: 10935
  Gene Symbol: NCR1
  Gene Name: natural cytotoxicity triggering receptor 1
  Uniprot ID: O76036
  ENST ID: ENST00000612239
  CDS Start-End: 26-937
gcactaggccggcagaatctgagcgatgtcttccacactccctgccctgctctgcgtcgggctgtgtctgagtcagaggatcagcgcccagcagcagactctcccaaaaccgttcatctgggccgagccccatttcatggttccaaaggaaaagcaagtgaccatctgttgccagggaaattatggggctgttgaataccagctgcactttgaaggaagcctttttgccgtggacagaccaaaaccccctgagcggattaacaaagtcaaattctacatcccggacatgaactcccgcatggcagggcaatacagctgcatctatcgggttggggagctctggtcagagcccagcaacttgctggatctggtggtaacagaaatgtatgacacacccaccctctcggttcatcctggacccgaagtgatctcgggagagaaggtgaccttctactgccgtctagacactgcaacaagcatgttcttactgctcaaggagggaagatccagccacgtacagcgcggatacgggaaggtccaggcggagttccccctgggccctgtgaccacagcccaccgagggacataccgatgttttggctcctataacaaccatgcctggtctttccccagtgagccagtgaagctcctggtcacaggcgacattgagaacaccagccttgcacctgaagaccccacctttcctgacacttggggcacctaccttttaaccacagagacgggactccagaaagaccatgccctctgggatcacactgcccagaatctccttcggatgggcctggcctttctagtcctggtggctctagtgtggttcctggttgaagactggctcagcaggaagaggactagagagcgagccagcagagcttccacttgggaaggcaggagaaggctgaacacacagactctttgaagaatgaccatgagacacagtggccatgggtggatctgaaagctggtgttgagcctgggcggcgtgagctctgtgttggacccacggaggagggagtcactgcagggaaagagggacactggcattccatttgtcagagcatcccggacgatgcagagggtgggagaactacatgctaaatttctttttttttttttttgagacagagttttctcttgttgcccaggctggagtgcaatggcgcgatcttggctcactgcaacctctagctctccatccctcgggagaatcgcttgaacctgggaggcggaggttgcggtgagccaaaatcgtgccactgcactccagcctgggcgacagagcgagactccatctcaaaaaaaaaaaaaaaaaaaccacataggctcagtcttttcagtatctgctttactggttcagtaaaagccaggaaacacaactttgtggtaatctgaatgttattgaactgtattttgttcactttattgtaaatactagtgaacagtgaataaatggttgtatattcctaataagaaaaaaaaaaaaaaagacccaaagtacagcgagctgatgccgatctcatttcgcagaggtccgcctgctctcccctctccaagagtgtaatcctatgcttaataaacttatgccgctttgcta

SEQ ID NO: 157873 - DNA, 1161 bp, Homo sapiens; identical to SEQ ID NO: 157843
  Payload ID: 10935
  Gene Symbol: NCR1
  Gene Name: natural cytotoxicity triggering receptor 1
  ENST ID: ENST00000616307
  CDS Start-End: 39-953

SEQ ID NO: 157874 - DNA, 361 bp, Homo sapiens; identical to SEQ ID NO: 157846
  Payload ID: 10935
  Gene Symbol: NCR1
  Gene Name: natural cytotoxicity triggering receptor 1
  ENST ID: ENST00000616564
  CDS Start-End: 1-361

SEQ ID NO: 157875 - DNA, 1155 bp, Homo sapiens
  Payload ID: 10935
  Gene Symbol: NCR1
  Gene Name: natural cytotoxicity triggering receptor 1
  Uniprot ID: O76036
  ENST ID: ENST00000617154
  CDS Start-End: 39-953
tccccactgctcagcactaggccggcagaatctgagcgatgtcttccacactccctgccctgctctgcgtcgggctgtgtctgagtcagaggatcagcgcccagcagcagactctcccaaaaccgttcatctgggccgagccccatttcatggttccaaaggaaaagcaagtgaccatctgttgccagggaaattatggggctgttgaataccagctgcactttgaaggaagcctttttgccgtggacagaccaaaaccccctgagcggattaacaaagtcaaattctacatcccggacatgaactcccgcatggcagggcaatacagctgcatctatcgggttggggagctctggtcagagcccagcaacttgctggatctggtggtaacagaaatgtatgacacacccaccctctcggttcatcctggacccgaagtgatctcgggagagaaggtgaccttctactgccgtctagacactgcaacaagcatgttcttactgctcaaggagggaagatccagccacgtacagcgcggatacgggaaggtccaggcggagttccccctgggccctgtgaccacagcccaccgagggacataccgatgttttggctcctataacaaccatgcctggtctttccccagtgagccagtgaagctcctggtcacaggcgacattgagaacaccagccttgcacctgaagaccccacctttcctgcagacacttggggcacctaccttttaaccacagagacgggactccagaaagaccatgccctctgggatcacactgcccagaatctccttcggatgggcctggcctttctagtcctggtggctctagtgtggttcctggttgaagactggctcagcaggaagaggactagagagcgagccagcagagcttccacttgggaaggcaggagaaggctgaacacacagactctttgaagaatgaccatgagacacagtggccatgggtggatctgaaagctggtgttgagcctgggcggcgtgagctctgtgttggacccacggaggagggagtcactgcagggaaagagggacactggcattccatttgtcagagcatcccggacgatgcagagggtgggagaactacatgctaaatttctttttttttttttttgag

SEQ ID NO: 157876 - DNA, 720 bp, Homo sapiens; identical to SEQ ID NO: 157836
  Payload ID: 10935
  Gene Symbol: NCR1
  Gene Name: natural cytotoxicity triggering receptor 1
  ENST ID: ENST00000618798
  CDS Start-End: 39-720

SEQ ID NO: 157877 - DNA, 594 bp, Homo sapiens; identical to SEQ ID NO: 157847
  Payload ID: 10935
  Gene Symbol: NCR1
  Gene Name: natural cytotoxicity triggering receptor 1
  Uniprot ID: O76036
  ENST ID: ENST00000613556
  CDS Start-End: 1-594

SEQ ID NO: 157878 - DNA, 868 bp, Homo sapiens; identical to SEQ ID NO: 157854
  Payload ID: 10935
  Gene Symbol: NCR1
  Gene Name: natural cytotoxicity triggering receptor 1
  ENST ID: ENST00000620921
  CDS Start-End: 39-668

SEQ ID NO: 157879 - DNA, 720 bp, Homo sapiens; identical to SEQ ID NO: 157836
  Payload ID: 10935
  Gene Symbol: NCR1
  Gene Name: natural cytotoxicity triggering receptor 1
  ENST ID: ENST00000615309
  CDS Start-End: 39-720

SEQ ID NO: 157880 - DNA, 594 bp, Homo sapiens; identical to SEQ ID NO: 157847
  Payload ID: 10935
  Gene Symbol: NCR1
  Gene Name: natural cytotoxicity triggering receptor 1
  ENST ID: ENST00000615651
  CDS Start-End: 1-594

SEQ ID NO: 157881 - DNA, 1371 bp, Homo sapiens
  Payload ID: 10935
  Gene Symbol: NCR1
  Gene Name: natural cytotoxicity triggering receptor 1
  Uniprot ID: O76036
  ENST ID: ENST00000617784
  CDS Start-End: 39-953
tccccactgctcagcactaggccggcagaatctgagcgatgtcttccacactccctgccctgctctgcgtcgggctgtgtctgagtcagaggatcagcgcccagcagcagactctcccaaaaccgttcatctgggccgagccccatttcatggttccaaaggaaaagcaagtgaccatctgttgccagggaaattatggggctgttgaataccagctgcactttgaaggaagcctttttgccgtggacagaccaaaaccccctgagcggattaacaaagtcaaattctacatcccggacatgaactcccgcatggcagggcaatacagctgcatctatcgggttggggagctctggtcagagcccagcaacttgctggatctggtggtaacagaaatgtatgacacacccaccctctcggttcatcctggacccgaagtgatctcgggagagaaggtgaccttctactgccgtctagacactgcaacaagcatgttcttactgctcaaggagggaagatccagccacgtacagcgcggatacgggaaggtccaggcggagttccccctgggccctgtgaccacagcccaccgagggacataccgatgttttggctcctataacaaccatgcctggtctttccccagtgagccagtgaagctcctggtcacaggcgacattgagaacaccagccttgcacctgaagaccccacctttcctgcagacacttggggcacctaccttttaaccacagagacgggactccagaaagaccatgccctctgggatcacactgcccagaatctccttcggatgggcctggcctttctagtcctggtggctctagtgtggttcctggttgaagactggctcagcaggaagaggactagagagcgagccagcagagcttccacttgggaaggcaggagaaggctgaacacacagactctttgaagaatgaccatgagacacagtggccatgggtggatctgaaagctggtgttgagcctgggcggcgtgagctctgtgttggacccacggaggagggagtcactgcagggaaagagggacactggcattccatttgtcagagcatcccggacgatgcagagggtgggagaactacatgctaaatttctttttttttttttttgagacagagcgacagagcgagactccatctcaaaaaaaaaaaaaaaaaaaccacataggctcagtcttttcagtatctgctttactggttcagtaaaagccaggaaacacaactttgtggtaatctgaatgttattgaactgtattttgttcactttattgtaaatactggtgaacagtgaataaatggttgtatattcctaataagaaaaaaaaaaaa

SEQ ID NO: 157882 - DNA, 1612 bp, Homo sapiens
  Payload ID: 10935
  Gene Symbol: NCR1
  Gene Name: natural cytotoxicity triggering receptor 1
  Uniprot ID: O76036
  ENST ID: ENST00000619451
  CDS Start-End: 26-937
gcactaggccggcagaatctgagcgatgtcttccacactccctgccctgctctgcgtcgggctgtgtctgagtcagaggatcagcgcccagcagcagactctcccaaaaccgttcatctgggccgagccccatttcatggttccaaaggaaaagcaagtgaccatctgttgccagggaaattatggggctgttgaataccagctgcactttgaaggaagcctttttgccgtggacagaccaaaaccccctgagcggattaacaaagtcaaattctacatcccggacatgaactcccgcatggcagggcaatacagctgcatctatcgggttggggagctctggtcagagcccagcaacttgctggatctggtggtaacagaaatgtatgacacacccaccctctcggttcatcctggacccgaagtgatctcgggagagaaggtgaccttctactgccgtctagacactgcaacaagcatgttcttactgctcaaggagggaagatccagccacgtacagcgcggatacgggaaggtccaggcggagttccccctgggccctgtgaccacagcccaccgagggacataccgatgttttggctcctataacaaccatgcctggtctttccccagtgagccagtgaagctcctggtcacaggcgacattgagaacaccagccttgcacctgaagaccccacctttcctgacacttggggcacctaccttttaaccacagagacgggactccagaaagaccatgccctctgggatcacactgcccagaatctccttcggatgggcctggcctttctagtcctggtggctctagtgtggttcctggttgaagactggctcagcaggaagaggactagagagcgagccagcagagcttccacttgggaaggcaggagaaggctgaacacacagactctttgaagaatgaccatgagacacagtggccatgggtggatctgaaagctggtgttgagcctgggcggcgtgagctctgtgttggacccacggaggagggagtcactgcagggaaagagggacactggcattccatttgtcagagcatcccggacgatgcagagggtgggagaactacatgctaaatttctttttttttttttttgagacagagttttctcttgttgcccaggctggagtgcaatggcgcgatcttggctcactgcaacctctagctctccatccctcgggagaatcgcttgaacctgggaggcggaggttgcggtgagccaaaatcgtgccactgcactccagcctgggcgacagagcgagactccatctcaaaaaaaaaaaaaaaaaaaccacataggctcagtcttttcagtatctgctttactggttcagtaaaagccaggaaacacaactttgtggtaatctgaatgttattgaactgtattttgttcactttattgtaaatactggtgaacagtgaataaatggttgtatattcctaataagaaaaaaaaaaaaaaagacccaaagtacagcgagctgatgccgatctcatttcgcagaggtccgcctgctctcccctctccaagagtgtaatcctctgcttaataaacttatgccgctttgcta

SEQ ID NO: 157883 - DNA, 868 bp, Homo sapiens; identical to SEQ ID NO: 157854
  Payload ID: 10935
  Gene Symbol: NCR1
  Gene Name: natural cytotoxicity triggering receptor 1
  ENST ID: ENST00000620180
  CDS Start-End: 39-668

SEQ ID NO: 157884 - DNA, 868 bp, Homo sapiens; identical to SEQ ID NO: 157854
  Payload ID: 10935
  Gene Symbol: NCR1
  Gene Name: natural cytotoxicity triggering receptor 1
  Uniprot ID: O76036
  ENST ID: ENST00000612384
  CDS Start-End: 39-668

SEQ ID NO: 157885 - DNA, 594 bp, Homo sapiens; identical to SEQ ID NO: 157847
  Payload ID: 10935
  Gene Symbol: NCR1
  Gene Name: natural cytotoxicity triggering receptor 1
  ENST ID: ENST00000613294
  CDS Start-End: 1-594

SEQ ID NO: 157886 - DNA, 739 bp, Homo sapiens; identical to SEQ ID NO: 157869
  Payload ID: 10935
  Gene Symbol: NCR1
  Gene Name: natural cytotoxicity triggering receptor 1
  Uniprot ID: O76036
  ENST ID: ENST00000611105
  CDS Start-End: 8-637

SEQ ID NO: 157887 - DNA, 868 bp, Homo sapiens; identical to SEQ ID NO: 157854
  Payload ID: 10935
  Gene Symbol: NCR1
  Gene Name: natural cytotoxicity triggering receptor 1
  ENST ID: ENST00000622270
  CDS Start-End: 39-668

SEQ ID NO: 157888 - DNA, 1027 bp, Homo sapiens
  Payload ID: 10935
  Gene Symbol: NCR1
  Gene Name: natural cytotoxicity triggering receptor 1
  Uniprot ID: O76036
  ENST ID: ENST00000610621
  CDS Start-End: 28-942
cagcactaggccggcagaatctgagcgatgtcttccacactccctgccctgctctgcgtcgggctgtgtctgagtcagaggatcagcgcccagcagcagactctcccaaaaccgttcatctgggccgagccccatttcatggttccaaaggaaaagcaagtgaccatctgttgccagggaaattatggggctgttgaataccagctgcactttgaaggaagcctttttgccgtggacagaccaaaaccccctgagcggattaacaaagtcaaattctacatcccggacatgaactcccgcatggcagggcaatacagctgcatctatcgggttggggagctctggtcagagcccagcaacttgctggatctggtggtaacagaaatgtatgacacacccaccctctcggttcatcctggacccgaagtgatctcgggagagaaggtgaccttctactgccgtctagacactgcaacaagcatgttcttactgctcaaggagggaagatccagccacgtacagcgcggatacgggaaggtccaggcggagttccccctgggccctgtgaccacagcccaccgagggacataccgatgttttggctcctataacaaccatgcctggtctttccccagtgagccagtgaagctcctggtcacaggcgacattgagaacaccagccttgcacctgaagaccccacctttcctgcagacacttggggcacctaccttttaaccacagagacgggactccagaaagaccatgccctctgggatcacactgcccagaatctccttcggatgggcctggcctttctagtcctggtggctctagtgtggttcctggttgaagactggctcagcaggaagaggactagagagcgagccagcagagcttccacttgggaaggcaggagaaggctgaacacacagactctttgaagaatgaccatgagacacagtggccatgggtggatctgaaagctggtgttgagcctgggcggcgtgagctctgtgttggacccac

SEQ ID NO: 157889 - DNA, 973 bp, Homo sapiens
  Payload ID: 10935
  Gene Symbol: NCR1
  Gene Name: natural cytotoxicity triggering receptor 1
  Uniprot ID: O76036
  ENST ID: ENST00000618973
  CDS Start-End: 8-871
ctgagcgatgtcttccacactccctgccctgctctgcgtcgggctgtgtctgagtcagaggatcagcgcccagcagcagactctcccaaaaccgttcatctgggccgagccccatttcatggttccaaaggaaaagcaagtgaccatctgttgccagggaaattatggggctgttgaataccagctgcactttgaaggaagcctttttgccgtggacagaccaaaaccccctgagcggattaacaaagtcaaattctacatcccggacatgaactcccgcatggcagggcaatacagctgcatctatcgggttggggagctctggtcagagcccagcaacttgctggatctggtggtaacagaaatgtatgacacacccaccctctcggttcatcctggacccgaagtgatctcgggagagaaggtgaccttctactgccgtctagacactgcaacaagcatgttcttactgctcaaggagggaagatccagccacgtacagcgcggatacgggaaggtccaggcggagttccccctgggccctgtgaccacagcccaccgagggacataccgatgttttggctcctataacaaccatgcctggtctttccccagtgagccagtgaagctcctggtcacaggcgacattgagaacaccagccttgcacctgaagaccccacctttcctgaccatgccctctgggatcacactgcccagaatctccttcggatgggcctggcctttctagtcctggtggctctagtgtggttcctggttgaagactggctcagcaggaagaggactagagagcgagccagcagagcttccacttgggaaggcaggagaaggctgaacacacagactctttgaagaatgaccatgagacacagtggccatgggtggatctgaaagctggtgttgagcctgggcggcgtgagctctgtgttggacccacggaggagggagtcactg

SEQ ID NO: 157890 - DNA, 973 bp, Homo sapiens; identical to SEQ ID NO: 157889
  Payload ID: 10935
  Gene Symbol: NCR1
  Gene Name: natural cytotoxicity triggering receptor 1
  Uniprot ID: O76036
  ENST ID: ENST00000611942
  CDS Start-End: 8-871

SEQ ID NO: 157891 - DNA, 678 bp, Homo sapiens; identical to SEQ ID NO: 157835
  Payload ID: 10935
  Gene Symbol: NCR1
  Gene Name: natural cytotoxicity triggering receptor 1
  ENST ID: ENST00000616389
  CDS Start-End: 33-678

SEQ ID NO: 157892 - DNA, 707 bp, Homo sapiens; identical to SEQ ID NO: 157838
  Payload ID: 10935
  Gene Symbol: NCR1
  Gene Name: natural cytotoxicity triggering receptor 1
  ENST ID: ENST00000612994
  CDS Start-End: 26-707

SEQ ID NO: 157893 - DNA, 594 bp, Homo sapiens; identical to SEQ ID NO: 157847
  Payload ID: 10935
  Gene Symbol: NCR1
  Gene Name: natural cytotoxicity triggering receptor 1
  ENST ID: ENST00000613768
  CDS Start-End: 1-594

SEQ ID NO: 157894 - DNA, 973 bp, Homo sapiens; identical to SEQ ID NO: 157889
  Payload ID: 10935
  Gene Symbol: NCR1
  Gene Name: natural cytotoxicity triggering receptor 1
  Uniprot ID: O76036
  ENST ID: ENST00000620296
  CDS Start-End: 8-871

SEQ ID NO: 157895 - DNA, 1161 bp, Homo sapiens; identical to SEQ ID NO: 157843
  Payload ID: 10935
  Gene Symbol: NCR1
  Gene Name: natural cytotoxicity triggering receptor 1
  Uniprot ID: O76036
  ENST ID: ENST00000619067
  CDS Start-End: 39-953

SEQ ID NO: 157896 - DNA, 1371 bp, Homo sapiens
  Payload ID: 10935
  Gene Symbol: NCR1
  Gene Name: natural cytotoxicity triggering receptor 1
  Uniprot ID: O76036
  ENST ID: ENST00000619077
  CDS Start-End: 39-953
tccccactgctcagcactaggccggcagaatctgagcgatgtcttccacactccctgccctgctctgcgtcgggctgtgtctgagtcagaggatcagcgcccagcagcagactctcccaaaaccgttcatctgggccgagccccatttcatggttccaaaggaaaagcaagtgaccatctgttgccagggaaattatggggctgttgaataccagctgcactttgaaggaagcctttttgccgtggacagaccaaaaccccctgagcggattaacaaagtcaaattctacatcccggacatgaactcccgcatggcagggcaatacagctgcatctatcgggttggggagctctggtcagagcccagcaacttgctggatctggtggtaacagaaatgtatgacacacccaccctctcggttcatcctggacccgaagtgatctcgggagagaaggtgaccttctactgccgtctagacactgcaacaagcatgttcttactgctcaaggagggaagatccagccacgtacagcgcggatacgggaaggtccaggcggagttccccctgggccctgtgaccacagcccaccgagggacataccgatgttttggctcctataacaaccatgcctggtctttccccagtgagccagtgaagctcctggtcacaggcgacattgagaacaccagccttgcacctgaagaccccacctttcctgcagacacttggggcacctaccttttaaccacagagacgggactccagaaagaccatgccctctgggatcacactgcccagaatctccttcggatgggcctggcctttctagtcctggtggctctagtgtggttcctggttgaagactggctcagcaggaagaggactagagagcgagccagcagagcttccacttgggaaggcaggagaaggctgaacacacagactctttgaagaatgaccatgagacacagtggccatgggtggatctgaaagctggtgttgagcctgggcggcgtgagctctgtgttggacccacggaggagggagtcactgcagggaaagagggacactggcattccatttgtcagagcatcccggacgatgcagagggtgggagaactacatgctaaatttctttttttttttttttgagacagagcgacagagcgagactccatctcaaaaaaaaaaaaaaaaaaaccacataggctcagtcttttcagtatctgctttactggttcagtaaaagccaggaaacacaactttgtggtaatctgaatgttattgaactgtattttgttcactttattgtaaatactagtgaacagtgaataaatggttgtatattcctaataagaaaaaaaaaaaa

SEQ ID NO: 157897 - DNA, 361 bp, Homo sapiens; identical to SEQ ID NO: 157846
  Payload ID: 10935
  Gene Symbol: NCR1
  Gene Name: natural cytotoxicity triggering receptor 1
  ENST ID: ENST00000622541
  CDS Start-End: 1-361

SEQ ID NO: 157898 - DNA, 739 bp, Homo sapiens; identical to SEQ ID NO: 157869
  Payload ID: 10935
  Gene Symbol: NCR1
  Gene Name: natural cytotoxicity triggering receptor 1
  Uniprot ID: O76036
  ENST ID: ENST00000610753
  CDS Start-End: 8-637

SEQ ID NO: 157899 - DNA, 1027 bp, Homo sapiens; identical to SEQ ID NO: 157888
  Payload ID: 10935
  Gene Symbol: NCR1
  Gene Name: natural cytotoxicity triggering receptor 1
  Uniprot ID: O76036
  ENST ID: ENST00000612896
  CDS Start-End: 28-942

SEQ ID NO: 157900 - DNA, 868 bp, Homo sapiens; identical to SEQ ID NO: 157854
  Payload ID: 10935
  Gene Symbol: NCR1
  Gene Name: natural cytotoxicity triggering receptor 1
  ENST ID: ENST00000617145
  CDS Start-End: 39-668

SEQ ID NO: 157901 - DNA, 688 bp, Homo sapiens; identical to SEQ ID NO: 157834
  Payload ID: 10935
  Gene Symbol: NCR1
  Gene Name: natural cytotoxicity triggering receptor 1
  Uniprot ID: O76036
  ENST ID: ENST00000621059
  CDS Start-End: 8-586

SEQ ID NO: 157902 - DNA, 404 bp, Homo sapiens; identical to SEQ ID NO: 157839
  Payload ID: 10935
  Gene Symbol: NCR1
  Gene Name: natural cytotoxicity triggering receptor 1
  ENST ID: ENST00000621993
  CDS Start-End: 8-404

SEQ ID NO: 157903 - DNA, 404 bp, Homo sapiens; identical to SEQ ID NO: 157839
  Payload ID: 10935
  Gene Symbol: NCR1
  Gene Name: natural cytotoxicity triggering receptor 1
  ENST ID: ENST00000618725
  CDS Start-End: 8-404

SEQ ID NO: 157904 - DNA, 1154 bp, Homo sapiens
  Payload ID: 10936
  Gene Symbol: NCR2
  Gene Name: natural cytotoxicity triggering receptor 2
  Uniprot ID: O95944
  ENST ID: ENST00000373083
  CDS Start-End: 223-999
agcccaccagacccagactcacctacagctggagatccccacttccctgtgcccacagaatctgccctttgcagtctcccatctccccaacccaggcctcagcctgtctcatttttctatcagacgtgctggaagagcagcagaatcaggcccagctcccaattccctctccccagtcttctccaggtgtcccctcccatgagcgcacaggaaaaggaccacatggcctggcgagccctacacccactgctactgctgctgctgctgttcccaggctctcaggcacaatccaaggctcaggtacttcaaagtgtggcagggcagacgctaaccgtgagatgccagtacccgcccacgggcagtctctacgagaagaaaggctggtgtaaggaggcttcagcacttgtgtgcatcaggttagtcaccagctccaagcccaggacgatggcttggacctctcgattcacaatctgggacgaccctgatgctggcttcttcactgtcaccatgactgatctgagagaggaagactcaggacattactggtgtagaatctaccgcccttctgacaactctgtctctaagtccgtcagattctatctggtggtatctccagcctctgcctccacacagacctcctggactccccgcgacctggtctcttcacagacccagacccagagctgtgtgcctcccactgcaggagccagacaagcccctgagtctccatctaccatccctgtcccttcacagccacagaactccacgctccgccctggccctgcagcccccattgccctggtgcctgtgttctgtggactcctcgtagccaagagcctggtgctgtcagccctgctcgtctggtgggttttaaggaatcggcacatgcagcatcaagggaggtctctgctgcacccagctcagcccaggccccaggcccatagacacttcccactgagccacagggcaccaggggggacatatggtggaaaaccatgatggagctcaggagcctggatacccaaaaagccacctgccaccttcaacaggtcacggaccttccctggacctcagtttcctcacctgtagagagagaaatattatatcacactgttgcaaggactaagataagcgatgatgatgatgaacacact

SEQ ID NO: 157905 - DNA, 1000 bp, Homo sapiens
  Payload ID: 10936
  Gene Symbol: NCR2
  Gene Name: natural cytotoxicity triggering receptor 2
  Uniprot ID: O95944
  ENST ID: ENST00000373086
  CDS Start-End: 27-839
ccatgagcgcacaggaaaaggaccacatggcctggcgagccctacacccactgctactgctgctgctgctgttcccaggctctcaggcacaatccaaggctcaggtacttcaaagtgtggcagggcagacgctaaccgtgagatgccagtacccgcccacgggcagtctctacgagaagaaaggctggtgtaaggaggcttcagcacttgtgtgcatcaggttagtcaccagctccaagcccaggacgatggcttggacctctcgattcacaatctgggacgaccctgatgctggcttcttcactgtcaccatgactgatctgagagaggaagactcaggacattactggtgtagaatctaccgcccttctgacaactctgtctctaagtccgtcagattctatctggtggtatctccagcctctgcctccacacagacctcctggactccccgcgacctggtctcttcacagacccagacccagagctgtgtgcctcccactgcaggagccagacaagcccctgagtctccatctaccatccctgtcccttcacacccgtcctctccccttcctgtccctctgccttccaggccacagaactccacgctccgccctggccctgcagcccccattgccctggtgcctgtgttctgtggactcctcgtagccaagagcctggtgctgtcagccctgctcgtctggtgggttttaaggaatcggcacatgcagcatcaagggaggtctctgctgcacccagctcagcccaggccccaggcccatagacacttcccactgagccacagggcaccaggggggacatatggtggaaaaccatgatggagctcaggagcctggatacccaaaaagccacctgccaccttcaacaggtcacggaccttccctggacctcagtttcctcacctgtagagagagaaatattatatcacactgttgcaaggactaagataagcgatgatgatgatgaacacactttgtga

SEQ ID NO: 157906 - DNA, 942 bp, Homo sapiens
  Payload ID: 10936
  Gene Symbol: NCR2
  Gene Name: natural cytotoxicity triggering receptor 2
  Uniprot ID: O95944
  ENST ID: ENST00000373089
  CDS Start-End: 89-919
gagcagcagaatcaggcccagctcccaattccctctccccagtcttctccaggtgtcccctcccatgagcgcacaggaaaaggaccacatggcctggcgagccctacacccactgctactgctgctgctgctgttcccaggctctcaggcacaatccaaggctcaggtacttcaaagtgtggcagggcagacgctaaccgtgagatgccagtacccgcccacgggcagtctctacgagaagaaaggctggtgtaaggaggcttcagcacttgtgtgcatcaggttagtcaccagctccaagcccaggacgatggcttggacctctcgattcacaatctgggacgaccctgatgctggcttcttcactgtcaccatgactgatctgagagaggaagactcaggacattactggtgtagaatctaccgcccttctgacaactctgtctctaagtccgtcagattctatctggtggtatctccagcctctgcctccacacagacctcctggactccccgcgacctggtctcttcacagacccagacccagagctgtgtgcctcccactgcaggagccagacaagcccctgagtctccatctaccatccctgtcccttcacagccacagaactccacgctccgccctggccctgcagcccccattgccctggtgcctgtgttctgtggactcctcgtagccaagagcctggtgctgtcagccctgctcgtctggtggggggacatatggtggaaaaccatgatggagctcaggagcctggatacccaaaaagccacctgccaccttcaacaggtcacggaccttccctggacctcagtttcctcacctgtagagagagaaatattatatcacactgttgcaaggactaagataagcgatgatgatgatgaacacactttgtgaataataaaattatctgaatgttt

SEQ ID NO: 157907 - DNA, 1042 bp, Homo sapiens
  Payload ID: 10937
  Gene Symbol: NCR3
  Gene Name: natural cytotoxicity triggering receptor 3
  Uniprot ID: O14931
  ENST ID: ENST00000340027
  CDS Start-End: 265-870
ccacaagctggccccttggcctcctagagaccctgacatctcctccagcagcatctgtcctctctcctcagggaggcaagcatttgatgctcgaggtccctggcagttgtggtccttggcaagtgatgtgtgagtcccgtgtgtcataggaagctccccatccccatctggtgaccaaaggcctggctacaagtagtgagtccttcctcctccacccagacctcactgctcagatccccttcgccaactgggacatcttccgacatggcctggatgctgttgctcatcttgatcatggtccatccaggatcctgtgctctctgggtgtcccagccccctgagattcgtaccctggaaggatcctctgccttcctgccctgctccttcaatgccagccaagggagactggccattggctccgtcacgtggttccgagatgaggtggttccagggaaggaggtgaggaatggaaccccagagttcaggggccgcctggccccacttgcttcttcccgtttcctccatgaccaccaggctgagctgcacatccgggacgtgcgaggccatgacgccagcatctacgtgtgcagagtggaggtgctgggccttggtgtcgggacagggaatgggactcggctggtggtggagaaagaacatcctcagctaggggctggtacagtcctcctccttcgggctggattctatgctgtcagctttctctctgtggccgtgggcagcaccgtctattaccagggcaaatgtctgacctggaaaggtccaagaaggcagctgccggctgtggtcccagcgcccctcccaccaccatgtgggagctcagcacatctgcttcccccagtcccaggaggctgagcctgattgtcctgagaaatgggaaggatcagatatgactcctccttggcaactgccctttcctgccaggcccacacataccctcttctggctgttaggggagcttgggtccctgaacactgtcattcacccaataaattactatttgaccccagagtgggtggaagggtga

SEQ ID NO: 157908 - DNA, 541 bp, Homo sapiens
  Payload ID: 10937
  Gene Symbol: NCR3
  Gene Name: natural cytotoxicity triggering receptor 3
  Uniprot ID: O14931
  ENST ID: ENST00000376071
  CDS Start-End: 29-526
cccttcgccaactgggacatcttccgacatggcctggatgctgttgctcatcttgatcatggtccatccaggatcctgtgctctctgggtgtcccagccccctgagattcgtaccctggaaggatcctctgccttcctgccctgctccttcaatgccagccaagggagactggccattggctccgtcacgtggttccgagatgaggtggttccagggaaggaggctgagctgcacatccgggacgtgcgaggccatgacgccagcatctacgtgtgcagagtggaggtgctgggccttggtgtcgggacagggaatgggactcggctggtggtggagaaagaacatcctcagctaggggctggtacagtcctcctccttcgggctggattctatgctgtcagctttctctctgtggccgtgggcagcaccgtctattaccagggcaaatgccactgtcacatgggaacacactgccactcctcagatgggccccgaggagtgattccagagcccagatgtccctagtcctcttcaaaagac

SEQ ID NO: 157909 - DNA, 875 bp, Homo sapiens
  Payload ID: 10937
  Gene Symbol: NCR3
  Gene Name: natural cytotoxicity triggering receptor 3
  Uniprot ID: O14931
  ENST ID: ENST00000376072
  CDS Start-End: 265-837
ccacaagctggccccttggcctcctagagaccctgacatctcctccagcagcatctgtcctctctcctcagggaggcaagcatttgatgctcgaggtccctggcagttgtggtccttggcaagtgatgtgtgagtcccgtgtgtcataggaagctccccatccccatctggtgaccaaaggcctggctacaagtagtgagtccttcctcctccacccagacctcactgctcagatccccttcgccaactgggacatcttccgacatggcctggatgctgttgctcatcttgatcatggtccatccaggatcctgtgctctctgggtgtcccagccccctgagattcgtaccctggaaggatcctctgccttcctgccctgctccttcaatgccagccaagggagactggccattggctccgtcacgtggttccgagatgaggtggttccagggaaggaggtgaggaatggaaccccagagttcaggggccgcctggccccacttgcttcttcccgtttcctccatgaccaccaggctgagctgcacatccgggacgtgcgaggccatgacgccagcatctacgtgtgcagagtggaggtgctgggccttggtgtcgggacagggaatgggactcggctggtggtggagaaagaacatcctcagctaggggctggtacagtcctcctccttcgggctggattctatgctgtcagctttctctctgtggccgtgggcagcaccgtctattaccagggcaaatgccactgtcacatgggaacacactgccactcctcagatgggccccgaggagtgattccagagcccagatgtccctagtcctcttcaaaagaccccaataaatctgccccaccact

SEQ ID NO: 157910 - DNA, 1097 bp, Homo sapiens
  Payload ID: 10937
  Gene Symbol: NCR3
  Gene Name: natural cytotoxicity triggering receptor 3
  Uniprot ID: O14931
  ENST ID: ENST00000376073
  CDS Start-End: 265-798
ccacaagctggccccttggcctcctagagaccctgacatctcctccagcagcatctgtcctctctcctcagggaggcaagcatttgatgctcgaggtccctggcagttgtggtccttggcaagtgatgtgtgagtcccgtgtgtcataggaagctccccatccccatctggtgaccaaaggcctggctacaagtagtgagtccttcctcctccacccagacctcactgctcagatccccttcgccaactgggacatcttccgacatggcctggatgctgttgctcatcttgatcatggtccatccaggatcctgtgctctctgggtgtcccagccccctgagattcgtaccctggaaggatcctctgccttcctgccctgctccttcaatgccagccaagggagactggccattggctccgtcacgtggttccgagatgaggtggttccagggaaggaggtgaggaatggaaccccagagttcaggggccgcctggccccacttgcttcttcccgtttcctccatgaccaccaggctgagctgcacatccgggacgtgcgaggccatgacgccagcatctacgtgtgcagagtggaggtgctgggccttggtgtcgggacagggaatgggactcggctggtggtggagaaagaacatcctcagctaggggctggtacagtcctcctccttcgggctggattctatgctgtcagctttctctctgtggccgtgggcagcaccgtctattaccagggcaaatatgccaaatctactctctccggattcccccaactctgaactttcccttccaccaggtctgacctggaaaggtccaagaaggcagctgccggctgtggtcccagcgcccctcccaccaccatgtgggagctcagcacatctgcttcccccagtcccaggaggctgagcctgattgtcctgagaaatgggaaggatcagatatgactcctccttggcaactgccctttcctgccaggcccacacataccctcttctggctgttaggggagcttgggtccctgaacactgtcattcacccaataaattactatttgaccccagagtgggtggaagggtga

SEQ ID NO: 157911 - DNA, 875 bp, Homo sapiens; identical to SEQ ID NO: 157909
  Payload ID: 10937
  Gene Symbol: NCR3
  Gene Name: natural cytotoxicity triggering receptor 3
  Uniprot ID: O14931
  ENST ID: ENST00000383476
  CDS Start-End: 265-837

SEQ ID NO: 157912 - DNA, 1042 bp, Homo sapiens; identical to SEQ ID NO: 157907
  Payload ID: 10937
  Gene Symbol: NCR3
  Gene Name: natural cytotoxicity triggering receptor 3
  Uniprot ID: O14931
  ENST ID: ENST00000383477
  CDS Start-End: 265-870

SEQ ID NO: 157913 - DNA, 1097 bp, Homo sapiens; identical to SEQ ID NO: 157910
  Payload ID: 10937
  Gene Symbol: NCR3
  Gene Name: natural cytotoxicity triggering receptor 3
  Uniprot ID: O14931
  ENST ID: ENST00000383478
  CDS Start-End: 265-798

SEQ ID NO: 157914 - DNA, 541 bp, Homo sapiens; identical to SEQ ID NO: 157908
  Payload ID: 10937
  Gene Symbol: NCR3
  Gene Name: natural cytotoxicity triggering receptor 3
  Uniprot ID: O14931
  ENST ID: ENST00000400241
  CDS Start-End: 29-526

SEQ ID NO: 157915 - DNA, 1042 bp, Homo sapiens; identical to SEQ ID NO: 157907
  Payload ID: 10937
  Gene Symbol: NCR3
  Gene Name: natural cytotoxicity triggering receptor 3
  Uniprot ID: O14931
  ENST ID: ENST00000447248
  CDS Start-End: 265-870

SEQ ID NO: 157916 - DNA, 1097 bp, Homo sapiens
  Payload ID: 10937
  Gene Symbol: NCR3
  Gene Name: natural cytotoxicity triggering receptor 3
  Uniprot ID: O14931
  ENST ID: ENST00000455825
  CDS Start-End: 265-798
ccacaagctggccccttggcctcctagagaccctgacatctcctccagcagcatctgtcccctctcctcagggaggcaagcatttgatgctcgaggtccctggcagttgtggtccttggcaagtgatgtgtgagtcccgtgtgtcataggaagctccccatccccatctggtgaccaaaggcctggctacaagtagtgagtccttcctcctccacccagacctcactgctcagatccccttcgccaactgggacatcttccgacatggcctggatgctgttgctcatcttgatcatggtccatccaggatcctgtgctctctgggtgtcccagccccctgagattcgtaccctggaaggatcctctgccttcctgccctgctccttcaatgccagccaagggagactggccattggctccgtcacgtggttccgagatgaggtggttccagggaaggaggtgaggaatggaaccccagagttcaggggccgcctggccccacttgcttcttcccgtttcctccatgaccaccaggctgagctgcacatccgggacgtgcgaggccatgacgccagcatctacgtgtgcagagtggaggtgctgggccttggtgtcgggacagggaatgggactcggctggtggtggagaaagaacatcctcagctaggggctggtacagtcctcctccttcgggctggattctatgctgtcagctttctctctgtggccgtgggcagcaccgtctattaccagggcaaatatgccaaatctactctctccggattcccccaactctgaactttcccttccaccaggtctgacctggaaaggtccaagaaggcagctgccggctgtggtcccagcgcccctcccaccaccatgtgggagctcagcacatctgcttcccccagtcccaggaggctgagcctgattgtcctgagaaatgggaaggatcagatatgactcctccttggcaactgccctttcctgccaggcccacacataccctcttctggctgttaggggagcttgggtccctgaacactgtcattcacccaataaattactatttgaccccagagtgggtggaagggtga

SEQ ID NO: 157917 - DNA, 875 bp, Homo sapiens
  Payload ID: 10937
  Gene Symbol: NCR3
  Gene Name: natural cytotoxicity triggering receptor 3
  Uniprot ID: O14931
  ENST ID: ENST00000412603
  CDS Start-End: 265-837
ccacaagctggccccttggcctcctagagaccctgacatctcctccagcagcatctgtcccctctcctcagggaggcaagcatttgatgctcgaggtccctggcagttgtggtccttggcaagtgatgtgtgagtcccgtgtgtcataggaagctccccatccccatctggtgaccaaaggcctggctacaagtagtgagtccttcctcctccacccagacctcactgctcagatccccttcgccaactgggacatcttccgacatggcctggatgctgttgctcatcttgatcatggtccatccaggatcctgtgctctctgggtgtcccagccccctgagattcgtaccctggaaggatcctctgccttcctgccctgctccttcaatgccagccaagggagactggccattggctccgtcacgtggttccgagatgaggtggttccagggaaggaggtgaggaatggaaccccagagttcaggggccgcctggccccacttgcttcttcccgtttcctccatgaccaccaggctgagctgcacatccgggacgtgcgaggccatgacgccagcatctacgtgtgcagagtggaggtgctgggccttggtgtcgggacagggaatgggactcggctggtggtggagaaagaacatcctcagctaggggctggtacagtcctcctccttcgggctggattctatgctgtcagctttctctctgtggccgtgggcagcaccgtctattaccagggcaaatgccactgtcacatgggaacacactgccactcctcagatgggccccgaggagtgattccagagcccagatgtccctagtcctcttcaaaagaccccaataaatctgccccaccact

SEQ ID NO: 157918 - DNA, 1042 bp, Homo sapiens
  Payload ID: 10937
  Gene Symbol: NCR3
  Gene Name: natural cytotoxicity triggering receptor 3
  Uniprot ID: O14931
  ENST ID: ENST00000435674
  CDS Start-End: 265-870
ccacaagctggccccttggcctcctagagaccctgacatctcctccagcagcatctgtcccctctcctcagggaggcaagcatttgatgctcgaggtccctggcagttgtggtccttggcaagtgatgtgtgagtcccgtgtgtcataggaagctccccatccccatctggtgaccaaaggcctggctacaagtagtgagtccttcctcctccacccagacctcactgctcagatccccttcgccaactgggacatcttccgacatggcctggatgctgttgctcatcttgatcatggtccatccaggatcctgtgctctctgggtgtcccagccccctgagattcgtaccctggaaggatcctctgccttcctgccctgctccttcaatgccagccaagggagactggccattggctccgtcacgtggttccgagatgaggtggttccagggaaggaggtgaggaatggaaccccagagttcaggggccgcctggccccacttgcttcttcccgtttcctccatgaccaccaggctgagctgcacatccgggacgtgcgaggccatgacgccagcatctacgtgtgcagagtggaggtgctgggccttggtgtcgggacagggaatgggactcggctggtggtggagaaagaacatcctcagctaggggctggtacagtcctcctccttcgggctggattctatgctgtcagctttctctctgtggccgtgggcagcaccgtctattaccagggcaaatgtctgacctggaaaggtccaagaaggcagctgccggctgtggtcccagcgcccctcccaccaccatgtgggagctcagcacatctgcttcccccagtcccaggaggctgagcctgattgtcctgagaaatgggaaggatcagatatgactcctccttggcaactgccctttcctgccaggcccacacataccctcttctggctgttaggggagcttgggtccctgaacactgtcattcacccaataaattactatttgaccccagagtgggtggaagggtga

SEQ ID NO: 157919 - DNA, 1097 bp, Homo sapiens; identical to SEQ ID NO: 157910
  Payload ID: 10937
  Gene Symbol: NCR3
  Gene Name: natural cytotoxicity triggering receptor 3
  Uniprot ID: O14931
  ENST ID: ENST00000433654
  CDS Start-End: 265-798

SEQ ID NO: 157920 - DNA, 1097 bp, Homo sapiens; identical to SEQ ID NO: 157910
  Payload ID: 10937
  Gene Symbol: NCR3
  Gene Name: natural cytotoxicity triggering receptor 3
  Uniprot ID: O14931
  ENST ID: ENST00000436253
  CDS Start-End: 265-798

SEQ ID NO: 157921 - DNA, 1042 bp, Homo sapiens; identical to SEQ ID NO: 157907
  Payload ID: 10937
  Gene Symbol: NCR3
  Gene Name: natural cytotoxicity triggering receptor 3
  Uniprot ID: O14931
  ENST ID: ENST00000437517
  CDS Start-End: 265-870

SEQ ID NO: 157922 - DNA, 875 bp, Homo sapiens; identical to SEQ ID NO: 157909
  Payload ID: 10937
  Gene Symbol: NCR3
  Gene Name: natural cytotoxicity triggering receptor 3
  Uniprot ID: O14931
  ENST ID: ENST00000441372
  CDS Start-End: 265-837

SEQ ID NO: 157923 - DNA, 874 bp, Homo sapiens
  Payload ID: 10937
  Gene Symbol: NCR3
  Gene Name: natural cytotoxicity triggering receptor 3
  Uniprot ID: O14931
  ENST ID: ENST00000418936
  CDS Start-End: 265-837
ccacaagctggccccttggcctcctagagaccctgacatctcctccagcagcatctgtcctctctcctcagggaggcaagcatttgatgctcgaggtccctggcagttgtggtccttggcaagtgatgtgtgagtcccgtgtgtcataggaagctccccatccccatctggtgaccaaaggcctggctacaagtagtgagtccttcctcctccacccagacctcactgctcagatccccttcgccaactgggacatcttccgacatggcctggatgctgttgctcatcttgatcatggtccatccaggatcctgtgctctctgggtgtcccagccccctgagattcgtaccctggaaggatcctctgccttcctgccctgctccttcaatgccagccaagggagactggccattggctccgtcacgtggttccgagatgaggtggttccagggaaggaggtgaggaatggaaccccagagttcaggggccgcctggccccacttgcttcttcccgtttcctccatgaccaccaggctgagctgcacatccgggacgtgcgaggccatgacgccagcatctacgtgtgcagagtggaggtgctgggccttggtgtcgggacagggaatgggactcggctggtggtggagaaagaacatcctcagctaggggctggtacagtcctcctccttcgggctggattctatgctgtcagctttctctctgtggccgtgggcagcaccgtctattaccagggcaaatgccactgtcacatgggaacacactgccactcctcagatgggccccgaggagtgattccagagcccagatgtccctagtcctcttcaaaagaccccaataaatctgccccaccac

SEQ ID NO: 157924 - DNA, 874 bp, Homo sapiens; identical to SEQ ID NO: 157923
  Payload ID: 10937
  Gene Symbol: NCR3
  Gene Name: natural cytotoxicity triggering receptor 3
  Uniprot ID: O14931
  ENST ID: ENST00000452296
  CDS Start-End: 265-837

SEQ ID NO: 157925 - DNA, 875 bp, Homo sapiens; identical to SEQ ID NO: 157909
  Payload ID: 10937
  Gene Symbol: NCR3
  Gene Name: natural cytotoxicity triggering receptor 3
  Uniprot ID: O14931
  ENST ID: ENST00000436623
  CDS Start-End: 265-837

SEQ ID NO: 157926 - DNA, 1042 bp, Homo sapiens; identical to SEQ ID NO: 157907
  Payload ID: 10937
  Gene Symbol: NCR3
  Gene Name: natural cytotoxicity triggering receptor 3
  Uniprot ID: O14931
  ENST ID: ENST00000420556
  CDS Start-End: 265-870

SEQ ID NO: 157927 - DNA, 541 bp, Homo sapiens; identical to SEQ ID NO: 157908
  Payload ID: 10937
  Gene Symbol: NCR3
  Gene Name: natural cytotoxicity triggering receptor 3
  Uniprot ID: O14931
  ENST ID: ENST00000419728
  CDS Start-End: 29-526

SEQ ID NO: 157928 - DNA, 1097 bp, Homo sapiens; identical to SEQ ID NO: 157910
  Payload ID: 10937
  Gene Symbol: NCR3
  Gene Name: natural cytotoxicity triggering receptor 3
  Uniprot ID: O14931
  ENST ID: ENST00000439584
  CDS Start-End: 265-798

SEQ ID NO: 157929 - DNA, 541 bp, Homo sapiens; identical to SEQ ID NO: 157908
  Payload ID: 10937
  Gene Symbol: NCR3
  Gene Name: natural cytotoxicity triggering receptor 3
  Uniprot ID: O14931
  ENST ID: ENST00000453657
  CDS Start-End: 29-526

SEQ ID NO: 157930 - DNA, 1097 bp, Homo sapiens; identical to SEQ ID NO: 157910
  Payload ID: 10937
  Gene Symbol: NCR3
  Gene Name: natural cytotoxicity triggering receptor 3
  Uniprot ID: O14931
  ENST ID: ENST00000432392
  CDS Start-End: 265-798

SEQ ID NO: 157931 - DNA, 1097 bp, Homo sapiens; identical to SEQ ID NO: 157910
  Payload ID: 10937
  Gene Symbol: NCR3
  Gene Name: natural cytotoxicity triggering receptor 3
  Uniprot ID: O14931
  ENST ID: ENST00000446756
  CDS Start-End: 265-798

SEQ ID NO: 157932 - DNA, 541 bp, Homo sapiens; identical to SEQ ID NO: 157908
  Payload ID: 10937
  Gene Symbol: NCR3
  Gene Name: natural cytotoxicity triggering receptor 3
  Uniprot ID: O14931
  ENST ID: ENST00000420485
  CDS Start-End: 29-526

SEQ ID NO: 157933 - DNA, 875 bp, Homo sapiens; identical to SEQ ID NO: 157909
  Payload ID: 10937
  Gene Symbol: NCR3
  Gene Name: natural cytotoxicity triggering receptor 3
  Uniprot ID: O14931
  ENST ID: ENST00000457547
  CDS Start-End: 265-837

SEQ ID NO: 157934 - DNA, 541 bp, Homo sapiens; identical to SEQ ID NO: 157908
  Payload ID: 10937
  Gene Symbol: NCR3
  Gene Name: natural cytotoxicity triggering receptor 3
  Uniprot ID: O14931
  ENST ID: ENST00000455448
  CDS Start-End: 29-526

SEQ ID NO: 157935 - DNA, 541 bp, Homo sapiens; identical to SEQ ID NO: 157908
  Payload ID: 10937
  Gene Symbol: NCR3
  Gene Name: natural cytotoxicity triggering receptor 3
  Uniprot ID: O14931
  ENST ID: ENST00000438663
  CDS Start-End: 29-526

SEQ ID NO: 157936 - DNA, 1042 bp, Homo sapiens; identical to SEQ ID NO: 157907
  Payload ID: 10937
  Gene Symbol: NCR3
  Gene Name: natural cytotoxicity triggering receptor 3
  Uniprot ID: O14931
  ENST ID: ENST00000430599
  CDS Start-End: 265-870

SEQ ID NO: 157937 - DNA, 541 bp, Homo sapiens; identical to SEQ ID NO: 157908
  Payload ID: 10937
  Gene Symbol: NCR3
  Gene Name: natural cytotoxicity triggering receptor 3
  Uniprot ID: O14931
  ENST ID: ENST00000419086
  CDS Start-End: 29-526

SEQ ID NO: 157938 - DNA, 1042 bp, Homo sapiens; identical to SEQ ID NO: 157907
  Payload ID: 10937
  Gene Symbol: NCR3
  Gene Name: natural cytotoxicity triggering receptor 3
  Uniprot ID: O14931
  ENST ID: ENST00000415123
  CDS Start-End: 265-870

SEQ ID NO: 157939 - DNA, 561 bp, Homo sapiens
  Payload ID: 10937
  Gene Symbol: NCR3
  Gene Name: natural cytotoxicity triggering receptor 3
  ENST ID: ENST00000463064
  CDS Start-End: 29-376
cccttcgccaactgggacatcttccgacatggcctggatgctgttgctcatcttgatcatggtccatccaggatcctgtgctctctgggtgtcccagccccctgagattcgtaccctggaaggatcctctgccttcctgccctgctccttcaatgccagccaagggagactggccattggctccgtcacgtggttccgagatgaggtggttccagggaaggaggtgaggaatggaaccccagagttcaggggccgcctggccccacttgcttcttcccgtttcctccatgaccaccaggctgagctgcacatccgggacgtgcgaggccatgacgccagcatctacgtgtgcagagtggagaacatcctcagctaggggctggtacagtcctcctccttcgggctggattctatgctgtcagctttctctctgtggccgtgggcagcaccgtctattaccagggcaaatgccactgtcacatgggaacacactgccactcctcagatgggccccgaggagtgattccagagcccagatgtccctagtcctcttcaaaagac

SEQ ID NO: 157940 - DNA, 561 bp, Homo sapiens; identical to SEQ ID NO: 157939
  Payload ID: 10937
  Gene Symbol: NCR3
  Gene Name: natural cytotoxicity triggering receptor 3
  ENST ID: ENST00000488139
  CDS Start-End: 29-376

SEQ ID NO: 157941 - DNA, 561 bp, Homo sapiens; identical to SEQ ID NO: 157939
  Payload ID: 10937
  Gene Symbol: NCR3
  Gene Name: natural cytotoxicity triggering receptor 3
  ENST ID: ENST00000493663
  CDS Start-End: 29-376

SEQ ID NO: 157942 - DNA, 561 bp, Homo sapiens; identical to SEQ ID NO: 157939
  Payload ID: 10937
  Gene Symbol: NCR3
  Gene Name: natural cytotoxicity triggering receptor 3
  ENST ID: ENST00000496945
  CDS Start-End: 29-376

SEQ ID NO: 157943 - DNA, 561 bp, Homo sapiens; identical to SEQ ID NO: 157939
  Payload ID: 10937
  Gene Symbol: NCR3
  Gene Name: natural cytotoxicity triggering receptor 3
  ENST ID: ENST00000480313
  CDS Start-End: 29-376

SEQ ID NO: 157944 - DNA, 561 bp, Homo sapiens; identical to SEQ ID NO: 157939
  Payload ID: 10937
  Gene Symbol: NCR3
  Gene Name: natural cytotoxicity triggering receptor 3
  ENST ID: ENST00000470666
  CDS Start-End: 29-376

SEQ ID NO: 157945 - DNA, 561 bp, Homo sapiens; identical to SEQ ID NO: 157939
  Payload ID: 10937
  Gene Symbol: NCR3
  Gene Name: natural cytotoxicity triggering receptor 3
  ENST ID: ENST00000465928
  CDS Start-End: 29-376

SEQ ID NO: 157946 - DNA, 6438 bp, Homo sapiens
  Payload ID: 10938
  Gene Symbol: NCR3LG1
  Gene Name: natural killer cell cytotoxicity receptor 3 ligand 1
  Uniprot ID: Q68D85
  ENST ID: ENST00000338965
  CDS Start-End: 245-1609
aaagtgcggcgcgggtggggctggtcacgcgcctggcttcctgcagtgcgaacctgggaaatccaggcgacttcgcagttgccgaagggatctgaagaagtgggatgtgcaaaagcgccggctggaaatcccggctgtgtctccgtcaactctttacgcaacagaggtctccccctgcccttggtttctaccgggccgcctgctcccactcggcgaaaaaaattacacaacagcagccgcggcgatgacgtggagggctgccgcctccacgtgcgcggcgctcctgattctgctgtgggcgctgacgaccgaaggtgatctgaaagtagagatgatggcaggggggactcagatcacacccctgaatgacaatgtcaccatattctgcaatatcttttattcccaacccctcaacatcacgtctatgggtatcacctggttttggaagagtctgacgtttgacaaagaagtcaaagtctttgaattttttggagatcaccaagaggcattccgacctggagccattgtgtctccatggaggctgaagagtggggacgcctcactgcggctgcctggaatccagctggaggaagcaggagagtaccgatgtgaggtggtggtcacccctctgaaggcacagggaacagtccagcttgaagttgtggcttccccagccagcagattgttgctggatcaagtgggcatgaaagagaatgaagacaaatatatgtgtgagtcaagtgggttctacccagaggctattaatataacatgggagaagcagacccagaagtttccccatcccatagagatttctgaggatgtcatcactggtcccaccatcaagaatatggatggcacatttaatgtcactagctgcttgaagctgaactcctctcaggaagaccctgggactgtctaccagtgtgtggtacggcatgcgtccttgcatacccccttgaggagcaactttaccctgactgctgctcggcacagtctttctgaaactgagaagacagataatttttccattcattggtggcctatttcattcattggtgttggactggttttattaattgttttgattccttggaaaaagatatgtaacaaatcatcttcagcctatactcctctcaagtgcattctgaaacactggaactcctttgacactcagactctgaagaaagagcacctcatattcttttgcactcgggcatggccgtcttaccagctgcaggatggggaggcttggcctcctgagggaagtgttaatattaatactattcaacaactagatgttttctgcagacaggagggcaaatggtccgaggttccttatgtgcaagccttctttgccttgcgagacaacccagatctttgtcagtgttgtagaattgaccctgctctcctaacagttacatcaggcaagtccatagatgataattccacaaagtctgagaaacaaacccctagggaacactcggatgcagttccggatgccccaatccttcctgtctcccctatctgggaacctcctccagccacaacatcaacaactccagttctatcctcccaacccccaactttactgttacccctacagtaaatgcctgatggacctggtgccactagggtccaagttcccttttcattacaggaccttgggcaaataagaggggacctgggcaagttctctgatgacctgatagatatatagaggctttccaaaacctaactcaggtgtttgaccttacttggggtgatgttatgttgctcttaaactcttaactactacagagaaacaggtagccctgcaggcagcagaaaaattcagagatgaacaacatgtcttctatagccactcaataaggaaagaaggtgagaaacaaccagcattcacatacccaataggaagcgaggcagtgccccttgaacaacataattcggaccccagtggtaccttagatgagtggcaaagaaaacattttcaaatgtgcttattagagggcctacagaggaccagagccaagcctcttaattaccccaaactctccatgatagatcaaaaactagatgaaaatccctcagcctttttggaaaggctgagagaggctgtagtgaaacacacttccttgtctcctgttaggtatgtttatacctcacataaataattcaattgagggacagctaattttgaaagacaagtttattactcagacagcccctgatatcagaaggaagctagagaaacaggccatgggattagatagcaccttacaaaacctcctgaaggtagccacctcggtcttttataatagggaccaggaggaggcccaggggaaggagaggaaacacaagaaaaaggcagagactctggtggccactttgtataaaacccagtatccccaaggtacacctgctagttgctaccaatgtggcaaactagggcacttcaaaagggactgcccaggcagcaagaagaagccacctcaaccctgtccagtatacaatggggaccactggaaggcagactgtcctgggaagcataggtcactgagtccagagccagtctcacaaatggtccagcaggactgatgggtcctggggctcaactccctggctccagtggctcagactgctgttactacccgggagcaccaggtgattctggagttcgaagggaggaaggtagacttctttctggacactggagccaggcttctgttttcctctccaattcaggccttcgttcctcccatagcacaaccatgatgggcatctcaggaaagactttaacttgatatttttctcaacctattagttgcagtcagagggacctactgtttacacaggcctttttagtcatgcctgaaagtcccactcctttattagatagagatattccagcacgtatgggggccaccatccttatggctccaggacaaactccgcctccccttagtggaaaccagtattaacccagaggtttgggcaactcagggaagaagtggccggactataaccactataccagtctggatccacctcaaggatcccactttttttcctaaccagagacaataccctctgaagccagaaagtagaaaagggctagacgccagcattgataacctaaaggcacaaggcctccttaggccttgcagtagcccttgaaacaccccaatattaggggtgcaaaaatccaatggggaagggagactagttcaggacctctgccttattcatgaggctgtgattacgattcatccagtagatcccagtccctatactttgctaactcaaatatccaagggaactaaatggttcacagttctgggcctaaaggatgcctttttctgtatacctttataccctgactcccaatacttgtttacctttgaagacccctccaatcaaaccacccagttaacctggactgtactgcctcagggatttagagatagcccccacctatttgggcaagtattgtcaagagatctcttcgaattcttccattctcaggttaaagttttacaatatgtagatgacattctcctctgtgccccaactgaggaagtttcttgagacggcactgaggctctccttaatttcctagctggaaagggatataaggcttcaaaatctaaggctcagctctatcagactttggtaaagtacctaggtctggtcttgtcagaagggaacaagagcactaggcgaggagaggattaatcccatttcctcccttcctctccccagaaccctcaagcagctgagggatgcttgggcattacaggtttttgtaggttatagatacccaggtatgataaaataggttgccctttatatcaccttataaaagaaattcaagtggctaaaactcacttcctgacctgggaacctgaaggtcaaaaggccattaatcagttaaaacaagccttgcttaaagcaccagcccccagtctttctgtagggaagtcctttaatctttatgtatcataaaggaaaggaatgaccctgggagttttaattcaagttcaaggcccagctcaacagccagtaggttacttaagtagagagcttgacttggaggctaaaggatggccagcttgcctctgagcagttacagtagtggccctgctagtcccagaggccaccaagttaaccctggggaataacctgtttatgcctcacataaataatgtggcaggcttgctgtcctctaaagcgagtctctggctaacagacagctgcctcctcaagtatcagactttgctgctagaggaatctgcagtccagttaaaaacctgaccttgcctgatcccagacactttcctcccagaggaaactggagaaactgaacataattgtgaacagactgtagtacaacctatgccgctagggaggatctcaaagaaattcccctagaaaatccagactggacccactttatggatgggagctcttttgtaggacagggagtctgaaaagtgggatatgcagtagtcaccctaaataacattgaaaatgtgcctctctcaccaggcacacacactcaatcagttgagctgatccctctcacaagagcacttgaactaagcaaaggaaagacagctaacatttatactgactccaagtgtacctttctagttctccttgcccatgctgccatctgaaaggaaaggcacttcctcaccgctaatgggtcttgcattaaataccatcaagacatcaacaggctattatcctcagtgttcctcccatgagaattagtggtcagacattgcagagggcatcagaagcgggtagatgaaatagcgaaaggaaacaggctagcagaccaaagagctaagtcagcagtaagaaggccccaaggtcccaaaacacttgaggcccctctgatttgggagggctacataagggaaataaagcctcagtattcccctacagagatagaatgggccacctctcgaggtatacttttcaaccctcaggatggttacaatcagaagattgcaaagtacgcttgccagcctccagccaatggaagattcttaaaatcctccactgagcctttcacttaggaaagcataagacatcagtgcatccaaagattgttctcaggagaaaatctactaaaaatggtcaaataggttgttaatactcgtgaaaccctcttaaaaataatccctttaacagatgacttcttccccaccacaatcaaaggatgggaagttactcaggggaggactggcagatagacttcacccatatgcccaaaataaatggcattcaatgtcttttggtgtgggtgcataccttcattaactgggtagaggcattcccatgcccaacagaaaaggcctctgaggtggtgagaatactaattagttaaataattcctcactttgggctccctaagtacttccaaaacaacaatggtccctcatttaaagaagcctctacccagtagggccgagtctgctaggactttttattgggtttggtaatacgtcacaccctttagcctctactgtgtcagccatgtcccatttatacaagacaaattgctgggtctgtcctgagcggtttgctcagttcagtaacactaaggaacctcttgatgacttggtatttactgtcttagcattccctttgttagctttacctttagccattaaagacttgtcaggcataaatggaacatggtatgggaacactttcaactgagtaactaactcctcccaggaaagcatttcctccctggtgccagaaaacactttccccaaagataagcctcacaccctcaggctaggaaaagttggccgggtaatagcaaatgcctcctcctgttttaaaagcagaggaaaaggaccatacctgggagatctcaaatattataacaccatacttgtaattgctgaaagctcggaagtttggagaaaaagacataagaaggatgatctaagaaaattggaagccatatggaggggaggctttcagaattcagcgtctcctcctggttgaaagtcctgctgggaatggcaggctctgggtaaccaccctgacacatggcactataatgtaaaaaacaacacataggccttcccagacatgcaccctcatgggattccagaccccctgtatgatgcttagtagtagtggcctacaaatctgtgggtgaacagaacaggagacttctggactgacagcccctgtcacaagggggcattatctgagatattggccagggcatatcgtgtccctggtcttttgaaactccatttgtcggccaggtgtggtggcttacgactgtaatcccagcactttgggaggctgaggcaggtagatgatgaggtcaggagttcaagactagcctggacaatatggtgaaaccccgtctgtactaataatacaaaaaaaaaaaaaaaaaaa

SEQ ID NO: 157947 - DNA, 2429 bp, Homo sapiens
  Payload ID: 10938
  Gene Symbol: NCR3LG1
  Gene Name: natural killer cell cytotoxicity receptor 3 ligand 1
  Uniprot ID: Q68D85
  ENST ID: ENST00000530403
  CDS Start-End: 72-1436
cctgcccttggtttctaccgggccgcctgctcccactcggcgaaaaaaattacacaacagcagccgcggcgatgacgtggagggctgccgcctccacgtgcgcggcgctcctgattctgctgtgggcgctgacgaccgaaggtgatctgaaagtagagatgatggcaggggggactcagatcacacccctgaatgacaatgtcaccatattctgcaatatcttttattcccaacccctcaacatcacgtctatgggtatcacctggttttggaagagtctgacgtttgacaaagaagtcaaagtctttgaattttttggagatcaccaagaggcattccgacctggagccattgtgtctccatggaggctgaagagtggggacgcctcactgcggctgcctggaatccagctggaggaagcaggagagtaccgatgtgaggtggtggtcacccctctgaaggcacagggaacagtccagcttgaagttgtggcttccccagccagcagattgttgctggatcaagtgggcatgaaagagaatgaagacaaatatatgtgtgagtcaagtgggttctacccagaggctattaatataacatgggagaagcagacccagaagtttccccatcccatagagatttctgaggatgtcatcactggtcccaccatcaagaatatggatggcacatttaatgtcactagctgcttgaagctgaactcctctcaggaagaccctgggactgtctaccagtgtgtggtacggcatgcgtccttgcatacccccttgaggagcaactttaccctgactgctgctcggcacagtctttctgaaactgagaagacagataatttttccattcattggtggcctatttcattcattggtgttggactggttttattaattgttttgattccttggaaaaagatatgtaacaaatcatcttcagcctatactcctctcaagtgcattctgaaacactggaactcctttgacactcagactctgaagaaagagcacctcatattcttttgcactcgggcatggccgtcttaccagctgcaggatggggaggcttggcctcctgagggaagtgttaatattaatactattcaacaactagatgttttctgcagacaggagggcaaatggtccgaggttccttatgtgcaagccttctttgccttgcgagacaacccagatctttgtcagtgttgtagaattgaccctgctctcctaacagttacatcaggcaagtccatagatgataattccacaaagtctgagaaacaaacccctagggaacactcggatgcagttccggatgccccaatccttcctgtctcccctatctgggaacctcctccagccacaacatcaacaactccagttctatcctcccaacccccaactttactgttacccctacagtaaatgcctgatggacctggtgccactagggtccaagttcccttttcattacaggaccttgggcaaataagaggggacctgggcaagttctctgatgacctgatagatatatagaggctttccaaaacctaactcaggtgtttgaccttacttggggtgatgttatgttgctcttaaactcttaactactacagagaaacaggtagccctgcaggcagcagaaaaattcagagatgaacaacatgtcttctatagccactcaataaggaaagaaggtgagaaacaaccagcattcacatacccaataggaagcgaggcagtgccccttgaacaacataattcggaccccagtggtaccttagatgagtggcaaagaaaacattttcaaatgtgcttattagagggcctacagaggaccagagccaagcctcttaattaccccaaactctccatgatagatcaaaaactagatgaaaatccctcagcctttttggaaaggctgagagaggctgtagtgaaacacacttccttgtctcctgttaggtatgtttatacctcacataaataattcaattgagggacagctaattttgaaagacaagtttattactcagacagcccctgatatcagaaggaagctagagaaacaggccatgggattagatagcaccttacaaaacctcctgaaggtagccacctcggtcttttataatagggaccaggaggaggcccaggggaaggagaggaaacacaagaaaaaggcagagactctggtggccactttgtataaaacccagtatccccaaggtacacctgctagttgctaccaatgtggcaaactagggcacttcaaaagggactgcccaggcagcaagaagaagccacctcaaccctgtccagtatacaatggggaccactggaaggcagactgtcctgggaagcataggtcactgagtccagagccagcttctgttttcctctccaattcaggccttc

SEQ ID NO: 157948 - DNA, 843 bp, Homo sapiens
  Payload ID: 10939
  Gene Symbol: NKG7
  Gene Name: natural killer cell granule protein 7
  Uniprot ID: Q16617
  ENST ID: ENST00000221978
  CDS Start-End: 181-678
aaaccagcctcatgtgacaaagcgcaggacccctcactgccccaactgcttgctgttctctctttcttgggctctaaggacccaggagtctgggtgcacagcctccttctctctgagattcaagagtctgatcagcagcctcttcctcctccaggacccagaagccctgagcttatccccatggagctctgccggtccctggccctgctggggggctccctgggcctgatgttctgcctgattgctttgagcaccgatttctggtttgaggctgtgggtcccacccactcagctcactcgggcctctggccaacagggcatggggacatcatatcaggctacatccacgtgacgcagaccttcagcattatggctgttctgtgggccctggtgtccgtgagcttcctggtcctgtcctgcttcccctcactgttccccccaggccacggcccgcttgtctcaaccaccgcagcctttgctgcagccatctccatggtggtggccatggcggtgtacaccagcgagcggtgggaccagcctccacacccccagatccagaccttcttctcctggtccttctacctgggctgggtctcagctatcctcttgctctgtacaggtgccctgagcctgggtgctcactgtggcggtccccgtcctggctatgaaaccttgtgagcagaaggcaagagcggcaagatgagttttgagcgttgtattccaaaggcctcatctggagcctcgggaaagtctggtcccacatctgcccgcccttccagcccttccccagcccctcctcttgtttcttcattcattcaacaaaatttggctggaatctggtta

SEQ ID NO: 157949 - DNA, 816 bp, Homo sapiens
  Payload ID: 10939
  Gene Symbol: NKG7
  Gene Name: natural killer cell granule protein 7
  ENST ID: ENST00000595217
  CDS Start-End: 167-595
tgacaaagcgcaggacccctcactgccccaactgcttgctgttctctctttcttgggctctaaggacccaggagtctgggtgcacagcctccttctctctgagattcaagagtctgatcagcagcctcttcctcctccaggacccagaagccctgagcttatccccatggagctctgccggtccctggccctgctggggggctccctgggcctgatgttctgcctgattgctttgagcaccgatttctggtttgaggctgtgggtcccacccactcagctcactcgggcctctggccaacagggcatggggacatcatatcaggccacggcccgcttgtctcaaccaccgcagcctttgctgcaggtaaggactctggactggactggggcatcgcgagccagcgaattcctgccgaggagctgagccatctctcttgtccttgtccccagccatctccatggtggtggccatggcggtgtacaccagcgagcggtgggaccagcctccacacccccagatccagaccttcttctcctggtccttctacctgggctgggtctcagctatcctcttgctctgtacaggtgccctgagcctgggtgctcactgtggcggtccccgtcctggctatgaaaccttgtgagcagaaggcaagagcggcaagatgagttttgagcgttgtattccaaaggcctcatctggagcctcgggaaagtctggtcccacatctgcccgcccttccagcccttccccagcccctcctcttgtttcttcattcattcaacaaaatttggctggaatctggttattttga

SEQ ID NO: 157950 - DNA, 520 bp, Homo sapiens
  Payload ID: 10939
  Gene Symbol: NKG7
  Gene Name: natural killer cell granule protein 7
  ENST ID: ENST00000600427
  CDS Start-End: 106-363
aaggacccaggagtctgggtgcacagcctccttctctctgagattcaagagtctgatcagcagcctcttcctcctccaggacccagaagccctgagcttatccccatggagctctgccggtccctggccctgctggggggctccctgggcctgatgttctgcctgattgctttgagcaccgatttctggtttgaggctgtgggtcccacccactcagctcactcgggcctctggccaacagggcatggggacatcatatcaggccacggcccgcttgtctcaaccaccgcagcctttgctgcaggtgccctgagcctgggtgctcactgtggcggtccccgtcctggctatgaaaccttgtgagcagaaggcaagagcggcaagatgagttttgagcgttgtattccaaaggcctcatctggagcctcgggaaagtctggtcccacatctgcccgcccttccagcccttccccagcccctcctcttgtttcttcattcattcaacaaaatttggctggaa

SEQ ID NO: 157951 - DNA, 347 bp, Homo sapiens
  Payload ID: 10939
  Gene Symbol: NKG7
  Gene Name: natural killer cell granule protein 7
  ENST ID: ENST00000595157
  CDS Start-End: 1-268
ctggccaacagggcatggggacatcatatcaggccacggcccgcttgtctcaaccaccgcagcctttgctgcagccatctccatggtggtggccatggcggtgtacaccagcgagcggtgggaccagcctccacacccccagatccagaccttcttctcctggtccttctacctgggctgggtctcagctatcctcttgctctgtacaggtgccctgagcctgggtgctcactgtggcggtccccgtcctggctatgaaaccttgtgagcagaaggcaagagcggcaagatgagttttgagcgttgtattccaaaggcctcatctggagcctcgggaaagtctggtc

SEQ ID NO: 157952 - DNA, 376 bp, Homo sapiens
  Payload ID: 10939
  Gene Symbol: NKG7
  Gene Name: natural killer cell granule protein 7
  ENST ID: ENST00000593572
  CDS Start-End: 1-219
acagggcatggggacatcatatcagccatctccatggtggtggccatggcggtgtacaccagcgagcggtgggaccagcctccacacccccagatccagaccttcttctcctggtccttctacctgggctgggtctcagctatcctcttgctctgtacaggtgccctgagcctgggtgctcactgtggcggtccccgtcctggctatgaaaccttgtgagcagaaggcaagagcggcaagatgagttttgagcgttgtattccaaaggcctcatctggagcctcgggaaagtctggtcccacatctgcccgcccttccagcccttccccagcccctcctcttgtttcttcattcattcaacaaaatttggctggaa

SEQ ID NO: 157953 - DNA, 7343 bp, Homo sapiens
  Payload ID: 10940
  Gene Symbol: NKTR
  Gene Name: natural killer cell triggering receptor
  Uniprot ID: P30414
  ENST ID: ENST00000232978
  CDS Start-End: 189-4577
gtactctcgcggtatttgtcccgactctcgcggggtttagcgtggcattgggaggcccggcctgggggaggagacggcgttccgttagcggcgttggggtttggctgcagtggcagtgctttctcttctgctcacggggacccgctcaggctggaggccagccagctcttgccgccacctcggtcgcgatgggggcgcaggaccggccgcagtgccacttcgacatcgagatcaaccgggagccggttggtcgcattatgtttcagctcttctcagacatatgtccaaaaacatgcaaaaacttcctttgcttgtgctcaggagagaaaggccttgggaaaacaactgggaagaagttatgttataaaggttctacgttccatcgtgtggttaaaaactttatgattcagggtggggacttcagtgaaggtaatggaaaaggtggagaatcaatttatggtggatattttaaagatgaaaactttattctcaaacatgacagagcgttccttttatcaatggcaaatcgagggaaacataccaatggttcccagtttttcattaccacaaagcctgctccacacctggatggggtgcatgtagtctttggactggttatttctggttttgaagtaatcgaacaaattgaaaatctgaagaccgatgctgcaagcagaccatatgcagatgtgcgagttattgactgtggagtacttgccacaaaatcaataaaagatgtttttgagaaaaaaaggaagaaaccaactcattcagaaggctcggattcctcttccaattcctcctcttcttcagaatcatcttcagaaagtgaacttgaacatgagagaagcagaaggaggaaacataagaggaggccaaaagttaaacgttctaaaaagaggcgaaaggaagcaagcagttcagaagagccaaggaataaacatgcaatgaacccaaaaggtcactctgagaggagtgataccaatgaaaaaaggtcagttgattccagtgctaaaagggaaaaacctgtggtccgcccagaagagattcctccagtgcctgagaaccgatttttactgagaagagatatgcctgttgttactgcagaacctgaaccgaagattcctgatgttgcacccattgtaagtgatcagaaaccatctgtatcaaagtctggacggaagattaaaggaaggggcacaattcgctatcacacacctccaagatcaagatcctgttctgagtcagatgatgatgacagcagtgaaactcctcctcactggaaagaggaaatgcagagattaagagcatatagaccacctagtggagaaaaatggagtaaaggagataagttaagtgacccctgttcaagccgatgggatgaaagaagcttgtctcagagatccagatcatggtcctataatggatattattcagaccttagtacagcaagacactctggccaccataaaaaacgcagaaaagaaaaaaaggttaagcataaaaagaaagggaaaaagcagaaacactgcagaagacacaaacaaacaaagaagagaaggattcttataccgtctgacatagaatcctcaaaatcttccactcgaagaatgaaatcctcttgtgatagagaaaggagttctcgttcttcctcattgtcatctcatcactcatcaaagagagactggtctaaatctgataaggatgtccagagctctttaacccattccagcagagactcatacagatcaaaatctcactcacagtcttattctagaggaagctcaagatcaaggactgcgtcaaagtcctcatcacattctcgaagtagatcaaagtccagatctagttccaagtctgggcaccgaaagagagcatcaaaatcaccaagaaaaacagcttctcagttaagtgaaaataaaccagttaaaacagaacctttaagagcaaccatggcacaaaatgaaaatgtagtagtacaaccagttgtagcagaaaatattcctgtaataccactgagtgacagtccccccccttcaagatggaagcctggacagaaaccttggaagccctcttatgagcgaattcaggaaatgaaagctaaaacaacccatttgctacccatccaaagcacttacagtttagcaaatattaaagagactggtagctcatcatcctaccataaaagagaaaaaaattcggaaagtgatcagagcacttattcaaaatacagtgatagaagttcagaaagctcaccaaggtcaaggagcagatcttctaggagtagatcttattccagatcatatacaagatcacgtagtctagctagttcacattcaaggtctaggtctccatcatctagatctcattcacgaaataaatacagtgatcattcacagtgtagtagatcatcttcatatacttctattagcagtgatgatggaaggcgagctaagaggagacttagatccagtgggaaaaaaaatagcgtttcacataaaaagcatagcagcagctctgaaaagacacttcacagtaaatatgtcaaaggtagagacaggtcttcatgtgtgagaaagtatagcgagagcagatcatctttagattattcttcagacagtgagcagtcaagtgttcaggccacacagtcagcccaggaaaaagagaagcagggccaaatggaaagaacacataataaacaagaaaaaaacagaggtgaagaaaaatccaagtctgaacgggaatgccctcattcaaaaaaaagaactttgaaagagaatctttctgatcaccttagaaatggcagtaagcccaaaaggaagaattatgctggtagtaaatgggactctgagtcaaattcagaacgagatgtcactaaaaacagtaaaaatgactcccatccatcctctgacaaggaagaaggtgaggccacatccgattctgaatcagaggttagtgaaattcacatcaaagtcaaacccacaaccaagtcgtccacaaatacttcactgcctgatgataatggtgcttggaaatcaagcaaacagcgcacatcaacttctgactctgaggggtcctgttccaattcggaaaacaataggggaaagccacaaaagcacaaacatgggtcaaaggaaaatcttaaaagagaacacaccaaaaaagtgaaagagaaattgaaagggaaaaaagacaaaaagcataaggctccaaaacgaaagcaagcatttcactggcagcctccactagaatttggtgaagaggaggaggaggagattgatgacaagcaagttactcaggaatcaaaagagaaaaaagtttctgaaaacaatgaaaccataaaagataatattctaaaaactgagaaatccagtgaagaggacctttcaggtaaacatgatacagtgactgtttcatcagatcttgatcagtttactaaagatgatagtaaactcagtatttctcccacagctttaaatactgaggaaaatgtggcctgtttacaaaacattcagcacgttgaagaaagtgttcccaatggagtggaagatgtgcttcaaacagatgacaacatggagatctgcactcctgataggagttccccagcaaaagtagaggagacttcccctctaggaaatgcacggcttgataccccagatataaacattgttttgaagcaggatatggcaacggaacatcctcaagcagaggtagtaaaacaggaaagcagcatgtccgaaagtaaagtgttgggtgaagtggggaaacaggacagcagctctgctagcttggctagtgctggagaaagtaccgggaagaaggaggtggctgagaagagccagatcaacctcattgataagaaatggaagcccctgcaaggtgtggggaacctggcagcacctaatgctgccacatccagtgctgtggaagttaaggtgttgaccactgtgcctgaaatgaaaccacaaggcttgagaatagaaattaaaagcaaaaataaagttcggcctgggtctctctttgatgaagtaagaaagacagcacgcttaaaccgtagaccaagaaatcaggagagttcaagtgatgagcagacgcctagtcgggatgatgatagccagtccaggagtccaagtagatctcgaagtaaatctgaaaccaaatcaagacacagaacaaggtctgtctcctatagtcactcaagaagtcgatcgagaagttccacatcatcttatcgatcaagaagctactctagaagtcggagcagaggatggtacagcagaggccgaaccagaagccggagcagttcctaccggagttacaaaagtcacaggacgtccagcaggagcagatccaggagcagctcatatgatccccacagtcgatccaggtcctacacctacgatagctactatagcaggagtcggagtcgaagtagaagccagagaagtgacagttaccaccgaggcagaagttataatcggcggtccaggagttgtagatcttatggctctgacagtgaaagtgaccgaagttactctcatcaccggagccccagtgagagcagcagatacagttgaaaacgtccggatacaaattatatcttatttgtaaatatctggcaacttagcttaagaaatgtaatgacagtctgttgttctatttcaatatcagaggtgaatttcaaaaatagacacttcttaattgttactggttcatttacatgtggggagaagaatttaaaatacagatatgtctcctaaaaatatttttatgccacattttacagtagccaactatggaaatgaatttcattttcttgaatcaagaaatcgtgaaatttatctatgtataatttgcaatattattttaagtctatttcactctatcttacgtatcccttagaatacagattctttttgcctgtttttccagttttagcatatatgctgccaagcatagaactgtgaaggagaactgttaaaggcggccaaatatttatatactgattacatagagtcttgtacatatgtgctctaaaaacaaaccacccagaattgatactgttggtaaccaggagtataaggcagtggctctggggttcttaattcattcctaacttctttgatacttcacaggattaggaaagtggtcatcatacatcccacacagtctgtattacttcaggcttgtgggcaaggttaggaagaatcaatcagccttaactataaatacctgcactgtctctgaggacttactattttatgttctttttaatcaataccgatcagaagtttaggttataaaaacaattctacttcatgctttggtgcttggtaatttttggtgcgtctttaagcattactcttatatatcatatattaaaataccataaaaatgaaattcagacaaaatcactggcaccaaaaatggtttattctgagctgtcttcactttgactatttggggggcttctctcaagtacagatgtgggttggggtcccctggagcaggcaggattggcagtaagagatattggccactcaagtctactgtgtgtgtgtgcctctggaagagtgaagaatggacttcaaaagtaacatcaaaaatctaactgccaccatcctggagacattttgcagggctttcctttcaagtctttcaagtacaggatattaccacaacagcagctgaactgttgtaaccagcatgtttttcctatttccactgtgacctgcagctgactcaaagccttgcgtgacctgacccaggtgcaagagacaggggaagagggatagagggtatagcataaattacatattttcatggctttgggtggttcctccaaaaataattggacctgtaaaaactagtgtgtgtgtgtgtgtgtgtgtgtgtgtgtgtgtggtttttttttttaatctttactttgaatttgttccccaagtgtacttaatcaccttagtgccagtttaatccagttatgcagaagaaattcatattggttgcctgatgtagagctcagcaccaccctaccacaggccttgtctggtgtatttgggaagtggaaaagagccctcagttggagggagctgacaacccttggtggagggagggtgcccttgaatgtattaaaactatcacccaaagaaggtatgaaaacagggtaaggtggtcagttgtttgccaggtcaatagacagaaagtacattagaaaacaggacttaggccaaacaaacaatactggatactgaatacaaaacagtatgatttatattaaaggtttccaaaggttgcctgcaaaggagaatattactactagtcagcaggaaaaaaatgcattcagaacccaagcagaaactgccaaatgtaattaggttaagaaaagttacccttgggcagtgtattagttttctattgctgtgtgacaaattaccccaaatttagcagtttaaaaaacaatacccatagcagttctgtagctcatgagtctggcacagtgtggctggattctctgctcagggtcttaaaggctgaaataagggttggcaggacaacattccttcatggaggctctggggaagaatctgcttctaagttcattcaggttgttggcggaattcagttctttgctggctctcagctggaggcccctctctcacctcaaggctgcctgcattccttcttatgtggtcccctccagcttcaaaccagccttcctgctctttctcatgcttcatatctctctcccgtcctcctgttttaggggcatatgattagctcaagcccacagatatattttaaggttgattgtgcgatagaacataattgcaggagtactgtctcatctcatcatattcacgggttctggagattagctcattgaaagtgggaggggcattttcaaattctgcctaccacaggcaataactgcccatctcagctgtaggtggaatttttacccagaaaagataggccctagaagcctcatttcttttctccatggaaaaggacagccctctgctgcagcgttcaacttgtgtgtttactgacagagtgaactacagaaatagcttttcttcctaaaggggattgttctacattttgaagttattttttaataaaattgaattatgttgtgtattgtgcttcttaataggaaatgcattattggactgtttttgtaacatcctgtttattgcaaatagctagtatcgttcaaaaactgtataaaatacttttgtacatattagcaatgtctaatttgtatacacttcagttaaatttccctaaaacttgaaaggggaccttgtagaaattaaaatatatacttagtctaagtctga

SEQ ID NO: 157954 - DNA, 646 bp, Homo sapiens
  Payload ID: 10940
  Gene Symbol: NKTR
  Gene Name: natural killer cell triggering receptor
  ENST ID: ENST00000442970
  CDS Start-End: 60-377
gctcacggggacccgctcaggctggaggccagccagctcttgccgccacctcggtcgcgatgggggcgcaggaccggccgcagtgccacttcgacatcgagatcaaccgggagccggttggtcgcattatgtttcagctcttctcagacatatgtccaaaaacatgcaaaaacttcctttgcttgtgctcaggagagaaaggccttgggaaaacaactgggaagaagttatgttataaaggttctacgttccatcgtgtggttaaaaactttatgattcagggtggggacttcagtgaaggtaatggaaaaggtggagaatcaatttatggtggatattttaaagagaatgtggtcttttgcaaaatgaaaaggtaagagaacgaagctcagtaacacaaactccaattctgttcccttgcacccttcctaataaatttatggacagtctgggtcaggttgtggctggatttctatattgcttgaagacttggaaaattctgtgtattatttcatacatgcttctgtatcttttttcatttcccaatgggttattaatttcacatcagagaaaagagtctagttgtggggttttttttcccctaaaccaagcaatttctttgaataaaagttgaaatttcgttttt

SEQ ID NO: 157955 - DNA, 7325 bp, Homo sapiens
  Payload ID: 10940
  Gene Symbol: NKTR
  Gene Name: natural killer cell triggering receptor
  ENST ID: ENST00000429888
  CDS Start-End: 121-438
aggagacggcgttccgttagcggcgttggggtttggctgcagtggcagtgctttctcttctgctcacggggacccgctcaggctggaggccagccagctcttgccgccacctcggtcgcgatgggggcgcaggaccggccgcagtgccacttcgacatcgagatcaaccgggagccggttggtcgcattatgtttcagctcttctcagacatatgtccaaaaacatgcaaaaacttcctttgcttgtgctcaggagagaaaggccttgggaaaacaactgggaagaagttatgttataaaggttctacgttccatcgtgtggttaaaaactttatgattcagggtggggacttcagtgaaggtaatggaaaaggtggagaatcaatttatggtggatattttaaagagaatgtggtcttttgcaaaatgaaaagatgaaaactttattctcaaacatgacagagcgttccttttatcaatggcaaatcgagggaaacataccaatggttcccagtttttcataaagagtgttacaccgtgcgctccaaagtaccacaaagcctgctccacacctggatggggtgcatgtagtctttggactggttatttctggttttgaagtaatcgaacaaattgaaaatctgaagaccgatgctgcaagcagaccatatgcagatgtgcgagttattgactgtggagtacttgccacaaaatcaataaaagatgtttttgagaaaaaaaggaagaaaccaactcattcagaaggctcggattcctcttccaattcctcctcttcttcagaatcatcttcagaaagtgaacttgaacatgagagaagcagaaggaggaaacataagaggaggccaaaagttaaacgttctaaaaagaggcgaaaggaagcaagcagttcagaagagccaaggaataaacatgcaatgaacccaaaaggtcactctgagaggagtgataccaatgaaaaaaggtcagttgattccagtgctaaaagggaaaaacctgtggtccgcccagaagagattcctccagtgcctgagaaccgatttttactgagaagagatatgcctgttgttactgcagaacctgaaccgaagattcctgatgttgcacccattgtaagtgatcagaaaccatctgtatcaaagtctggacggaagattaaaggaaggggcacaattcgctatcacacacctccaagatcaagatcctgttctgagtcagatgatgatgacagcagtgaaactcctcctcactggaaagaggaaatgcagagattaagagcatatagaccacctagtggagaaaaatggagtaaaggagataagttaagtgacccctgttcaagccgatgggatgaaagaagcttgtctcagagatccagatcatggtcctataatggatattattcagaccttagtacagcaagacactctggccaccataaaaaacgcagaaaagaaaaaaaggttaagcataaaaagaaagggaaaaagcagaaacactgcagaagacacaaacaaacaaagaagagaaggattcttataccgtctgacatagaatcctcaaaatcttccactcgaagaatgaaatcctcttgtgatagagaaaggagttctcgttcttcctcattgtcatctcatcactcatcaaagagagactggtctaaatctgataaggatgtccagagctctttaacccattccagcagagactcatacagatcaaaatctcactcacagtcttattctagaggaagctcaagatcaaggactgcgtcaaagtcctcatcacattctcgaagtagatcaaagtccagatctagttccaagtctgggcaccgaaagagagcatcaaaatcaccaagaaaaacagcttctcagttaagtgaaaataaaccagttaaaacagaacctttaagagcaaccatggcacaaaatgaaaatgtagtagtacaaccagttgtagcagaaaatattcctgtaataccactgagtgacagtccccccccttcaagatggaagcctggacagaaaccttggaagccctcttatgagcgaattcaggaaatgaaagctaaaacaacccatttgctacccatccaaagcacttacagtttagcaaatattaaagagactggtagctcatcatcctaccataaaagagaaaaaaattcggaaagtgatcagagcacttattcaaaatacagtgatagaagttcagaaagctcaccaaggtcaaggagcagatcttctaggagtagatcttattccagatcatatacaagatcacgtagtctagctagttcacattcaaggtctaggtctccatcatctagatctcattcacgaaataaatacagtgatcattcacagtgtagtagatcatcttcatatacttctattagcagtgatgatggaaggcgagctaagaggagacttagatccagtgggaaaaaaaatagcgtttcacataaaaagcatagcagcagctctgaaaagacacttcacagtaaatatgtcaaaggtagagacaggtcttcatgtgtgagaaagtatagcgagagcagatcatctttagattattcttcagacagtgagcagtcaagtgttcaggccacacagtcagcccaggaaaaagagaagcagggccaaatggaaagaacacataataaacaagaaaaaaacagaggtgaagaaaaatccaagtctgaacgggaatgccctcattcaaaaaaaagaactttgaaagagaatctttctgatcaccttagaaatggcagtaagcccaaaaggaagaattatgctggtagtaaatgggactctgagtcaaattcagaacgagatgtcactaaaaacagtaaaaatgactcccatccatcctctgacaaggaagaaggtgaggccacatccgattctgaatcagaggttagtgaaattcacatcaaagtcaaacccacaaccaagtcgtccacaaatacttcactgcctgatgataatggtgcttggaaatcaagcaaacagcgcacatcaacttctgactctgaggggtcctgttccaattcggaaaacaataggggaaagccacaaaagcacaaacatgggtcaaaggaaaatcttaaaagagaacacaccaaaaaagtgaaagagaaattgaaagggaaaaaagacaaaaagcataaggctccaaaacgaaagcaagcatttcactggcagcctccactagaatttggtgaagaggaggaggaggagattgatgacaagcaagttactcaggaatcaaaagagaaaaaagtttctgaaaacaatgaaaccataaaagataatattctaaaaactgagaaatccagtgaagaggacctttcaggtaaacatgatacagtgactgtttcatcagatcttgatcagtttactaaagatgatagtaaactcagtatttctcccacagctttaaatactgaggaaaatgtggcctgtttacaaaacattcagcacgttgaagaaagtgttcccaatggagtggaagatgtgcttcaaacagatgacaacatggagatctgcactcctgataggagttccccagcaaaagtagaggagacttcccctctaggaaatgcacggcttgataccccagatataaacattgttttgaagcaggatatggcaacggaacatcctcaagcagaggtagtaaaacaggaaagcagcatgtccgaaagtaaagtgttgggtgaagtggggaaacaggacagcagctctgctagcttggctagtgctggagaaagtaccgggaagaaggaggtggctgagaagagccagatcaacctcattgataagaaatggaagcccctgcaaggtgtggggaacctggcagcacctaatgctgccacatccagtgctgtggaagttaaggtgttgaccactgtgcctgaaatgaaaccacaaggcttgagaatagaaattaaaagcaaaaataaagttcggcctgggtctctctttgatgaagtaagaaagacagcacgcttaaaccgtagaccaagaaatcaggagagttcaagtgatgagcagacgcctagtcgggatgatgatagccagtccaggagtccaagtagatctcgaagtaaatctgaaaccaaatcaagacacagaacaaggtctgtctcctatagtcactcaagaagtcgatcgagaagttccacatcatcttatcgatcaagaagctactctagaagtcggagcagaggatggtacagcagaggccgaaccagaagccggagcagttcctaccggagttacaaaagtcacaggacgtccagcaggagcagatccaggagcagctcatatgatccccacagtcgatccaggtcctacacctacgatagctactatagcaggagtcggagtcgaagtagaagccagagaagtgacagttaccaccgaggcagaagttataatcggcggtccaggagttgtagatcttatggctctgacagtgaaagtgaccgaagttactctcatcaccggagccccagtgagagcagcagatacagttgaaaacgtccggatacaaattatatcttatttgtaaatatctggcaacttagcttaagaaatgtaatgacagtctgttgttctatttcaatatcagaggtgaatttcaaaaatagacacttcttaattgttactggttcatttacatgtggggagaagaatttaaaatacagatatgtctcctaaaaatatttttatgccacattttacagtagccaactatggaaatgaatttcattttcttgaatcaagaaatcgtgaaatttatctatgtataatttgcaatattattttaagtctatttcactctatcttacgtatcccttagaatacagattctttttgcctgtttttccagttttagcatatatgctgccaagcatagaactgtgaaggagaactgttaaaggcggccaaatatttatatactgattacatagagtcttgtacatatgtgctctaaaaacaaaccacccagaattgatactgttggtaaccaggagtataaggcagtggctctggggttcttaattcattcctaacttctttgatacttcacaggattaggaaagtggtcatcatacatcccacacagtctgtattacttcaggcttgtgggcaaggttaggaagaatcaatcagccttaactataaatacctgcactgtctctgaggacttactattttatgttctttttaatcaataccgatcagaagtttaggttataaaaacaattctacttcatgctttggtgcttggtaatttttggtgcgtctttaagcattactcttatatatcatatattaaaataccataaaaatgaaattcagacaaaatcactggcaccaaaaatggtttattctgagctgtcttcactttgactatttggggggcttctctcaagtacagatgtgggttggggtcccctggagcaggcaggattggcagtaagagatattggccactcaagtctactgtgtgtgtgtgcctctggaagagtgaagaatggacttcaaaagtaacatcaaaaatctaactgccaccatcctggagacattttgcagggctttcctttcaagtctttcaagtacaggatattaccacaacagcagctgaactgttgtaaccagcatgtttttcctatttccactgtgacctgcagctgactcaaagccttgcgtgacctgacccaggtgcaagagacaggggaagagggatagagggtatagcataaattacatattttcatggctttgggtggttcctccaaaaataattggacctgtaaaaactagtgtgtgtgtgtgtgtgtgtgtgtgtgtgtgtgtggtttttttttttaatctttactttgaatttgttccccaagtgtacttaatcaccttagtgccagtttaatccagttatgcagaagaaattcatattggttgcctgatgtagagctcagcaccaccctaccacaggccttgtctggtgtatttgggaagtggaaaagagccctcagttggagggagctgacaacccttggtggagggagggtgcccttgaatgtattaaaactatcacccaaagaaggtatgaaaacagggtaaggtggtcagttgtttgccaggtcaatagacagaaagtacattagaaaacaggacttaggccaaacaaacaatactggatactgaatacaaaacagtatgatttatattaaaggtttccaaaggttgcctgcaaaggagaatattactactagtcagcaggaaaaaaatgcattcagaacccaagcagaaactgccaaatgtaattaggttaagaaaagttacccttgggcagtgtattagttttctattgctgtgtgacaaattaccccaaatttagcagtttaaaaaacaatacccatagcagttctgtagctcatgagtctggcacagtgtggctggattctctgctcagggtcttaaaggctgaaataagggttggcaggacaacattccttcatggaggctctggggaagaatctgcttctaagttcattcaggttgttggcggaattcagttctttgctggctctcagctggaggcccctctctcacctcaaggctgcctgcattccttcttatgtggtcccctccagcttcaaaccagccttcctgctctttctcatgcttcatatctctctcccgtcctcctgttttaggggcatatgattagctcaagcccacagatatattttaaggttgattgtgcgatagaacataattgcaggagtactgtctcatctcatcatattcacgggttctggagattagctcattgaaagtgggaggggcattttcaaattctgcctaccacaggcaataactgcccatctcagctgtaggtggaatttttacccagaaaagataggccctagaagcctcatttcttttctccatggaaaaggacagccctctgctgcagcgttcaacttgtgtgtttactgacagagtgaactacagaaatagcttttcttcctaaaggggattgttctacattttgaagttattttttaataaaattgaattatgttgtgtattgtgcttcttaataggaaatgcattattggactgtttttgtaacatcctgtttattgcaaatagctagtatcgttcaaaaactgtataaaatacttttgtacatattagcaatgtctaatttgtatacacttcagttaaatttccctaaaacttgaaaggggaccttgtagaaattaaaatatatacttagtctaa

SEQ ID NO: 157956 - DNA, 560 bp, Homo sapiens
  Payload ID: 10940
  Gene Symbol: NKTR
  Gene Name: natural killer cell triggering receptor
  ENST ID: ENST00000445842
  CDS Start-End: 247-560
aggctggaggccagccaggtgaagagctcgcccgcatgcgtgcgcgctgcgtgggagccgcgaggcccggggcgggagggggcctcgtcttggcctcctgcgctgtcgcgacgggccggcgtgaggcaccgtggcgcggacttcgtctcagccccgccctcgcccctgccctcgcccccgccctcgcccctgccctgaccgcttttctccccctctctcccagctcttgccgccacctcggtcgcgatgggggcgcaggaccggccgcagtgccacttcgacatcgagatcaaccgggagccggttggtcgcattatgtttcagctcttctcagacatatgtccaaaaacatgcaaaaacttcctttgcttgtgctcaggagagaaaggccttgggaaaacaactgggaagaagttatgttataaaggttctacgttccatcgtgtggttaaaaactttatgattcagggtggggacttcagtgaaggtaatggaaaaggtggagaatcaatttatggtggatattttaaagagaatgtggtcttttgcaaaatgaaaag

SEQ ID NO: 157957 - DNA, 7319 bp, Homo sapiens
  Payload ID: 10940
  Gene Symbol: NKTR
  Gene Name: natural killer cell triggering receptor
  ENST ID: ENST00000617821
  CDS Start-End: 1073-4561
gacggcgttccgttagcggcgttggggtttggctgcagtggcagtgctttctcttctgctcacggggacccgctcaggctggaggccagccagctcttgccgccacctcggtcgcgatgggggcgcaggaccggccgcagtgccacttcgacatcgagatcaaccgggagccggttggtcgcattatgtttcagctcttctcagacatatgtccaaaaacatgcaaaaacttcctttgcttgtgctcaggagagaaaggccttgggaaaacaactgggaagaagttatgttataaaggttctacgttccatcgtgtggttaaaaactttatgattcagggtggggacttcagtgaaggtaatggaaaaggtggagaatcaatttatggtggatattttaaaggtaaggcttaatatttttcttcaaacagatgaaaactttattctcaaacatgacagagcgttccttttatcaatggcaaatcgagggaaacataccaatggttcccagtttttcataaagagtgttacaccgtgcgctccaaagtaccacaaagcctgctccacacctggatggggtgcatgtagtctttggactggttatttctggttttgaagtaatcgaacaaattgaaaatctgaagaccgatgctgcaagcagaccatatgcagatgtgcgagttattgactgtggagtacttgccacaaaatcaataaaagatgtttttgagaaaaaaaggaagaaaccaactcattcagaaggctcggattcctcttccaattcctcctcttcttcagaatcatcttcagaaagtgaacttgaacatgagagaagcagaaggaggaaacataagaggaggccaaaagttaaacgttctaaaaagaggcgaaaggaagcaagcagttcagaagagccaaggaataaacatgcaatgaacccaaaaggtcactctgagaggagtgataccaatgaaaaaaggtcagttgattccagtgctaaaagggaaaaacctgtggtccgcccagaagagattcctccagtgcctgagaaccgatttttactgagaagagatatgcctgttgttactgcagaacctgaaccgaagattcctgatgttgcacccattgtaagtgatcagaaaccatctgtatcaaagtctggacggaagattaaaggaaggggcacaattcgctatcacacacctccaagatcaagatcctgttctgagtcagatgatgatgacagcagtgaaactcctcctcactggaaagaggaaatgcagagattaagagcatatagaccacctagtggagaaaaatggagtaaaggagataagttaagtgacccctgttcaagccgatgggatgaaagaagcttgtctcagagatccagatcatggtcctataatggatattattcagaccttagtacagcaagacactctggccaccataaaaaacgcagaaaagaaaaaaaggttaagcataaaaagaaagggaaaaagcagaaacactgcagaagacacaaacaaacaaagaagagaaggattcttataccgtctgacatagaatcctcaaaatcttccactcgaagaatgaaatcctcttgtgatagagaaaggagttctcgttcttcctcattgtcatctcatcactcatcaaagagagactggtctaaatctgataaggatgtccagagctctttaacccattccagcagagactcatacagatcaaaatctcactcacagtcttattctagaggaagctcaagatcaaggactgcgtcaaagtcctcatcacattctcgaagtagatcaaagtccagatctagttccaagtctgggcaccgaaagagagcatcaaaatcaccaagaaaaacagcttctcagttaagtgaaaataaaccagttaaaacagaacctttaagagcaaccatggcacaaaatgaaaatgtagtagtacaaccagttgtagcagaaaatattcctgtaataccactgagtgacagtccccccccttcaagatggaagcctggacagaaaccttggaagccctcttatgagcgaattcaggaaatgaaagctaaaacaacccatttgctacccatccaaagcacttacagtttagcaaatattaaagagactggtagctcatcatcctaccataaaagagaaaaaaattcggaaagtgatcagagcacttattcaaaatacagtgatagaagttcagaaagctcaccaaggtcaaggagcagatcttctaggagtagatcttattccagatcatatacaagatcacgtagtctagctagttcacattcaaggtctaggtctccatcatctagatctcattcacgaaataaatacagtgatcattcacagtgtagtagatcatcttcatatacttctattagcagtgatgatggaaggcgagctaagaggagacttagatccagtgggaaaaaaaatagcgtttcacataaaaagcatagcagcagctctgaaaagacacttcacagtaaatatgtcaaaggtagagacaggtcttcatgtgtgagaaagtatagcgagagcagatcatctttagattattcttcagacagtgagcagtcaagtgttcaggccacacagtcagcccaggaaaaagagaagcagggccaaatggaaagaacacataataaacaagaaaaaaacagaggtgaagaaaaatccaagtctgaacgggaatgccctcattcaaaaaaaagaactttgaaagagaatctttctgatcaccttagaaatggcagtaagcccaaaaggaagaattatgctggtagtaaatgggactctgagtcaaattcagaacgagatgtcactaaaaacagtaaaaatgactcccatccatcctctgacaaggaagaaggtgaggccacatccgattctgaatcagaggttagtgaaattcacatcaaagtcaaacccacaaccaagtcgtccacaaatacttcactgcctgatgataatggtgcttggaaatcaagcaaacagcgcacatcaacttctgactctgaggggtcctgttccaattcggaaaacaataggggaaagccacaaaagcacaaacatgggtcaaaggaaaatcttaaaagagaacacaccaaaaaagtgaaagagaaattgaaagggaaaaaagacaaaaagcataaggctccaaaacgaaagcaagcatttcactggcagcctccactagaatttggtgaagaggaggaggaggagattgatgacaagcaagttactcaggaatcaaaagagaaaaaagtttctgaaaacaatgaaaccataaaagataatattctaaaaactgagaaatccagtgaagaggacctttcaggtaaacatgatacagtgactgtttcatcagatcttgatcagtttactaaagatgatagtaaactcagtatttctcccacagctttaaatactgaggaaaatgtggcctgtttacaaaacattcagcacgttgaagaaagtgttcccaatggagtggaagatgtgcttcaaacagatgacaacatggagatctgcactcctgataggagttccccagcaaaagtagaggagacttcccctctaggaaatgcacggcttgataccccagatataaacattgttttgaagcaggatatggcaacggaacatcctcaagcagaggtagtaaaacaggaaagcagcatgtccgaaagtaaagtgttgggtgaagtggggaaacaggacagcagctctgctagcttggctagtgctggagaaagtaccgggaagaaggaggtggctgagaagagccagatcaacctcattgataagaaatggaagcccctgcaaggtgtggggaacctggcagcacctaatgctgccacatccagtgctgtggaagttaaggtgttgaccactgtgcctgaaatgaaaccacaaggcttgagaatagaaattaaaagcaaaaataaagttcggcctgggtctctctttgatgaagtaagaaagacagcacgcttaaaccgtagaccaagaaatcaggagagttcaagtgatgagcagacgcctagtcgggatgatgatagccagtccaggagtccaagtagatctcgaagtaaatctgaaaccaaatcaagacacagaacaaggtctgtctcctatagtcactcaagaagtcgatcgagaagttccacatcatcttatcgatcaagaagctactctagaagtcggagcagaggatggtacagcagaggccgaaccagaagccggagcagttcctaccggagttacaaaagtcacaggacgtccagcaggagcagatccaggagcagctcatatgatccccacagtcgatccaggtcctacacctacgatagctactatagcaggagtcggagtcgaagtagaagccagagaagtgacagttaccaccgaggcagaagttataatcggcggtccaggagttgtagatcttatggctctgacagtgaaagtgaccgaagttactctcatcaccggagccccagtgagagcagcagatacagttgaaaacgtccggatacaaattatatcttatttgtaaatatctggcaacttagcttaagaaatgtaatgacagtctgttgttctatttcaatatcagaggtgaatttcaaaaatagacacttcttaattgttactggttcatttacatgtggggagaagaatttaaaatacagatatgtctcctaaaaatatttttatgccacattttacagtagccaactatggaaatgaatttcattttcttgaatcaagaaatcgtgaaatttatctatgtataatttgcaatattattttaagtctatttcactctatcttacgtatcccttagaatacagattctttttgcctgtttttccagttttagcatatatgctgccaagcatagaactgtgaaggagaactgttaaaggcggccaaatatttatatactgattacatagagtcttgtacatatgtgctctaaaaacaaaccacccagaattgatactgttggtaaccaggagtataaggcagtggctctggggttcttaattcattcctaacttctttgatacttcacaggattaggaaagtggtcatcatacatcccacacagtctgtattacttcaggcttgtgggcaaggttaggaagaatcaatcagccttaactataaatacctgcactgtctctgaggacttactattttatgttctttttaatcaataccgatcagaagtttaggttataaaaacaattctacttcatgctttggtgcttggtaatttttggtgcgtctttaagcattactcttatatatcatatattaaaataccataaaaatgaaattcagacaaaatcactggcaccaaaaatggtttattctgagctgtcttcactttgactatttggggggcttctctcaagtacagatgtgggttggggtcccctggagcaggcaggattggcagtaagagatattggccactcaagtctactgtgtgtgtgtgcctctggaagagtgaagaatggacttcaaaagtaacatcaaaaatctaactgccaccatcctggagacattttgcagggctttcctttcaagtctttcaagtacaggatattaccacaacagcagctgaactgttgtaaccagcatgtttttcctatttccactgtgacctgcagctgactcaaagccttgcgtgacctgacccaggtgcaagagacaggggaagagggatagagggtatagcataaattacatattttcatggctttgggtggttcctccaaaaataattggacctgtaaaaactagtgtgtgtgtgtgtgtgtgtgtgtgtgtgtgtgtggtttttttttttaatctttactttgaatttgttccccaagtgtacttaatcaccttagtgccagtttaatccagttatgcagaagaaattcatattggttgcctgatgtagagctcagcaccaccctaccacaggccttgtctggtgtatttgggaagtggaaaagagccctcagttggagggagctgacaacccttggtggagggagggtgcccttgaatgtattaaaactatcacccaaagaaggtatgaaaacagggtaaggtggtcagttgtttgccaggtcaatagacagaaagtacattagaaaacaggacttaggccaaacaaacaatactggatactgaatacaaaacagtatgatttatattaaaggtttccaaaggttgcctgcaaaggagaatattactactagtcagcaggaaaaaaatgcattcagaacccaagcagaaactgccaaatgtaattaggttaagaaaagttacccttgggcagtgtattagttttctattgctgtgtgacaaattaccccaaatttagcagtttaaaaaacaatacccatagcagttctgtagctcatgagtctggcacagtgtggctggattctctgctcagggtcttaaaggctgaaataagggttggcaggacaacattccttcatggaggctctggggaagaatctgcttctaagttcattcaggttgttggcggaattcagttctttgctggctctcagctggaggcccctctctcacctcaaggctgcctgcattccttcttatgtggtcccctccagcttcaaaccagccttcctgctctttctcatgcttcatatctctctcccgtcctcctgttttaggggcatatgattagctcaagcccacagatatattttaaggttgattgtgcgatagaacataattgcaggagtactgtctcatctcatcatattcacgggttctggagattagctcattgaaagtgggaggggcattttcaaattctgcctaccacaggcaataactgcccatctcagctgtaggtggaatttttacccagaaaagataggccctagaagcctcatttcttttctccatggaaaaggacagccctctgctgcagcgttcaacttgtgtgtttactgacagagtgaactacagaaatagcttttcttcctaaaggggattgttctacattttgaagttattttttaataaaattgaattatgttgtgtattgtgcttcttaataggaaatgcattattggactgtttttgtaacatcctgtttattgcaaatagctagtatcgttcaaaaactgtataaaatacttttgtacatattagcaatgtctaatttgtatacacttcagttaaatttccctaaaacttgaaaggggaccttgtagaaattaaaatatatacttagtct

SEQ ID NO: 157958 - DNA, 918 bp, Homo sapiens
  Payload ID: 10941
  Gene Symbol: NCBP2-AS2
  Gene Name: NCBP2 antisense RNA 2 (head to head)
  Uniprot ID: Q69YL0
  ENST ID: ENST00000602845
  CDS Start-End: 95-394
gtcatcaagctgcgcgggggcatagacgtccgggtcgggcgccgcggggcggaagacgagggcggcgaggtcgggttccgggcgcttggagaagatggtgctgcggcggctgctggccgccctgctgcacagcccgcagctggtggaacgtctgtcagagtcgcggcctatccgacgtgcggcgcagctcacggccttcgcactgctgcaggcccagctgcggggccaggacgcggcccgccgcctgcaggacctcgcggctgggcccgtgggctccctgtgccgccgcgctgagcgatttagagacgccttcacccaggagctacgccgcggcctccgaggccgctcggggccaccaccaggtagccagaggggccctggcgcaaacatttaatcctgggctgtgcggggccgaggccgcttgcttttccttccgggctctacagtggcatcaatgtggaggggtcattccgggcactgcgcgcggcttcgaatcccgactgggattgttggcctgcagacatcccacgcataagagcctaggccagaccgcccgctccgttgaagtcttgtgattggacaagacacagtgtggagacagccctaagcctaacagagatgaaggtaggctgggtccagacacggcacctacggagagccacggaccgaagccagagagcctttcctctgcaagtgggactgaaactcttgacagatgctgctcaatctgactggtatagcaggacagttaattccagggacgatatggatgaaaagacaaccctacagctgccaaattcctttgattaaatgtgtgagctggttgataggcatgagtgtgatacttctcaggcaagatgtgttaagaataccggggactgtaggcctatggtaataataaacacgtattttatgaaa

SEQ ID NO: 157959 - DNA, 1937 bp, Homo sapiens
  Payload ID: 10942
  Gene Symbol: NCK1
  Gene Name: NCK adaptor protein 1
  Uniprot ID: P16333
  ENST ID: ENST00000288986
  CDS Start-End: 131-1264
accgcgcgtgccccgcctctctcccaagagctacgcggcggcggcggagcgcaggcctcgtgccgttacggccatcacggcggccgcagtggcgtcctggagccctcctcagtgctgaagctgctgaaagatggcagaagaagtggtggtagtagccaaatttgattatgtggcccaacaagaacaagagttggacatcaagaagaatgagagattatggcttctggatgattctaagtcctggtggcgagttcgaaattccatgaataaaacaggttttgtgccttctaactatgtggaaaggaaaaacagtgctcggaaagcatctattgtgaaaaacctaaaggataccttaggcattggaaaagtgaaaagaaaacctagtgtgccagattctgcatctcctgctgatgatagttttgttgacccaggggaacgtctctatgacctcaacatgcccgcttatgtgaaatttaactacatggctgagagagaggatgaattatcattgataaaggggacaaaggtgatcgtcatggagaaatgcagtgatgggtggtggcgtggtagctacaatggacaagttggatggttcccttcaaactatgtaactgaagaaggtgacagtcctttgggtgaccatgtgggttctctgtcagagaaattagcagcagtcgtcaataacctaaatactgggcaagtgttgcatgtggtacaggctctttacccattcagctcatctaatgatgaagaacttaatttcgagaaaggagatgtaatggatgttattgaaaaacctgaaaatgacccagagtggtggaaatgcaggaagatcaatggtatggttggtctagtaccaaaaaactatgttaccgttatgcagaataatccattaacttcaggtttggaaccatcacctccacagtgtgattacattaggccttcactcactggaaagtttgctggcaatccttggtattatggcaaagtcaccaggcatcaagcagaaatggcattaaatgaaagaggacatgaaggggatttcctcattcgtgatagtgaatcttcgccaaatgatttctcagtatcactaaaagcacaagggaaaaacaagcattttaaagtccaactaaaagagactgtctactgcattgggcagcgtaaattcagcaccatggaagaacttgtagaacattacaaaaaggcaccaatttttacaagtgaacaaggagaaaaattatatcttgtcaagcatttatcatgatactgctgaccagaagtgactgctgtgtagctgtaatttgtcatgtaattgaagactgagaaaatgttgggtccagtcgtgcttgattggaaattgttgtttctaaatctatatgagaattgacaataagtatttttattataactcagcccatacatatatactatgtatgcagtgcatctgcatagaacagttccttatccttggccttctgttttattgtttttttctttgctgttttccctttgcttctaatattacagttttgtattttgtaaacaaaaatcaaataatgcatatcagaatctttatatggaagaaatcctttattgcctttcctttgtttccttgtaaaggcaccctgttctgttatggtttttcattatataaaattattatatctatatatgacatatgctaaaatttcttggagagtgttaatcttttctgtgactaaatagcaataataagtggaaaattagaaattatttccaggtattatatttgtcacaggccattgtaaataccaagtatattgtgtctgccataatttttaaaaatacattcattgtcttcagtcatacagcaagacacatgagacatagattagaaaacatgttgtacaattttaatttacaactgttggaaataaaaatcacttaatttttttcca

SEQ ID NO: 157960 - DNA, 1971 bp, Homo sapiens
  Payload ID: 10942
  Gene Symbol: NCK1
  Gene Name: NCK adaptor protein 1
  Uniprot ID: P16333
  ENST ID: ENST00000481752
  CDS Start-End: 165-1298
accgcgcgtgccccgcctctctcccaagagctacgcggcggcggcggagcgcaggcctcgtgccgttacggccatcacggcggccgcagtggcgtcctggagccctcctcaggtgagctggagctgcccggctcggcagcgggaagtgctgaagctgctgaaagatggcagaagaagtggtggtagtagccaaatttgattatgtggcccaacaagaacaagagttggacatcaagaagaatgagagattatggcttctggatgattctaagtcctggtggcgagttcgaaattccatgaataaaacaggttttgtgccttctaactatgtggaaaggaaaaacagtgctcggaaagcatctattgtgaaaaacctaaaggataccttaggcattggaaaagtgaaaagaaaacctagtgtgccagattctgcatctcctgctgatgatagttttgttgacccaggggaacgtctctatgacctcaacatgcccgcttatgtgaaatttaactacatggctgagagagaggatgaattatcattgataaaggggacaaaggtgatcgtcatggagaaatgcagtgatgggtggtggcgtggtagctacaatggacaagttggatggttcccttcaaactatgtaactgaagaaggtgacagtcctttgggtgaccatgtgggttctctgtcagagaaattagcagcagtcgtcaataacctaaatactgggcaagtgttgcatgtggtacaggctctttacccattcagctcatctaatgatgaagaacttaatttcgagaaaggagatgtaatggatgttattgaaaaacctgaaaatgacccagagtggtggaaatgcaggaagatcaatggtatggttggtctagtaccaaaaaactatgttaccgttatgcagaataatccattaacttcaggtttggaaccatcacctccacagtgtgattacattaggccttcactcactggaaagtttgctggcaatccttggtattatggcaaagtcaccaggcatcaagcagaaatggcattaaatgaaagaggacatgaaggggatttcctcattcgtgatagtgaatcttcgccaaatgatttctcagtatcactaaaagcacaagggaaaaacaagcattttaaagtccaactaaaagagactgtctactgcattgggcagcgtaaattcagcaccatggaagaacttgtagaacattacaaaaaggcaccaatttttacaagtgaacaaggagaaaaattatatcttgtcaagcatttatcatgatactgctgaccagaagtgactgctgtgtagctgtaatttgtcatgtaattgaagactgagaaaatgttgggtccagtcgtgcttgattggaaattgttgtttctaaatctatatgagaattgacaataagtatttttattataactcagcccatacatatatactatgtatgcagtgcatctgcatagaacagttccttatccttggccttctgttttattgtttttttctttgctgttttccctttgcttctaatattacagttttgtattttgtaaacaaaaatcaaataatgcatatcagaatctttatatggaagaaatcctttattgcctttcctttgtttccttgtaaaggcaccctgttctgttatggtttttcattatataaaattattatatctatatatgacatatgctaaaatttcttggagagtgttaatcttttctgtgactaaatagcaataataagtggaaaattagaaattatttccaggtattatatttgtcacaggccattgtaaataccaagtatattgtgtctgccataatttttaaaaatacattcattgtcttcagtcatacagcaagacacatgagacatagattagaaaacatgttgtacaattttaatttacaactgttggaaataaaaatcacttaatttttttcca

SEQ ID NO: 157961 - DNA, 526 bp, Homo sapiens
  Payload ID: 10942
  Gene Symbol: NCK1
  Gene Name: NCK adaptor protein 1
  ENST ID: ENST00000488930
  CDS Start-End: 41-526
ggcgtcctggagccctcctcagtgctgaagctgctgaaagatggcagaagaagtggtggtagtagccaaatttgattatgtggcccaacaagaacaagagttggacatcaagaagaatgagagattatggcttctggatgattctaagtcctggtggcgagttcgaaattccatgaataaaacaggttttgtgccttctaactatgtggaaaggaaaaacagtgctcggaaagcatctattgtgaaaaacctaaaggataccttaggcattggaaaagtgaaaagaaaacctagtgtgccagattctgcatctcctgctgatgatagttttgttgacccaggggaacgtctctatgacctcaacatgcccgcttatgtgaaatttaactacatggctgagagagaggatgaattatcattgataaaggggacaaaggtttggaaccatcacctccacagtgtgattacattaggccttcactcactggaaagtttgctggcaatccttggtattatggcaaagtca

SEQ ID NO: 157962 - DNA, 581 bp, Homo sapiens
  Payload ID: 10942
  Gene Symbol: NCK1
  Gene Name: NCK adaptor protein 1
  ENST ID: ENST00000467911
  CDS Start-End: 60-581
actgagaattatcctgagctgtgttaacaaactgacagaacacagaatttttactcaaaatggattggttaaacgtctttaaagattttttcagcattggaaaagtgaaaagaaaacctagtgtgccagattctgcatctcctgctgatgatagttttgttgacccaggggaacgtctctatgacctcaacatgcccgcttatgtgaaatttaactacatggctgagagagaggatgaattatcattgataaaggggacaaagtgtgattacattaggccttcactcactggaaagtttgctggcaatccttggtattatggcaaagtcaccaggcatcaagcagaaatggcattaaatgaaagaggacatgaaggggatttcctcattcgtgatagtgaatcttcgccaaatgatttctcagtatcactaaaagcacaagggaaaaacaagcattttaaagtccaactaaaagagactgtctactgcattgggcagcgtaaattcagcaccatggaagaacttgtagaacattacaaaaaggcaccaatttttacaagtgaacaaggagaaaaattatat

SEQ ID NO: 157963 - DNA, 557 bp, Homo sapiens
  Payload ID: 10942
  Gene Symbol: NCK1
  Gene Name: NCK adaptor protein 1
  ENST ID: ENST00000476286
  CDS Start-End: 332-557
ctcgtgccgttacggccatcacggcggccgcagtggcgtcctggagccctcctcaggtgagctggagctgcccggctcggcagcgggaagagacagtctcactgtgttgcccaggctggttttgaactcctgcgctcaagtgatcttcccatctctgcctcccaaagagctaggattacaggagtgagccactgcacccagcagcttgatgtttctaaggttcatccatgttatagcacatactggtactgtgtctggaattggtgggttcttggtctctctgacttcaagaatgaagccgcggaccctcgcgtgctgaagctgctgaaagatggcagaagaagtggtggtagtagccaaatttgattatgtggcccaacaagaacaagagttggacatcaagaagaatgagagattatggcttctggatgattctaagtcctggtggcgagttcgaaattccatgaataaaacaggttttgtgccttctaactatgtggaaaggaaaaacagtgctcggaaagcatctattgtgaaaaacctaaaggataccttag

SEQ ID NO: 157964 - DNA, 587 bp, Homo sapiens
  Payload ID: 10942
  Gene Symbol: NCK1
  Gene Name: NCK adaptor protein 1
  ENST ID: ENST00000491539
  CDS Start-End: 201-587
aagagctacgcggcggcggcggagcgcaggcctcgtgccgttacggccatcacggcggccgcagtggcgtcctggagccctcctcagagatagggtctcactgtgttgttcagactggttttgaattcctggcctcaaacgatcctcccaccttggcttctcaacgtgctgggattatagggtgctgaagctgctgaaagatggcagaagaagtggtggtagtagccaaatttgattatgtggcccaacaagaacaagagttggacatcaagaagaatgagagattatggcttctggatgattctaagtcctggtggcgagttcgaaattccatgaataaaacaggttttgtgccttctaactatgtggaaaggaaaaacagtgctcggaaagcatctattgtgaaaaacctaaaggataccttaggcattggaaaagtgaaaagaaaacctagtgtgccagattctgcatctcctgctgatgatagttttgttgacccaggggaacgtctctatgacctcaacatgcccgcttatgtgaaatttaactacatggctgagagagaggatgaattatcattgataaag

SEQ ID NO: 157965 - DNA, 422 bp, Homo sapiens
  Payload ID: 10942
  Gene Symbol: NCK1
  Gene Name: NCK adaptor protein 1
  ENST ID: ENST00000496489
  CDS Start-End: 1-422
atgtggcccaacaagaacaagagttggacatcaagaagaatgagagattatggcttctggatgattctaagtcctggtggcgagttcgaaattccatgaataaaacaggttttgtgccttctaactatgtggaaaggaaaaacagtgctcggaaagcatctattgtgaaaaacctaaaggataccttaggcattggaaaagtgaaaagaaaacctagtgtgccagattctgcatctcctgctgatgatagttttgttgacccaggggaacgtctctatgacctcaacatgcccgcttatgtgaaatttaactacatggctgagagagaggatgaattatcattgataaaggggacaaagtgtgattacattaggccttcactcactggaaagtttgctggcaatccttggtattatggcaaa

SEQ ID NO: 157966 - DNA, 2403 bp, Homo sapiens
  Payload ID: 10942
  Gene Symbol: NCK1
  Gene Name: NCK adaptor protein 1
  Uniprot ID: P16333
  ENST ID: ENST00000469404
  CDS Start-End: 92-1033
gtttcagtgttgcagaacagacgaggaagctcactgagaattatcctgagctgtgttaacaaactgacagaacacagaatttttactcaaaatggattggttaaacgtctttaaagattttttcagcattggaaaagtgaaaagaaaacctagtgtgccagattctgcatctcctgctgatgatagttttgttgacccaggggaacgtctctatgacctcaacatgcccgcttatgtgaaatttaactacatggctgagagagaggatgaattatcattgataaaggggacaaaggtgatcgtcatggagaaatgcagtgatgggtggtggcgtggtagctacaatggacaagttggatggttcccttcaaactatgtaactgaagaaggtgacagtcctttgggtgaccatgtgggttctctgtcagagaaattagcagcagtcgtcaataacctaaatactgggcaagtgttgcatgtggtacaggctctttacccattcagctcatctaatgatgaagaacttaatttcgagaaaggagatgtaatggatgttattgaaaaacctgaaaatgacccagagtggtggaaatgcaggaagatcaatggtatggttggtctagtaccaaaaaactatgttaccgttatgcagaataatccattaacttcaggtttggaaccatcacctccacagtgtgattacattaggccttcactcactggaaagtttgctggcaatccttggtattatggcaaagtcaccaggcatcaagcagaaatggcattaaatgaaagaggacatgaaggggatttcctcattcgtgatagtgaatcttcgccaaatgatttctcagtatcactaaaagcacaagggaaaaacaagcattttaaagtccaactaaaagagactgtctactgcattgggcagcgtaaattcagcaccatggaagaacttgtagaacattacaaaaaggcaccaatttttacaagtgaacaaggagaaaaattatatcttgtcaagcatttatcatgatactgctgaccagaagtgactgctgtgtagctgtaatttgtcatgtaattgaagactgagaaaatgttgggtccagtcgtgcttgattggaaattgttgtttctaaatctatatgagaattgacaataagtatttttattataactcagcccatacatatatactatgtatgcagtgcatctgcatagaacagttccttatccttggccttctgttttattgtttttttctttgctgttttccctttgcttctaatattacagttttgtattttgtaaacaaaaatcaaataatgcatatcagaatctttatatggaagaaatcctttattgcctttcctttgtttccttgtaaaggcaccctgttctgttatggtttttcattatataaaattattatatctatatatgacatatgctaaaatttcttggagagtgttaatcttttctgtgactaaatagcaataataagtggaaaattagaaattatttccaggtattatatttgtcacaggccattgtaaataccaagtatattgtgtctgccataatttttaaaaatacattcattgtcttcagtcatacagcaagacacatgagacatagattagaaaacatgttgtacaattttaatttacaactgttggaaataaaaatcacttaatttttttccagtgcttctccctcatctggttattcaagaaaacaaaacagtctctgagatatttagcttttcaaactgtaaatagatgctctagtgttatttatttttttaatcccacttgtattattttacctctagagcatcttgtattaggacatgttatatttatgccagtgggaaataagttatggccaagttttgcaaaaacaggaagcagtgagatacttgtttttttctcctcactaaatatcagtaattgtcaggaatggtattacctattttcatttcctcttttcagctttaagttttgttgattgggacactaaaactgatgtatacctgaggaaaaaatagaatgtgctcatggttagggaaaattatattatttttaattttttaatttgttttttaaccaagtaggaatttgggtgtatggataagaggccaatctgcttctgtaggctatagaagaaaaccagttgtattttatggtcataatttgtccccctattattctggagatttaaatttaagtaaagtagccatcagtattttaattgaaaaatactaaagccacataactgagtaggatgtcgtatgatactttcaacaaattccctaatgctgcctaagcatatggatgttttaattctttgctgttataaatagatatctaatacgccagaattactgatggtaaaattgaa

SEQ ID NO: 157967 - DNA, 571 bp, Homo sapiens
  Payload ID: 10942
  Gene Symbol: NCK1
  Gene Name: NCK adaptor protein 1
  ENST ID: ENST00000485096
  CDS Start-End: 226-571
gcggcggcggcggagcgcaggcctcgtgccgttacggccatcacggcggccgcagtggcgtcctggagccctcctcaggtgagctggagctgcccggctcggcagcgggaagagatagggtctcactgtgttgttcagactggttttgaattcctggcctcaaacgatcctcccaccttggcttctcaacgtgctgggattatagggtgctgaagctgctgaaagatggcagaagaagtggtggtagtagccaaatttgattatgtggcccaacaagaacaagagttggacatcaagaagaatgagagattatggcttctggatgattctaagtcctggtggcgagttcgaaattccatgaataaaacaggttttgtgccttctaactatgtggaaaggaaaaacagtgctcggaaagcatctattgtgaaaaacctaaaggataccttaggcattggaaaagtgaaaagaaaacctagtgtgccagattctgcatctcctgctgatgatagttttgttgacccaggggaacgtctctatgacctcaacatgcccgcttatgtgaaattta

SEQ ID NO: 157968 - DNA, 2683 bp, Homo sapiens
  Payload ID: 10943
  Gene Symbol: NCK2
  Gene Name: NCK adaptor protein 2
  Uniprot ID: O43639
  ENST ID: ENST00000233154
  CDS Start-End: 443-1585
gccgcggggatcgtcaggccggagccgcgcggccgagcgggcggcgggcggaggggagggcttggcggccgggaggctcgcggcgcccgggccggcagggtccgcccgggccggcagcgtccgcccggcggcgggaggagggagcggcgcagacaaagagcggcgcctgggcgggcgcagcgcggccaccgccccgggacccgcgccgctgccctccggctccgcgggcggcccacggcgagatttcatgtgttctttgtatacaagcgacgtcccagattataattctctgctgagatttgagttggatttgaggatttggagaatccctgcagctttgtaacttcagaggtgtaattagctgaaaacatcatcgttttgaagagttctgcgttttgccagtcacctctcaactgtgtgccaaagaaggactccatgaaagatgacagaagaagttattgtgatagccaagtgggactacaccgcccagcaggaccaggagctggacatcaagaagaacgagcggctgtggttgctggacgactccaagacgtggtggcgggtgaggaacgcggccaacaggacgggctatgtaccgtccaactacgtggagcggaagaacagcctgaagaagggctccctcgtgaagaacctgaaggacacactaggcctcggcaagacgcgcaggaagaccagcgcgcgggatgcgtcccccacgcccagcacggacgccgagtaccccgccaatggcagcggcgccgaccgcatctacgacctcaacatcccggccttcgtcaagttcgcctatgtggccgagcgggaggatgagttgtccctggtgaaggggtcgcgcgtcaccgtcatggagaagtgcagcgacggttggtggcggggcagctacaacgggcagatcggctggttcccctccaactacgtcttggaggaggtggacgaggcggctgcggagtccccaagcttcctgagcctgcgcaagggcgcctcgctgagcaatggccagggctcccgcgtgctgcatgtggtccagacgctgtaccccttcagctcagtcaccgaggaggagctcaacttcgagaagggggagaccatggaggtgattgagaagccggagaacgaccccgagtggtggaaatgcaaaaatgcccggggccaggtgggcctcgtccccaaaaactacgtggtggtcctcagtgacgggcctgccctgcaccctgcgcacgccccacagataagctacaccgggccctcgtccagcgggcgcttcgcgggcagagagtggtactacgggaacgtgacgcggcaccaggccgagtgcgccctcaacgagcggggcgtggagggcgacttcctcattagggacagcgagtcctcgcccagcgacttctccgtgtcccttaaagcgtcagggaagaacaaacacttcaaggtgcagctcgtggacaatgtctactgcattgggcagcggcgcttccacaccatggacgagctggtggaacactacaaaaaggcgcccatcttcaccagcgagcacggggagaagctctacctcgtcagggccctgcagtgacggcgccccggccccacactcgcctcccgggccccacggtggagctgcccgcccggccttgtggcagaggctcctcccgcggggacggccccgacggcttctctgcgagtctctctttatgttcaggtcgcttggtcggttcgtctcccatttgccatccaggcctcacacccacactcgagcccacccggccggccagctttagaggaggggaggagcagggcgagttcacattattccttttccatcggaagtggcgctcgtgcattcaactcgttcccgctcatggaacccctctttaaaaagacgcagggcacctgtgagcgcaggagcgagcctaaggccacccagcggcagcgcccgtgtcctgggcactcagcgtgctgggcagagcaggtgcgatggccccagtcctagcagccctcgcccatgtcctgtgcccttacatggctcccggactgtgcagggagccgatacgtttgctgatagcaatactggaaccaccgggtgcgatggcagtgaggagactgcccagtgcctttggggctgtgcttgcaataaagaatttcctggaaaggcagtctgcaaaagagggaaccggtgactcagaaagacagatgttttggtaatttaccccaaatgtgccatccacatagtgctttttcctcttgcccttcggcttgtttgaatctcacaattatgtatttaattctcaaagaaatatgtatctgtagccgtttgttgacactaatacagatgattaaggaaaacagctgatctttggggaagggagctaccaacactttatacacacacacacgtgcacacacacacacacacacactatatatatatatattatttacagggaaatttttcagggtttacaaaagagtatgtgattggtagtaagagacacacagaatgtttatgaagaaattgcattttctttttcctttacatttgaacttctttatagtttaaatataacgtcttgagatggcacattcctacgattgaagaaggggtcttgagatcccctaaacttgcatacccagttttttggatattgtaataaaaaaaagtattatgacaagg

SEQ ID NO: 157969 - DNA, 790 bp, Homo sapiens
  Payload ID: 10943
  Gene Symbol: NCK2
  Gene Name: NCK adaptor protein 2
  ENST ID: ENST00000393348
  CDS Start-End: 358-790
ggagcttttgtgcccggcttcaggctctgcgccctgccccagatttacaggactctaacagccacctgaatgaaccaaagtttctcacaatcgctcggctctctcggtttttttcagggcgatttaatcaccgagtgcttttggaaaaatttgatatatttcatgtgttctttgtatacaagcgacgtcccagattataattctctgctgagatttgagttggatttgaggatttggagaatccctgcagctttgtaacttcagaggtgtaattagctgaaaacatcatcgttttgaagagttctgcgttttgccagtcacctctcaactgtgtgccaaagaaggactccatgaaagatgacagaagaagttattgtgatagccaagtgggactacaccgcccagcaggaccaggagctggacatcaagaagaacgagcggctgtggttgctggacgactccaagacgtggtggcgggtgaggaacgcggccaacaggacgggctatgtaccgtccaactacgtggagcggaagaacagcctgaagaagggctccctcgtgaagaacctgaaggacacactaggcctcggcaagacgcgcaggaagaccagcgcgcgggatgcgtcccccacgcccagcacggacgccgagtaccccgccaatggcagcggcgccgaccgcatctacgacctcaacatcccggccttcgtcaagttcgcctatgtggccgagcgggaggatgagttgtccctggtgaaggggtcgcgcgtcaccgtcatggagaagtgca

SEQ ID NO: 157970 - DNA, 2371 bp, Homo sapiens
  Payload ID: 10943
  Gene Symbol: NCK2
  Gene Name: NCK adaptor protein 2
  Uniprot ID: O43639
  ENST ID: ENST00000393349
  CDS Start-End: 133-1275
tggagtgaagtggtcgtttattggctggccctctgatatgaggtggtggtgaattggtgggcgtcagtgcagtaagtgagcgagccggacgtcgattgactggtcttcagaagcagaaggactccatgaaagatgacagaagaagttattgtgatagccaagtgggactacaccgcccagcaggaccaggagctggacatcaagaagaacgagcggctgtggttgctggacgactccaagacgtggtggcgggtgaggaacgcggccaacaggacgggctatgtaccgtccaactacgtggagcggaagaacagcctgaagaagggctccctcgtgaagaacctgaaggacacactaggcctcggcaagacgcgcaggaagaccagcgcgcgggatgcgtcccccacgcccagcacggacgccgagtaccccgccaatggcagcggcgccgaccgcatctacgacctcaacatcccggccttcgtcaagttcgcctatgtggccgagcgggaggatgagttgtccctggtgaaggggtcgcgcgtcaccgtcatggagaagtgcagcgacggttggtggcggggcagctacaacgggcagatcggctggttcccctccaactacgtcttggaggaggtggacgaggcggctgcggagtccccaagcttcctgagcctgcgcaagggcgcctcgctgagcaatggccagggctcccgcgtgctgcatgtggtccagacgctgtaccccttcagctcagtcaccgaggaggagctcaacttcgagaagggggagaccatggaggtgattgagaagccggagaacgaccccgagtggtggaaatgcaaaaatgcccggggccaggtgggcctcgtccccaaaaactacgtggtggtcctcagtgacgggcctgccctgcaccctgcgcacgccccacagataagctacaccgggccctcgtccagcgggcgcttcgcgggcagagagtggtactacgggaacgtgacgcggcaccaggccgagtgcgccctcaacgagcggggcgtggagggcgacttcctcattagggacagcgagtcctcgcccagcgacttctccgtgtcccttaaagcgtcagggaagaacaaacacttcaaggtgcagctcgtggacaatgtctactgcattgggcagcggcgcttccacaccatggacgagctggtggaacactacaaaaaggcgcccatcttcaccagcgagcacggggagaagctctacctcgtcagggccctgcagtgacggcgccccggccccacactcgcctcccgggccccacggtggagctgcccgcccggccttgtggcagaggctcctcccgcggggacggccccgacggcttctctgcgagtctctctttatgttcaggtcgcttggtcggttcgtctcccatttgccatccaggcctcacacccacactcgagcccacccggccggccagctttagaggaggggaggagcagggcgagttcacattattccttttccatcggaagtggcgctcgtgcattcaactcgttcccgctcatggaacccctctttaaaaagacgcagggcacctgtgagcgcaggagcgagcctaaggccacccagcggcagcgcccgtgtcctgggcactcagcgtgctgggcagagcaggtgcgatggccccagtcctagcagccctcgcccatgtcctgtgcccttacatggctcccggactgtgcagggagccgatacgtttgctgatagcaatactggaaccaccgggtgcgatggcagtgaggagactgcccagtgcctttggggctgtgcttgcaataaagaatttcctggaaaggcagtctgcaaaagagggaaccggtgactcagaaagacagatgttttggtaatttaccccaaatgtgccatccacatagtgctttttcctcttgcccttcggcttgtttgaatctcacaattatgtatttaattctcaaagaaatatgtatctgtagccgtttgttgacactaatacagatgattaaggaaaacagctgatctttggggaagggagctaccaacactttatacacacacacacgtgcacacacacacacacacacactatatatatatatattatttacagggaaatttttcagggtttacaaaagagtatgtgattggtagtaagagacacacagaatgtttatgaagaaattgcattttctttttcctttacatttgaacttctttatagtttaaatataacgtcttgagatggcacattcctacgattgaagaaggggtcttgagatcccctaaacttgcatacccagttttttggatattgtaataaaaaaaagtattatgacaa

SEQ ID NO: 157971 - DNA, 494 bp, Homo sapiens
  Payload ID: 10943
  Gene Symbol: NCK2
  Gene Name: NCK adaptor protein 2
  ENST ID: ENST00000425756
  CDS Start-End: 164-494
tggtgtgacttagtttttgattgctggatttcactggagtgaagtggtcgtttattggctggccctctgatatgaggtggtggtgaattggtgggcgtcagtgcagtaagtgagcgagccggacgtcgattgactggtcttcagaagcaggactccatgaaagatgacagaagaagttattgtgatagccaagtgggactacaccgcccagcaggaccaggagctggacatcaagaagaacgagcggctgtggttgctggacgactccaagacgtggtggcgggtgaggaacgcggccaacaggacgggctatgtaccgtccaactacgtggagcggaagaacagcctgaagaagggctccctcgtgaagaacctgaaggacacactaggcctcggcaagacgcgcaggaagaccagcgcgcgggatgcgtcccccacgcccagcacggacgccgagtaccccgccaatggcagcggcgccgaccgcatctacg

SEQ ID NO: 157972 - DNA, 1795 bp, Homo sapiens
  Payload ID: 10943
  Gene Symbol: NCK2
  Gene Name: NCK adaptor protein 2
  ENST ID: ENST00000451463
  CDS Start-End: 277-528
ctgggcgggcgcagcgcggccaccgccccgggacccgcgccgctgccctccggctccgcgggcggcccacggcgagatttcatgtgttctttgtatacaagcgacgtcccagattataattctctgctgagatttgagttggatttgaggatttggagaatccctgcagctttgtaacttcagaggtgtaattagctgaaaacatcatcgttttgaagagttctgcgttttgccagtcacctctcaactgtgtgccaaagaaggactccatgaaagatgacagaagaagttattgtgatagccaagtgggactacaccgcccagcaggaccaggagctggacatcaagaagaacgagcggctgtggttgctggacgactccaagacgtggtggcgggtgaggaacgcggccaacaggacgggctatgtaccgtccaactacgtggagcggaagaacagcctgaagaagggctccctcgtgaagaacctgaaggacacactagcccagcgacttctccgtgtcccttaaagcgtcagggaagaacaaacacttcaaggtgcagctcgtggacaatgtctactgcattgggcagcggcgcttccacaccatggacgagctggtggaacactacaaaaaggcgcccatcttcaccagcgagcacggggagaagctctacctcgtcagggccctgcagtgacggcgccccggccccacactcgcctcccgggccccacggtggagctgcccgcccggccttgtggcagaggctcctcccgcggggacggccccgacggcttctctgcgagtctctctttatgttcaggtcgcttggtcggttcgtctcccatttgccatccaggcctcacacccacactcgagcccacccggccggccagctttagaggaggggaggagcagggcgagttcacattattccttttccatcggaagtggcgctcgtgcattcaactcgttcccgctcatggaacccctctttaaaaagacgcagggcacctgtgagcgcaggagcgagcctaaggccacccagcggcagcgcccgtgtcctgggcactcagcgtgctgggcagagcaggtgcgatggccccagtcctagcagccctcgcccatgtcctgtgcccttacatggctcccggactgtgcagggagccgatacgtttgctgatagcaatactggaaccaccgggtgcgatggcagtgaggagactgcccagtgcctttggggctgtgcttgcaataaagaatttcctggaaaggcagtctgcaaaagagggaaccggtgactcagaaagacagatgttttggtaatttaccccaaatgtgccatccacatagtgctttttcctcttgcccttcggcttgtttgaatctcacaattatgtatttaattctcaaagaaatatgtatctgtagccgtttgttgacactaatacagatgattaaggaaaacagctgatctttggggaagggagctaccaacactttatacacacacacacgtgcacacacacacacacacacactatatatatatatattatttacagggaaatttttcagggtttacaaaagagtatgtgattggtagtaagagacacacagaatgtttatgaagaaattgcattttctttttcctttacatttgaacttctttatagtttaaatataacgtcttgagatggcacattcctacgattgaagaaggggtcttgagatcccctaaacttgcatacccagttttttggatattgtaataaaaaaaagtattatgacaagg

SEQ ID NO: 157973 - DNA, 490 bp, Homo sapiens
  Payload ID: 10943
  Gene Symbol: NCK2
  Gene Name: NCK adaptor protein 2
  ENST ID: ENST00000522586
  CDS Start-End: 70-321
tcatcgttttgaagagttctgcgttttgccagtcacctctcaactgtgtgccaaaggactccatgaaagatgacagaagaagttattgtgatagccaagtgggactacaccgcccagcaggaccaggagctggacatcaagaagaacgagcggctgtggttgctggacgactccaagacgtggtggcgggtgaggaacgcggccaacaggacgggctatgtaccgtccaactacgtggagcggaagaacagcctgaagaagggctccctcgtgaagaacctgaaggacacactagcccagcgacttctccgtgtcccttaaagcgtcagggaagaacaaacacttcaaggtgcagctcgtggacaatgtctactgcattgggcagcggcgcttccacaccatggacgagctggtggaacactacaaaaaggcgcccatcttcaccagcgagcacggggagaagctctacctcgtcagggccctgcagtga

SEQ ID NO: 157974 - DNA, 2989 bp, Homo sapiens
  Payload ID: 10944
  Gene Symbol: NCKIPSD
  Gene Name: NCK interacting protein with SH3 domain
  Uniprot ID: Q9NZQ3
  ENST ID: ENST00000294129
  CDS Start-End: 121-2289
gcgcgcgcctgcgtagtgtgtcacggggcgggacaaccgcggcgcggctcggcgctcccggcctggcgttgtggcgccgcagcccttgccaccttccctgcacctgccctgcccggcctcatgtaccgcgcgctgtacgcgttccgctcggcggagcccaacgcgctggcgttcgccgcgggcgagaccttcctggtgctagagcgaagcagcgcgcactggtggctggccgcgcgggcgcgcagtggtgagacgggctacgtgccgccagcctacctgcgccgcctgcagggcctggagcaggatgtcctccaggccattgaccgggccatcgaggctgtacacaacacagccatgcgggatggtggcaagtacagcctggaacagcgtggagtcctccagaagctgatccaccaccggaaagagaccctgtcacgcagaggcccttcagcctccagtgttgcagttatgacctcatcaaccagtgaccaccacttggatgctgctgcagccaggcagcccaatggggtgtgtcgagctgggttcgagcggcagcacagcctacccagttctgagcatcttggggcagatggaggcctctaccagatcccacttccatcttcccagatcccaccacagcctcgccgagcagcacccaccacaccgcccccaccagtgaagcgccgagaccgcgaggccctgatggcctctgggagtggtggccacaacaccatgccctccgggggtaactctgtgtccagcggctcctcagtcagcagcacctccctggacacgctctataccagctccagcccatctgaaccaggctccagctgctcacccacacccccacctgtgccccgccgaggcacccacaccaccgtgtcccaagtccagccccctccctccaaggcatcagcacctgaaccccctgcagaagaagaagtggcaactggtacaacctcagcctctgatgacctggaagccctgggtacactgagcctggggaccacagaggagaaggcagcagctgaggcggctgtgcccaggaccattggggccgagctgatggagctggtgcggagaaacactggcctgagccacgaattatgccgggtggccatcggcatcatagtgggtcacatccaggcctcggtgccggccagctcaccagtcatggagcaggtcctcctctcactcgtagagggcaaggacctcagcatggccctgccctcagggcaggtctgccacgaccagcagaggctggaggtgatctttgcagacctggctcgccggaaggacgacgcccagcagcgcagttgggcactatatgaggatgagggtgtcatccgctgctacctagaggagctgctgcatattctgactgatgcagaccctgaagtttgcaagaaaatgtgcaagagaaacgagttcgagtctgtcctggccttggtggcctattaccaaatggaacaccgagcatcactgcggctgctgctcctcaagtgctttggcgccatgtgcagcctggatgcagccatcatctccacgcttgtgtcatccgtgctgcctgtagagctggcgagggacatgcagacagacacgcaggaccaccagaaactctgttactctgccctcatcctggccatggtcttctccatgggagaggcagtgccctatgcacactatgagcacctgggcacgcctttcgcccagttcctactgaacatcgtcgaggatgggctgcccttggacaccacagagcagctgccggacctctgcgtgaacctgcttctggctctcaacctgcacctgccagctgctgaccagaatgtcatcatggctgccctgagcaaacacgccaatgtcaagatcttctccgagaagctgttgttgctcctgaacagaggggatgaccctgtgcgcatcttcaaacatgagccacagccaccacactctgtcctcaagttcctgcaggacgtgtttggcagcccggccacagctgccatcttctaccacacagacatgatggctctcattgacatcactgtgcggcacatcgcagacctgtcaccaggagacaagctgcgcatggagtacctctccctgatgcatgctatagtccgcaccacaccctacctgcagcaccgccaccggctacccgacctgcaggccatactgcgacgcatcctgaatgaggaggagacctcaccccagtgccagatggaccgcatgattgtccgagagatgtgcaaggaattcctggtgctgggggaggctcccagctagcaccttgctgtcctcccttccctgcagctccagtcagtgtgcaggggactcaggggcttggccctaagaatgttttgcactgacagtgggaggggataaggtggcagaaggaacctgagcaggacccccacctgaagtagaacttaagagaggggccaagtgtaggattggggaccatggtctgggagctgttctggggcagggggaatatgcaagctaaagcccctctataccctggtaggcttcctcttcagcatgcccccctcttcaccccacacccatgtgtacactcagagtcctgctgccgctccaggctggaccagacccccatccccacccctcctggtctgtatcctgggcctcagcaagccatgcccctggggtgaggggaggcatctcccaccagctctattctttgccttagctttgcagtgagtgctgctcatgtcctcccctccacccgcacatgggggtcgctgcccttcactcctacccccagaggccttggccaagctgctgctttgaaagcgggatcttggagacaggccatccatcctggagcctcatggaacaggatgatggcactgagaaagccaatgaccgaatctcttttctctgtaaaaatgtagactgaaaagccatgtgtattttcctatgtgctgtagctctcctttggaaataaatcacaggcatctggaaa

SEQ ID NO: 157975 - DNA, 2925 bp, Homo sapiens
  Payload ID: 10944
  Gene Symbol: NCKIPSD
  Gene Name: NCK interacting protein with SH3 domain
  Uniprot ID: Q9NZQ3
  ENST ID: ENST00000416649
  CDS Start-End: 78-2225
gcggctcggcgctcccggcctggcgttgtggcgccgcagcccttgccaccttccctgcacctgccctgcccggcctcatgtaccgcgcgctgtacgcgttccgctcggcggagcccaacgcgctggcgttcgccgcgggcgagaccttcctggtgctagagcgaagcagcgcgcactggtggctggccgcgcgggcgcgcagtggtgagacgggctacgtgccgccagcctacctgcgccgcctgcagggcctggagcaggatgtcctccaggccattgaccgggccatcgaggctgtacacaacacagccatgcgggatggtggcaagtacagcctggaacagcgtggagtcctccagaagctgatccaccaccggaaagagaccctgtcacgcagaggcccttcagcctccagtgttgcagttatgacctcatcaaccagtgaccaccacttggatgctgctgcagccaggcagcccaatggggtgtgtcgagctgggttcgagcggcagcacagcctacccagttctgagcatcttggggcagatggaggcctctaccagatcccaccacagcctcgccgagcagcacccaccacaccgcccccaccagtgaagcgccgagaccgcgaggccctgatggcctctgggagtggtggccacaacaccatgccctccgggggtaactctgtgtccagcggctcctcagtcagcagcacctccctggacacgctctataccagctccagcccatctgaaccaggctccagctgctcacccacacccccacctgtgccccgccgaggcacccacaccaccgtgtcccaagtccagccccctccctccaaggcatcagcacctgaaccccctgcagaagaagaagtggcaactggtacaacctcagcctctgatgacctggaagccctgggtacactgagcctggggaccacagaggagaaggcagcagctgaggcggctgtgcccaggaccattggggccgagctgatggagctggtgcggagaaacactggcctgagccacgaattatgccgggtggccatcggcatcatagtgggtcacatccaggcctcggtgccggccagctcaccagtcatggagcaggtcctcctctcactcgtagagggcaaggacctcagcatggccctgccctcagggcaggtctgccacgaccagcagaggctggaggtgatctttgcagacctggctcgccggaaggacgacgcccagcagcgcagttgggcactatatgaggatgagggtgtcatccgctgctacctagaggagctgctgcatattctgactgatgcagaccctgaagtttgcaagaaaatgtgcaagagaaacgagttcgagtctgtcctggccttggtggcctattaccaaatggaacaccgagcatcactgcggctgctgctcctcaagtgctttggcgccatgtgcagcctggatgcagccatcatctccacgcttgtgtcatccgtgctgcctgtagagctggcgagggacatgcagacagacacgcaggaccaccagaaactctgttactctgccctcatcctggccatggtcttctccatgggagaggcagtgccctatgcacactatgagcacctgggcacgcctttcgcccagttcctactgaacatcgtcgaggatgggctgcccttggacaccacagagcagctgccggacctctgcgtgaacctgcttctggctctcaacctgcacctgccagctgctgaccagaatgtcatcatggctgccctgagcaaacacgccaatgtcaagatcttctccgagaagctgttgttgctcctgaacagaggggatgaccctgtgcgcatcttcaaacatgagccacagccaccacactctgtcctcaagttcctgcaggacgtgtttggcagcccggccacagctgccatcttctaccacacagacatgatggctctcattgacatcactgtgcggcacatcgcagacctgtcaccaggagacaagctgcgcatggagtacctctccctgatgcatgctatagtccgcaccacaccctacctgcagcaccgccaccggctacccgacctgcaggccatactgcgacgcatcctgaatgaggaggagacctcaccccagtgccagatggaccgcatgattgtccgagagatgtgcaaggaattcctggtgctgggggaggctcccagctagcaccttgctgtcctcccttccctgcagctccagtcagtgtgcaggggactcaggggcttggccctaagaatgttttgcactgacagtgggaggggataaggtggcagaaggaacctgagcaggacccccacctgaagtagaacttaagagaggggccaagtgtaggattggggaccatggtctgggagctgttctggggcagggggaatatgcaagctaaagcccctctataccctggtaggcttcctcttcagcatgcccccctcttcaccccacacccatgtgtacactcagagtcctgctgccgctccaggctggaccagacccccatccccacccctcctggtctgtatcctgggcctcagcaagccatgcccctggggtgaggggaggcatctcccaccagctctattctttgccttagctttgcagtgagtgctgctcatgtcctcccctccacccgcacatgggggtcgctgcccttcactcctacccccagaggccttggccaagctgctgctttgaaagcgggatcttggagacaggccatccatcctggagcctcatggaacaggatgatggcactgagaaagccaatgaccgaatctcttttctctgtaaaaatgtagactgaaaagccatgtgtattttcctatgtgctgtagctctcctttggaaataaatcacaggcatctggaaa

SEQ ID NO: 157976 - DNA, 725 bp, Homo sapiens
  Payload ID: 10944
  Gene Symbol: NCKIPSD
  Gene Name: NCK interacting protein with SH3 domain
  ENST ID: ENST00000413374
  CDS Start-End: 1-456
gacaccacagagcagctgccggacctctgcgtgaacctgcttctggctctcaacctgcacctgccagctgctgaccagaatgtcatcatggctgccctgagcaaacacgccaatgtcaagatcttctccgagaagctgttgttgctcctgaacagaggggatgaccctgtgcgcatcttcaaacatgagccacagccaccacactctgtcctcaagttcctgcaggacgtgtttggcagcccggccacagctgccatcttctaccacacagacatgatggctctcattgacatcactgtgcggcacatcgcagacctgtcaccaggagacaaggtgcctggagctgcgcatggagtacctctccctgatgcatgctatagtccgcaccacaccctacctgcagcaccgccaccggctacccgacctgcaggccatactgcgacgcatcctgaatgaggaggagacctcaccccagtgccagatggaccgcatgattgtccgagagatgtgcaaggaattcctggtgctgggggaggctcccagctagcaccttgctgtcctcccttccctgcagctccagtcagtgtgcaggggactcaggggcttggccctaagaatgttttgcactgacagtgggaggggataaggtggcagaaggaacctgagcaggacccccacctgaagtagaacttaagagaggggccaagtgtaggattggggaccat

SEQ ID NO: 157977 - DNA, 803 bp, Homo sapiens
  Payload ID: 10944
  Gene Symbol: NCKIPSD
  Gene Name: NCK interacting protein with SH3 domain
  ENST ID: ENST00000415281
  CDS Start-End: 1-803
atcagcacctgaaccccctgcagaagaagaagtggcaactggtacaacctcagcctctgatgacctggaagccctgggtacactgagcctggggaccacagaggagaaggcagcagctgaggcggctgtgcccaggaccattggggccgagctgatggagctggtgcggagaaacactggcctgagccacgaattatgccgggtggccatcggcatcatagtgggtcacatccaggcctcggtgccggccagctcaccagtcatggagcaggtcctcctctcactcgtagagggcaaggacctcagcatggccctgccctcagggcaggtctgccacgaccagcagaggctggaggtgatctttgcagacctggctcgccggaaggacgacgcccagcagcgcagttgggcactatatgaggatgagggtgtcatccgctgctacctagaggagctgctgcatattctgactgatgcagaccctgaagtttgcaagaaaatgtgcaagagaaacgagttcgagtctgtcctggccttggtggcctattaccaaatggaacaccgagcatcactgcggctgctgctcctcaagtgctttggcgccatgtgcagcctggatgcagccatcatctccacgcttgtgtcatccgtgctgcctgtagagctggcgagggacatgcagacagacacgcaggagcacctgggcacgcctttcgcccagttcctactgaacatcgtcgaggatgggctgcccttggacaccacagagcagctgccggacctctgcgtgaacctgcttctgg

SEQ ID NO: 157978 - DNA, 889 bp, Homo sapiens
  Payload ID: 10944
  Gene Symbol: NCKIPSD
  Gene Name: NCK interacting protein with SH3 domain
  ENST ID: ENST00000453349
  CDS Start-End: 279-889
gcactcggtgaagacaggtggtgaggcctagacacaccgagagccgggccccgcgggggcttccaagtgtcggatcagcaagatcatcctttcgaggtcgccgtccttgcaattagtagatgggacccactgccccagggcggtaggggcgcacccgctacgagcggagcgcgctttcaccgggaggtctaactgctgtcccctgccccccccagggcctggagcaggatgtcctccaggccattgaccgggccatcgaggctgtacacaacacagccatgcgggatggtggcaagtacagcctggaacagcgtggagtcctccagaagctgatccaccaccggaaagagaccctgtcacgcagaggcccttcagcctccagtgttgcagttatgacctcatcaaccagtgaccaccacttggatgctgctgcagccaggcagcccaatggggtgtgtcgagctgggttcgagcggcagcacagcctacccagttctgagcatcttggggcagatggaggcctctaccagatcccacttccatcttcccagatcccaccacagcctcgccgagcagcacccaccacaccgcccccaccagtgaagcgccgagaccgcgaggccctgatggcctctgggagtggtggccacaacaccatgccctccgggggtaactctgtgtccagcggctcctcagtcagcagcacctccctggacacgctctataccagctccagcccatctgaaccaggctccagctgctcacccacacccccacctgtgccccgccgaggcacccacaccaccgtgtcccaagtccagccccctccctccaaggcatcagcacctgaaccccctgcagaagaagaagtggcaactggtacaacctc

SEQ ID NO: 157979 - DNA, 1214 bp, Homo sapiens
  Payload ID: 10944
  Gene Symbol: NCKIPSD
  Gene Name: NCK interacting protein with SH3 domain
  ENST ID: ENST00000439518
  CDS Start-End: 29-1214
cttccctgcacctgccctgcccggcctcatgtaccgcgcgctgtacgcgttccgctcggcggagcccaacgcgctggcgttcgccgcgggcgagaccttcctggtgctagagcgaagcagcgcgcactggtggctggccgcgcgggcgcgcagtggtgagacgggctacgtgccgccagcctacctgcgccgcctgcagggcctggagcaggatgtcctccaggccattgaccgggccatcgaggctgtacacaacacagccatgcgggatggtggcaagtacagcctggaacagcgtggagtcctccagaagctgatccaccaccggaaagagaccctgtcacgcagaggcccttcagcctccagtgttgcagttatgacctcatcaaccagtgaccaccacttggatgctgctgcagccaggcagcccaatggggtgtgtcgagctgggttcgagcggcagcacagcctacccagttctgagcatcttggggcagatggaggcctctaccagatcccacttccatcttcccagatcccaccacagcctcgccgagcagcacccaccacaccgcccccaccagtgaagcgccgagaccgcgaggccctgatggcctctgggagtggtggccacaacaccatgccctccgggggtaactctgtgtccagcggctcctcagtcagcagcacctccctggacacgctctataccagctccagcccatctgaaccaggctccagctgctcacccacacccccacctgtgccccgccgaggcacccacaccaccgtgtcccaagtccagccccctccctccaaggcatcagcacctgaaccccctgcagaagaagaagtggcaactggtacaacctcagcctctgatgacctggaagccctgggtacactgagcctggggaccacagaggagaaggcagcagctgaggcggctgtgcccaggaccattggggccgagctgatggagctggtgcggagaaacactggcctgagccacgaattatgccgggtggccatcggcatcatagtgggtcacatccaggcctcggtgccggccagctcaccagtcatggagcaggtcctcctctcactcgtagagggcaaggtgagggtgggcggcacagcagggccaccctgctacccaccctgttcccaccgtcacacacttgtccagcctgtacattacaggtatttctcaa

SEQ ID NO: 157980 - DNA, 998 bp, Homo sapiens
  Payload ID: 10944
  Gene Symbol: NCKIPSD
  Gene Name: NCK interacting protein with SH3 domain
  ENST ID: ENST00000454134
  CDS Start-End: 121-297
gcgcgcgcctgcgtagtgtgtcacggggcgggacaaccgcggcgcggctcggcgctcccggcctggcgttgtggcgccgcagcccttgccaccttccctgcacctgccctgcccggcctcatgtaccgcgcgctgtacgcgttccgctcggcggagcccaacgcgctggcgttcgccgcgggcgagaccttcctggtgctagagcgaagcagcgcgcactggtggctggccgcgcgggcgcgcagtggtgagacgggctacgtgccgccagcctacctgcgccgcctgcaggtctaactgctgtcccctgccccccccagggcctggagcaggatgtcctccaggccattgaccgggccatcgaggctgtacacaacacagccatgcgggatggtggcaagtacagcctggaacagcgtggagtcctccagaagctgatccaccaccggaaagagaccctgtcacgcagaggcccttcagcctccagtgttgcagttatgacctcatcaaccagtgaccaccacttggatgctgctgcagccaggcagcccaatggggtgtgtcgagctgggttcgagcggcagcacagcctacccagttctgagcatcttggggcagatggaggcctctaccagatcccacttccatcttcccagatcccaccacagcctcgccgagcagcacccaccacaccgcccccaccagtgaagcgccgagaccgcgaggccctgatggcctctgggagtggtggccacaacaccatgccctccgggggtaactctgtgtccagcggctcctcagtcagcagcacctccctggacacgctctataccagctccagcccatctgaaccaggctccagctgctcacccacacccccacctgtgccccgccgaggcacccacaccaccgtgtcccaagtccagccccctccctccaaggcatcagcacctgaaccccctgcagaagaagaagtggcaactggtacaacctcagcc

SEQ ID NO: 157981 - DNA, 897 bp, Homo sapiens
  Payload ID: 10944
  Gene Symbol: NCKIPSD
  Gene Name: NCK interacting protein with SH3 domain
  ENST ID: ENST00000426678
  CDS Start-End: 401-897
ccggcactcggtgaagacaggtggtgaggcctagacacaccgagagccgggccccgcgggggcttccaagtgtcggatcagcaagatcatcctttcgaggtcgccgtccttgcaattagtagatgggacccactgccccagggcggtaggggcgcacccgctacgagcggagcgcgctttcaccgggagggcctggagcaggatgtcctccaggccattgaccgggccatcgaggctgtacacaacacagccatgcgggatggtggcaagtacagcctggaacagcgtggagtcctccagtgagtgttgaggggagtgaagtgggacctcccggaagctgatccaccaccggaaagagaccctgtcacgcagaggcccttcagcctccagtgttgcagttatgacctcatcaaccagtgaccaccacttggatgctgctgcagccaggcagcccaatggggtgtgtcgagctgggttcgagcggcagcacagcctacccagttctgagcatcttggggcagatggaggcctctaccagatcccacttccatcttcccagatcccaccacagcctcgccgagcagcacccaccacaccgcccccaccagtgaagcgccgagaccgcgaggccctgatggcctctgggagtggtggccacaacaccatgccctccgggggtaactctgtgtccagcggctcctcagtcagcagcacctccctggacacgctctataccagctccagcccatctgaaccaggctccagctgctcacccacacccccacctgtgccccgccgaggcacccacaccaccgtgtcccaagtccagccccctccctccaaggcatcagcacctgaaccccctgcagaagaagaagtggcaactggtacaacctc

SEQ ID NO: 157982 - DNA, 4989 bp, Homo sapiens
  Payload ID: 10945
  Gene Symbol: NCKAP1
  Gene Name: NCK-associated protein 1
  Uniprot ID: Q9Y2A7
  ENST ID: ENST00000360982
  CDS Start-End: 760-4164
gcggcgagcgcctgtcaagcagtgggaggaaaaagcgcttggagccaccagcccactcttaagcgaaactcgcctggaaaacaccccgcctcccagcagagtttctgccggtttctttagaagggtggtgcggaaaagcaacttttgggaacttgaaggagtggggtgtggggcgaagtggaaagagcacacaacgcgaccccactcagtccccgcttgggactcccatcccggcatcaggcgtagtgggcggtccgggccagggccagggccagagcggcggcggcgaggccatgccgagggcccgtcggccgcagttccccgtccggcctcgcgggggcgccggcgctgccgatcaggtgaccgagggcccgtccggggctgcgggaagcggcctcgttctcagccgccggagacgccgccgccgccgccgccgccgccacacctagtggagcagccggggaaggcggctcgttgggggctggggcggagagcgccgggggtgggggcggaagggcggcgggcggaaggcaggaggctgccggggcgcgggctgctgcgggagaaggggctccgaggagtccgccgcggctcgctctgtcgccggcgcgggattggggcgcgagggccatgggcgcgctctcctaaggcggaggtcgcgggcgggaggggaggaggcccgagagaggctgctgcgaaggccgcgggcccgtgactgggcgcgaggcggccggcggcggcggcggcaccagcaccaccatgtcgcgctcagtgctgcagcccagtcagcagaagctggcggagaagctcaccatcctcaacgaccggggcgtcggcatgctcacccgcctctacaacatcaagaagcaaggacaagtttggaaggcatgtggagaccccaaggcaaaaccatcctatcttatcgacaaaaacctggaatctgctgtgaaattcatagtcagaaaattccctgctgtagaaacccgcaacaacaatcaacagcttgcacaactacagaaagaaaaatcagagattctgaaaaatctggcattatattacttcacatttgtagatgttatggaatttaaggaccatgtttgtgaattgctgaatactattgacgtttgccaagtcttctttgatattactgtaaactttgatttaacaaagaactacttagatttaattataacctatacaacactaatgatactgctgtctcgaattgaagaaaggaaggcaatcattggattatacaactatgcccatgaaatgactcatggagcaagtgacagagaatacccacgccttggccagatgattgtggattatgaaaaccctttaaagaagatgatggaagaatttgtaccccatagcaagtctctttcagatgcactaatttctcttcaaatggtatatcctcgaaggaatctttcagctgaccagtggagaaatgcccagttattgagcctcatcagtgcacctagtacaatgcttaatccagcacagtccgacactatgccttgtgaatacctctctttggatgcaatggaaaagtggattatctttggctttattttgtgccatgggatcctaaatactgacgctacagcactgaacctttggaaactagctcttcaaagtagctcttgcctctctctctttcgggatgaagttttccacattcacaaagctgcagaagacttatttgtaaacatacgaggctataataaacgtattaatgacataagagaatgcaaggaggcagccgtgtcacatgctggttcaatgcacagagaaagacgcaagtttttaagatctgcactgaaggaattggctactgtcctctctgatcaacctggattgctaggtcccaaggcactttttgtttttatggcattatcctttgcccgtgatgaaatcatctggctacttcgtcatgcagataacatgccaaagaagagtgcagacgactttatagataagcacattgctgaattaatattttacatggaagaacttagagcacatgtgaggaaatacggacctgtaatgcagaggtattacgtgcagtacctttctggctttgatgctgttgtcctcaatgaactcgtgcagaatctttctgtttgccctgaagatgaatcaatcatcatgtcctcttttgttaacactatgacttccctaagtgtaaaacaagttgaagatggggaagtatttgatttcagaggaatgagattagattggtttaggttacaggcatatactagtgtctcaaaggcttcacttggccttgcagatcacagagaacttggaaagatgatgaatacaataatttttcatacaaaaatggtagattccttggtggaaatgttggtggaaacatcagatctctccatattttgtttttatagtcgtgcttttgagaagatgtttcaacagtgtttggagttaccctctcaatcaagatactcaattgcatttccactactttgcactcattttatgagttgcacgcatgaactatgtccagaagagcgacatcatattggagatcgcagtctttccttatgtaatatgttcctagatgaaatggccaaacaagctcgaaatctcatcactgatatttgcacagaacagtgtacccttagtgaccagttgctacccaagcattgtgccaaaactatcagtcaagcagtgaataagaaatcaaaaaagcagactggtaagaaaggggaacctgaaagggagaaaccaggtgttgagagcatgaggaaaaacaggctggttgtgaccaaccttgataaattgcacactgcactttctgagttatgcttctctataaattatgtaccaaacatggtggtatgggaacatacctttaccccacgagaatatttgacttctcatctggaaatacgctttaccaagtcaattgttgggatgactatgtataatcaagccacacaggaaattgcaaaaccttcagaacttctaacaagtgtaagagcatacatgaccgtactccagtcaatagaaaactatgtgcagattgatattacaagagtatttaataatgtgcttcttcaacaaacacaacatttagacagtcatggagagccaaccattacaagtctatacacaaattggtatttggaaactttgttacgacaagtcagcaatggccatatagcatattttcctgcaatgaaagcgtttgtgaacttacctacagaaaatgaattaacattcaatgcagaggaatattctgacatatcagaaatgaggtcattatcagaactactaggcccatatggtatgaagtttctaagtgaaagccttatgtggcatatttcatcacaagttgctgaacttaagaaacttgtggtggagaatgttgatgtgttaacacaaatgaggaccagctttgacaaaccagaccagatggctgcactgtttaaaagattatcatctgttgacagtgtcttgaagaggatgacaataattggtgtaattttatccttccgatcattggcacaagaagcacttagagatgtcttatcctaccacattccttttcttgtaagttcaattgaagattttaaggatcacattccaagggaaactgatatgaaggttgcaatgaatgtgtatgagttatcatcagctgccggattaccttgtgagattgatcctgcattggtcgtagctctttcttcacaaaaatcggaaaacattagtccagaagaagagtataaaattgcctgccttctcatggtgtttgtggcagtttctttgccaacactggccagtaatgtgatgtctcagtacagccctgctatagaagggcattgcaacaacatacattgcttggccaaagccatcaaccagattgctgcagctttgtttacaattcacaaaggaagcattgaagaccgtcttaaagaatttctggcgcttgcatcctccagtctactgaaaattggccaggagacagataaaactacaacaagaaatagagaatctgtttatttactgctagatatgattgtacaagaatctccattccttacaatggatcttttggaatcttgttttccttatgtcttgctgagaaatgcataccatgctgtctacaaacaaagtgttacatcttctgcataaaattacctacttaatcaagataagcacgcatttttgttgccttggttttacctgtagactgtggaactattttaccttaagacctgaaaaagttttgtggattataaatttctttcatacggttgtattttctgatcattggtttcttaatatggttgtactacagtatacttggttgatttaggttgcacattcactgaattcactgagattattcctataattttaaagtatcatttatttgaaaaacatacattatcaacatgtttttgatatttgataatgaaaaaaatctttgcttgtttatttctgaaaaagaactgtatttagtgattattttagatagtgatattatagtattcatctgtgtgtaaattatttcatatagggaagagttctgatctgtacctatggttcttattgaaaacaacattggatgtgcatttctgtgatgttatgaatacatttctactttattttgaaacatttgccaaactaaatactgtaacactgtataacatttaaaaatgttaaagaactgcttagtattagaagcagatcatttcccaaaattctaagagcagcagcatatgttgttgcttgtataaagcctagcgataatttttagactaacttccatggtgccctgttggcattagcactaccattgtaccctgctgtataataaacaatcttagacatttatcaactgttgatacaaatgttagtccctaaccactttttatatatgttttaaatttttgaaattcaagtgtacctgccataacataaaataaacactagactgtatcacacttcgattga

SEQ ID NO: 157983 - DNA, 20347 bp, Homo sapiens
  Payload ID: 10945
  Gene Symbol: NCKAP1
  Gene Name: NCK-associated protein 1
  Uniprot ID: Q9Y2A7
  ENST ID: ENST00000361354
  CDS Start-End: 374-3760
ggaagcggcctcgttctcagccgccggagacgccgccgccgccgccgccgccgccacacctagtggagcagccggggaaggcggctcgttgggggctggggcggagagcgccgggggtgggggcggaagggcggcgggcggaaggcaggaggctgccggggcgcgggctgctgcgggagaaggggctccgaggagtccgccgcggctcgctctgtcgccggcgcgggattggggcgcgagggccatgggcgcgctctcctaaggcggaggtcgcgggcgggaggggaggaggcccgagagaggctgctgcgaaggccgcgggcccgtgactgggcgcgaggcggccggcggcggcggcggcaccagcaccaccatgtcgcgctcagtgctgcagcccagtcagcagaagctggcggagaagctcaccatcctcaacgaccggggcgtcggcatgctcacccgcctctacaacatcaagaaggcatgtggagaccccaaggcaaaaccatcctatcttatcgacaaaaacctggaatctgctgtgaaattcatagtcagaaaattccctgctgtagaaacccgcaacaacaatcaacagcttgcacaactacagaaagaaaaatcagagattctgaaaaatctggcattatattacttcacatttgtagatgttatggaatttaaggaccatgtttgtgaattgctgaatactattgacgtttgccaagtcttctttgatattactgtaaactttgatttaacaaagaactacttagatttaattataacctatacaacactaatgatactgctgtctcgaattgaagaaaggaaggcaatcattggattatacaactatgcccatgaaatgactcatggagcaagtgacagagaatacccacgccttggccagatgattgtggattatgaaaaccctttaaagaagatgatggaagaatttgtaccccatagcaagtctctttcagatgcactaatttctcttcaaatggtatatcctcgaaggaatctttcagctgaccagtggagaaatgcccagttattgagcctcatcagtgcacctagtacaatgcttaatccagcacagtccgacactatgccttgtgaatacctctctttggatgcaatggaaaagtggattatctttggctttattttgtgccatgggatcctaaatactgacgctacagcactgaacctttggaaactagctcttcaaagtagctcttgcctctctctctttcgggatgaagttttccacattcacaaagctgcagaagacttatttgtaaacatacgaggctataataaacgtattaatgacataagagaatgcaaggaggcagccgtgtcacatgctggttcaatgcacagagaaagacgcaagtttttaagatctgcactgaaggaattggctactgtcctctctgatcaacctggattgctaggtcccaaggcactttttgtttttatggcattatcctttgcccgtgatgaaatcatctggctacttcgtcatgcagataacatgccaaagaagagtgcagacgactttatagataagcacattgctgaattaatattttacatggaagaacttagagcacatgtgaggaaatacggacctgtaatgcagaggtattacgtgcagtacctttctggctttgatgctgttgtcctcaatgaactcgtgcagaatctttctgtttgccctgaagatgaatcaatcatcatgtcctcttttgttaacactatgacttccctaagtgtaaaacaagttgaagatggggaagtatttgatttcagaggaatgagattagattggtttaggttacaggcatatactagtgtctcaaaggcttcacttggccttgcagatcacagagaacttggaaagatgatgaatacaataatttttcatacaaaaatggtagattccttggtggaaatgttggtggaaacatcagatctctccatattttgtttttatagtcgtgcttttgagaagatgtttcaacagtgtttggagttaccctctcaatcaagatactcaattgcatttccactactttgcactcattttatgagttgcacgcatgaactatgtccagaagagcgacatcatattggagatcgcagtctttccttatgtaatatgttcctagatgaaatggccaaacaagctcgaaatctcatcactgatatttgcacagaacagtgtacccttagtgaccagttgctacccaagcattgtgccaaaactatcagtcaagcagtgaataagaaatcaaaaaagcagactggtaagaaaggggaacctgaaagggagaaaccaggtgttgagagcatgaggaaaaacaggctggttgtgaccaaccttgataaattgcacactgcactttctgagttatgcttctctataaattatgtaccaaacatggtggtatgggaacatacctttaccccacgagaatatttgacttctcatctggaaatacgctttaccaagtcaattgttgggatgactatgtataatcaagccacacaggaaattgcaaaaccttcagaacttctaacaagtgtaagagcatacatgaccgtactccagtcaatagaaaactatgtgcagattgatattacaagagtatttaataatgtgcttcttcaacaaacacaacatttagacagtcatggagagccaaccattacaagtctatacacaaattggtatttggaaactttgttacgacaagtcagcaatggccatatagcatattttcctgcaatgaaagcgtttgtgaacttacctacagaaaatgaattaacattcaatgcagaggaatattctgacatatcagaaatgaggtcattatcagaactactaggcccatatggtatgaagtttctaagtgaaagccttatgtggcatatttcatcacaagttgctgaacttaagaaacttgtggtggagaatgttgatgtgttaacacaaatgaggaccagctttgacaaaccagaccagatggctgcactgtttaaaagattatcatctgttgacagtgtcttgaagaggatgacaataattggtgtaattttatccttccgatcattggcacaagaagcacttagagatgtcttatcctaccacattccttttcttgtaagttcaattgaagattttaaggatcacattccaagggaaactgatatgaaggttgcaatgaatgtgtatgagttatcatcagctgccggattaccttgtgagattgatcctgcattggtcgtagctctttcttcacaaaaatcggaaaacattagtccagaagaagagtataaaattgcctgccttctcatggtgtttgtggcagtttctttgccaacactggccagtaatgtgatgtctcagtacagccctgctatagaagggcattgcaacaacatacattgcttggccaaagccatcaaccagattgctgcagctttgtttacaattcacaaaggaagcattgaagaccgtcttaaagaatttctggcgcttgcatcctccagtctactgaaaattggccaggagacagataaaactacaacaagaaatagagaatctgtttatttactgctagatatgattgtacaagaatctccattccttacaatggatcttttggaatcttgttttccttatgtcttgctgagaaatgcataccatgctgtctacaaacaaagtgttacatcttctgcataaaattacctacttaatcaagataagcacgcatttttgttgccttggttttacctgtagactgtggaactattttaccttaagacctgaaaaagttttgtggattataaatttctttcatacggttgtattttctgatcattggtttcttaatatggttgtactacagtatacttggttgatttaggttgcacattcactgaattcactgagattattcctataattttaaagtatcatttatttgaaaaacatacattatcaacatgtttttgatatttgataatgaaaaaaatctttgcttgtttatttctgaaaaagaactgtatttagtgattattttagatagtgatattatagtattcatctgtgtgtaaattatttcatatagggaagagttctgatctgtacctatggttcttattgaaaacaacattggatgtgcatttctgtgatgttatgaatacatttctactttattttgaaacatttgccaaactaaatactgtaacactgtataacatttaaaaatgttaaagaactgcttagtattagaagcagatcatttcccaaaattctaagagcagcagcatatgttgttgcttgtataaagcctagcgataatttttagactaacttccatggtgccctgttggcattagcactaccattgtaccctgctgtataataaacaatcttagacatttatcaactgttgatacaaatgttagtccctaaccactttttatatatgttttaaatttttgaaattcaagtgtacctgccataacataaaataaacactagactgtatcacacttcgattgatttctttaagatccttggatattcgttcaataataataaagtttttgtttaaacttagtttgaaatataaaaaataatggtttaggaatgtctaagtacagcattcgataccaggtcagctattatatgatttgtttaaatgttttaaaaaacattttattgaaaaaaataccaaaattagaaaataaaattacacaatacttcttaaaaattaagaacttaaagaaaacttgtatgctgtcaacttgctcattttatctgtaaccaaatagagttatttaaaagaatagggaaaaaaaattgagtgatcatgggactagtgagaatgttgagaactgctgcattagtcagtaatgaatgggaaagacataaaagggcctattgcttaatagttggcatggagggcaaagcagctcatttagtttgaaaactaacccaatgttttgctctttgattggcattgttgaggctgtttctcagcagctttgtatatgaatatcataaagagcttctgttcacagcttcttatgtatacactggtaacttgtgttaagataaaagaaggctgctgtgaactcagttataatgtttttctttcttcaaacatagagagtagaatgaaattgaagtactatgagattatgctattattttgtgtatgatttgtccagcctatatttaaagtagggagtagttgtcactatctgtcgaaaaattgtacttgttccataaagattttttaaaaagggaaattttaaaatggcatagttcagacctgaaatagtctgatttacacagtgagcagtcaaaactaagatttaatgccgtttgttttgaaatattaggatcttagagaggtaataactttgttggcagtgatctctggagaggtaaagtaggaatttggatatgtacactttggaatcatatgtgaaagggcataaggatgaaaataaggcattctctaccactgctaggctgagaaaaaaatcgctcctcatagtcacctgaagtttttgtccaaattttttctcatacagcaaaggcgggggaggaggcgtggcaaaggtaacttggaggaaaaagttaaaagtaaattgacaactactatttttaatatcttgtttgttttattttcttctaaacttacacaacaacatactatttttgttgttttctctacattaatgtgatcataccatacatactggcctgtaatctgcttatttcactcagtagtagaaaaaatgtctttaatattctttttaatacctttatagataccataactaatttaacaatttcatggccaggcgtagtggcacacgcctatttcagcactttgggaggccaaggcggatggatcacttgaggtcaggagttcaacaccagcctggccaacatggcaaaaccctgacactactaaaaatacaaaaattacccaggtatgatggtgcacacctatcatcctggctacatgggaggctgaggtggaagaattgtttgaacccggaaggaggaggttgctgtgagctgagatcacaccactgcactccagcctggatgacagaatgagactgtctcaaaaaaaaaaagaaaatactcatttggatagattggatagatttttagacaatttcttttcattattataaatgtatatctatatcttggtaaagttgacctgttatttttttagaataatttttcagaagtaaaattgcttcctttctgctgctttttcattcacttatttaagcaagtatttttagatgcctgcatgtaatggtgagcaaaaaggtgacccttttatagttgagcttggattttagtgatggtatacaataaacaaaccagcttcttgagacggagtttcactcttgttgcccaggaaatgggcaatggcctgatctcggctcactgtaacctccgcctcccgggttcaagcaattctcccatctcagcctcctgagtagctgagattacaggcgcccgccactacgcccagttaatttttggtatttttagtagagatggggttttaccatgttggccaggctggtctcgaactcctgacctcaggtgatccacccacctcagcctcccaaagtgctgggattacaggcatgagccaccacgcccagccatgagcaaacttctgatggtgactggaaagtatacaggataatgtggggaggcagtggtgaaactactttagaagaaagtgttagaagaaagtgtcatctgtgtaagagaaaacatttgagctggtacgtgaaggattagaaggaaccacaagtgggctgaggggaggaataataaaggcaaagacccagaaggcaagcacaaacttggcatgtttgagaagttagaagtgtgtcatctgtgtctctgtcatgaggagtgctcaagttccctctaggagccttatgggctatctagctctttttctcttctgatcatgtgcttgcttgctttcttctttgcttatatagcagagttcacaaattaaatctaatgtaggctggttaataaaggaaatgaacatgaattcactgataggctcttgcattaatgtgaaaatgtaaagtctgttgtacaccatcaggccttctaaatgaagcccaaattctgtaaggtagtgaattgtaacctactgattagtacatgatccatgcccattctgttataaggacttgcctttctgagacttcacctgtattattcctaagacttttgtgaataatccttaaagtagtgactccttacatctttctttcatttcttctttgtagtcacttgaaatgacagcatgaaccatcatttcatttgaaggcctgagcctgaattttcaaatagacaaaatgctctctttctccgaagatttgccatgacctctgcctttgggaaaaaatatttgagattttaaaatttttattctgtagtacaaaaattatgtttttcgttaattggtcctgtggaattggaaggaaatttaatatttattgactctactttggtattattttcagagtgagaagtaactttaagtgtattaaaatttcattcatttttgcatgaaccaaactttccctacacatcgctgtccttgactgtccagagtaaacatgtctaactctggaatgtttcatttccaataaaagtattcagcctgtcattttgggcctaagtaaaatgggataaattagcaatctgaagttaggatcctagccacagagggccatgtctcatttctggtttaagtgcacccctcatccccagcccttaccttcttctttctcttaaggattgagacaatcctcttggtgctcttggtgcaggtgcatcttggtcacctcttacatgagggccacaaacttggtaaatgggtggcctggagatggggttgtactaggtatgtgaccttggtgattgccttgtctcagttgtagtatatggctgagtcacattcatagtacactacatacacatactgaccaaatgccaatggctaaggcttgaaattatttcaccaagacctaaactgaagattaccatcataaaataagcttctagaatccatgaataagtaggaaatcatatttaaaatttactgtaattttattaaagctcattttttaaatttaatgcagtgcagagtcattaatttctcagcagtatcaggtgctaaattgctcactcattaaactactaatttaagatagttattttaaattatagaacaggaagcaacttacgaggttgcaaccaaattatatttattttttctccattagtaactgactaaaagtgttttcttcaactctgggatttgaagattttgtggtcagtggtgatataatttcactgaagcgtgctcacagactaaaactgtgcactactcagtgatgcgtcctgaatgttttcagagacaaacctaagataatgttgcccttgtttactttcattatttctgattttttttttatgcatgtgtttgctgcatcacacaattacttaagaagttgtccctaacctttgtgctgtggtctgaatgtttgtgtccccctggccacaaaattcatatgttgaaatctgatcatcagtgtgacaggatgtggggcctttgggaggtgattaggtcatgagagtggagccttcatgaatgggattaatgccctcgtaaaaggggccccagacagccgacttgccccaaccaccacgtgaggacaaagcaagaagccactgttcatgaaccagaaagcagaccctccacaaacaccaaatatgccagcacactgattggcttcccagcctccagaactataagcaagaagtttttttatagtaacaaatttattgttcacagttcttgcttataaactttataaaccagactaaggcatttcgttatagcagcccacacggactcatattttggttctagaaatgtgacactggaatgatgtggctctcaagatgacagtgttgcttctgaatgtctatgttcatgtcatctttaattgcatgaacaccagttttagcatcttcccttgagtagaaagagattctctacagcaagtattacgtaagaagtactggtggccaggcacagtggttcacgcctgtaatcccaacactttgagaggcggagccagaggtatcatttgagcctagaagttcgagagcagcctgggcaatatgtctaaaccccatctctacaaaaaaaatacaaaaatgaaaaagccgggtgtgattgtgtacacctgtagtcccagcaacttgagaagctgaggtggcaggattgcttgagcccaaggggagggttggcggcagtgggtggttcgaggctgcagtgagccatgattataccagtgcgctccagcctaggtgacagagcaagagccggtctcgataataattaaggccagacgcggtggctcactcctgtgatcccagcactttgggaggccaaggtggatggatcacctgaggtcaagagattgagaccaacctggccaacatggtgaaaccctgtctctactaaaaatacaaaaattagctgggctttgtggctcgcgcctgtaatcccagctactcaggaggctgaggcgggagaatcgcttgaacccaggaggcggagattgcagtgagccgagatcatgccactgcactccagcctgggcaacagaacaagactctgtctcaaaaaaaaaaaaaattataatacattaaaaaaaaaaagcacttgcattctgaaggcatattcacccttgaactgatagcattcaatgtataaaacacatgagtttcactccaagttacatatagaatgtttatctttatttgagaggaaatatccagttaataatcagaatgtcatactaattaggtatgaccataacttacgttagtcacatggtcattgattgcatgcagattctggctgccagaaagcacattgaagtaggtagtcatttaaccatttaactgttagatcttgcaaaggttgaagctgaagctgaggagcaggtagtacacaactttacaggttaatgctgaatgtcagttcattctgaattcttaccttcagccaaaaggtacaagggtctttgcagtctgaagcaaggcccagatggcagaacttgtgatggctaggaggggaaaatttgaccttaactggtagttgtggttttatcaagccaaaaatgctgactagaataataatgagagctaatgtttattgaaagcccattgtgtaccagatactctgttttctctaattcaaacctctaaatattgctcttttagtcttcacagtaatcctatatcatgatgacccccatttattgatatggaaactgaagctcaggaaagacaaagcaatttttacaaactcacactacaaggaagtagcagaggccaacatttaaatctggccccagagttgtgttcttctcattaaactgtgtctcagatctctcaaatgtgagtgtggacttttctaaccaatagcattttttaattaatgttttaaaaatttgaatagcttttagggtacagtgggtttttgtttacatggatgaatcatacattggtgaagtctgaggttttagtgtacctgtcacccaggtagtatgcattgtacccaatgtgtagttttttatccctagacccgttcccatcctcccacttctgagtctccaaagtccatgatatcactctgtatgcctttgcatacacatagcttagctcccacttacaagtgagaacatacggtatttggttttctgttcctgagttactttgcttagaataatggcctctggctccatcatagttgctgcaaaaagacattgtttctttttttatggctgaacagtattccgtggtgtgtatatataccacactttctttgtccactcattggtcagtgggcacttaggttggttccatatctttgcagttatgaattgtgctgcaataaatatacacatgcagattttttttgatatattgacttcctttgggtagatacccagtagtaggattgctggatcaaattctatccagtagcatttgaaactgctttacattaacaatgagggacaaaaaaaataacaatgagggcttacattatgctactcttgatactagacattttcatatccattacttcatttaaactccacaaccaaattactcaatagggattgttttctttatttttgtaaatgaatgtggaaaccagctcataaaactttaaattccttgccccagtgtcataaaattactgagtttgagtggcagtgctgagattaaaacctaaggctctaggatttccagcccatattttttctactgtatcatgttctttcccaaagcactaaaaaacatttcctgggtaaatgactgtgggcttggggacactatgcccactttctggccttcatgggtctaagttgcttctttgcttcttcactttttctctctgatcctgctcagattaatctctagtaaatcagatttctttcctaggctgtcttatcccacatatatagtagataatatgtcacatatttgtgaatgttaaaaatatttgttttagttttaaatctcaagctcacacagtacttactctctatgttaacaaaaatggtttttactattttctgaaggtaacgcagctgttgaagtgagatcctacactggaacatacaacacttggtctaatattaaagttcgtgccaagagctctctaaatgtgattgatggattaattctgcctttatgaaagatgaacttattttcaagataatagctaattcttgaatgggcaacctattatgtatcaatgattgtaatgatggagcattttagtcatttgtagctggaagagccttagagattatctggttcaacctattcaagagttaggtaatttaaccaaattaacatatgtggcgatgtgctcatatagtgttccttccactgtgctgtgttgccgcatatatgctgatcttatgtttatgcagtaatagtcttcataatgataaacagctactggttcctggtaggattttggacgtggatatgacttgaagtatgatgccacagcctcaaacaaatctggggtttgaatcccagctctgtcacttatggacaaattacttaacttctccaagtttgtttccctaagtgtagaatgtggataatatctactttaaagggctattgtaagcattaaaataagatcatgcgtataaattgatgagatggtggggaagaagaggctaccacaaagtaggcattcagtgtaaatggtggtagtttctccagtattattaggctatttggtttcacttataaaattgccttcaaagagttttttcatggcttttatgagtattataatatcagaacttccactcatgcaaatgtaacatttgtgtgttagtctattctatagctctgatcggagtctttatcttaaatgggaaagattattttccctgtcatgtaactttaacagaaaacgatgctaaaattaattttaagactgctctatactatatgtatgttatactatatttttatatactatacacaaaaatgtataagatgtaaagcttgtattttcaaatgttattgcagtatccagaacaattgcgacaattgctcttggaagcttctgtgcttttccacatgctgttccctgtctctggaatggaatgttctcttattctggctggcaaactcctgaacataatgtaaacagtaagctcaaacatcacttgccctttccttaccatgccatcctgtttcttctaaaccttataaatgcctttattatagtacatattgaatcataatgtaattattatttatctctgactcctttgattctgggactgccttgaggtcacggtctaggtttatttcatctttctgtctgtttagtcaaatttcctaccctgtgtaactctcagaatcttactttaagttaggaaaggccagtggctggacagatgctacagacctccattggtacagatgcccttagcttcatgttgggaacaagtggttctgtttctttttgttcctgtggagaagcatcagagatacaggcagctggggatttctacacctgtaatagcagcagctcagtgatgacacagagacatgttttttttttttttttttttttgacagaaggcgaaggggaagcaaggtacttcttacatggcagagggaaaaggagagttggagtgggggagggggagagggaggagcaggagcagggagacggggagggagaggaaactgccccgaagacatggtttctaagatttctcccaatgagacaaatcacttgtctgggatgtcagggggagaagatgcagaatctgagccccttgtataaatagacaaaaggtgaaagcattggcaatagatcaaaaaggcattccacgtagcaaaaaaattatttttaaatctgaaaatttaagtgaaatgccaagagcaaagaagagaggccatcagaaaaatttcaaagtgactactcaggtcattgtcctgaaataaatgatcattttattctggtgactcacccctagctagagtcagtacttcatagaaaagacaggagctgtgagacacttaactgtaatcttacccctttacagaaatgcctcctatagtcaagctggtctgatgatctcatgtcatcatgcacaaggattagcaagccttgaaattttatcctgtcagtgtaactcctcatctagtctcaagattgcactggcagttctttcgcagctgatcgtacagggaggaccaataaggctcatagaacacccttggagaatgaatgcctctgctgctggaggtcacagcacccagaaagtgactagagggagcagctgatacctgctctagtgagttgtgctattcctgtcacatccttgcagaggtccaagggttgctggcaagtgaaggaatatcatgcctgtagtttgaaggatagatcactcaactctcaactattctctcttcagctgtgaaccatacaacgtttttgaaaagcaaagtctgaacatttgcattctatacagaatattacagttggaaaataggtgtggtgtctagagaaatgcttctaaatgctgcaagccaccctatgtgaagcctagtctagaaatctgctttgcttcatttattaacttcattgtatctttggaagtagaagttcttaaaagtgtgtacagaagatgagtcctcagcatgagtttcactgcctgtctgtgtgagaggaagtgaccttgagagcagctgtagccctagggggacacccaggtagaggtgctcacaacatgctctgacacccggtatggctgcattcccagcttaaatgatcacatctgctcttggttttttcactgtttacaaaatctgatttctttaaagggaagggatggaaaaggtagtcaatgctcctctgagcacccaaagcatccctccacaagaacaaagaggaaaaatcattacttgctcccaacattacacaaagcgcatctctaccaatggaactctgcagtgtcggtctagccatcagcctttcccacctcacagcatattttctgtgggggtaatttattagaggggaatttgttcctttttactctttttactcttcaaattagtaatagaacccctcatgtcattctaagtgacttaagttttaaagggaaccagaaaaggagagaatatgctattgtggcacttctaaaatgcagagtgtcctcaaagatggttatagtgggtaatgggtttcatataaattgcatactagagtatctccatttcctcttttaattttttaattggttttttaaagcttgatatgctgagttagttttcatttaaaaacaatgcttgagtaggaaagttaaagaaatagaaattgcctgttttaatctattcatcctggcagcaggtatgtattgtatctgtccagagtccaaaacgtcagctccctccacttgccttccccatttcacataaactataaaagttagaaataatatattatgtcatatcctaacatcagttcaatgaatatagtttttaaaatacctactatgtgctagatactgaggacagaatgataaaatacaaaacaaagctaactaaaaacacagtttaactagtcttgtctacgattacctgccctaactataacttcatttaaggggagatactgctaaagggagttccttctgtgactgcacactctgataccaatatgtgacttctccctggctacaactgattaaatgagggaagaaaactgatccaaggggagttagtccaatagcttgtaaatggtgggttcttatcagagttttctcactaagttagaaccaagaggctgagggttgtgggggctacttaagcagaaagtttcatggagtatggactgtgcaccattgtgaagtttcctgtatttccacaggctgtgggggcagagagcatcagagtgctgatcaggaaaaaagaatgaggcagatgcagacagagaagcaaagaagcatgagaggatgagaattaggaagtagactcttttttcattttaattaatttgactagattatatttcttgcaatcaaaagggccctgtgcagagaaggtccttatcttcgttcattttttgttgctatagctgaatacccgagactgggtaatttataaagtaaagaaatttattgcttaccattttagatgctgggaagtacaaggtcaagggttctcatctagtgagggccttcttgctagtggggtctctgtagagtcctgaggtaacacagagcatcacatggtgtgggggtgggattcaccagagagagccaaactgacttttataacagactcacttttgtggtaactaacccactcccttgatagcccatcaatccattaatctagaaataaattcattcactcatgagggcagagctcttgtgaaccaatcacctcccagaagtcccacctctcaacactgctgcactggggaccaaatttccaacacatgaacttttcggggacacattcaagccacaacagtcctcaataaatatttgttgaatcaataaatacacaggacatagtgtcctaaatgcttggcatgtacatgaaccagatttggtccttgatgtcacagagcttataatatagtggaggagacagactttacatgtttgatcttgactgtaaaactagggtcactactcatcatctgatgaaggaggcagacagtaaaacaaataacaactattcaacatggtaacgtcaaaactgaacagaggctcaagtgaaagtttcaatgatagtaaccatggccaatggataggtgaatgcattggaaaattagtatgatgccattagcaaaaacataaattgcacttaactaaagttcatctggctgaattctttccttccttccttccttccttccttccttccttcctttcttcctctatctttctttggttttgagatctgtctatagtattgtgctagtgcacatattttaatttggtgcaaggcatgcttaacagagtaagtgaaaagctataaaggttagagcgtgtattagtttcaatgacgaaggagtaataaatcattttgtcaggttgcactctaacattcaaattccatttttattatggctaactagccaagcatttataattctgaactccacagaatggggaaaaagtgtattaacttataatagatcattgagcttgttaaatgtacctttcctaattcgtactttttcccttttgctgagaaaaatgcctttctgaatatataatttttacaggtcattggaaaggagtactgcacaacaggattattataatgtgctaaaagatggcacttgtatctcattgccacatagagagctcatgtgaaaactctttgatctttgctggctttttagctgaaaagatttggaaatctttttggcactggcaaaaacagaactgtggtaactgtttatagttggttgatttttagcaatgggtaagaatgtctttgttgaatccagtttattaatacgtaatgggcaacatgttgccttaaaggcaaaagcatatttttctcatatcaaaaagctccctaaatttttgccaatatccaaagatattttaagatggtcttcattttctttttcagtctgtcctatgctgagaaaaaaaaattacaacctctgaacttcagcagttttttaggtaaaaggaatttttcatgatgtgattgatataactactcagctggacataagctttcaagggctaagtccatttgccgatttgtttgcatttcctactccaactaaaataattcaaagacatgaagtgtctattgtggaaaatgcatgaataatgcaaaagtcattctcaagtgacctatcagaaaggcctaccagaaatgcagttactgctttctaataaaatcatgaaaaacttttttaaaaagtataaccatcttgaatttgttgaggcaattataagagagtatataagggcaagtttctccaaaagcggttctgtttgttttgtttttttttaataattcccatcaacagcaatctgttttctcattgtagtagtataggtgttaacataaaagctcaaacagcttgggagaaaaaaaaggatatagcaaacctaactgataactttgctagtttcaaatcattatgatggccattcatagatgactgaaatatttaacatttgaagtaacagaattttgacttatgttttcatggtttaagagtttatatttcaaattttttcacatagtctgtttataacagtatataaaacatgtattaactatataagttaataaagtcatgaactgatggccattttttggtcttattcatatagtataggctgttttgtgaattaatccccttcccatgtgtttgaattccccactatgtaaggcttagtggtgttagcatgatccaagggtgggattttcagccctctgacatcaaaaggtgaagcagaggacacaaaaaccctcactgcatcttccctagactggccagaaccactccatggtcagtggactcccttaataggaaggaatgctggtcagttgtcaaagagcaaaaagggaggggtagtcatgaggttggttgtaatcagaggtgcaacaggtctttccaaagggctggtttctgtttaactcttaggaaagaacacctaatggtagttagtgaggagggggtataatgagatgtgcccaacctcccatcccatcatggccgggaactcagtttttaaggtttccctgaagtcctcttggccaggagagggtctgtttagtcaaatgtggggggggagcttaggattttatttttatttccaagttataatgttggaccatcagagcatgaatacaggttgagtctttaatctgtaaatacttagcaatcaccttcttctcagtaactttctctgaaggttgctgataagccagtgttcttgatgtttgcccacttacccctcaagatgaggagtgaagaaattagattgcattgccaggaatttcctagaagaaaaggttttgaggatgcatgacctatgagggtgctgaggacccctttccaccaaacatggactaacttctgggttgctctttcacatctattgtcttgttcgacgtacacagaagtgcagagcacagccgcagccctcacagcatcatctatctaggttctgaatcctgaatggtctgaggctctcctagagctgagattctcctttgcagttccagtggagaaaagcactttctttgccgaggcagtgtaacttccttgttcccaaggctccaactgttgtgggcacatatgagtatacattaacatccatgcccaatttataatcactgttttccccacatgtgtactcagacctccaagcttctgaaaaatatttcctctcatctctcaaagaattttagtacatttgcctggatgcagaaacacaaatcatgctggctttcctactcaatcaaaaactgtagcttgagtggggtggcaagggttgtcccacagcaggtttacttggactccaaaatgatgtagagtttagtgaggcagctccttgagtttgaacttagagcccttttggctaccagggcacctgcagtcctccaagatagtagagtctgaaccagttaaagagccagctaccacagctttgcagaaaccactgtttctccttaactctagggctcagcggttgaactccttagaataaaactttctgtctgcgaccctatcattttcttttgtattttggccttcactgaattcccaccccatccattccaacagacttggttatacgtgtctgaacaccaaatgtgacagaatttgtggccttggatcaggaggctatttggcccttatctaaatcggtggctgagaatggattccagggaagtgtttttcttaggagtacccaagaagctcagctcaggttgggctccctgttctattctgagaactacaaatcaaattcaaaatggagcacagaaaattctcatttctagttgacttatttgtattttggtgtcctgtgccctaaatatcttctcaaggaaaccttggctttaaaagtgattgtttacttaaacaaataaaacaacaacatacaagaaaaggcagtaaatccgagcgtccatcaacaaatgaatcaaaaaacaaatgagatatatatgtacggtggcatattattcagccttaaaaaggaaagaaattttgacacatgagacaatatgaatgaaccttgaagacattaattatgctgagtgaaataagccagccacaaaagaacagatattgtataattcctcttatattaggtacctaaaatagtcaaattgatagaaagtagaatgttggttggcaggggctggcaaggagagggaaatgaagagaaggtgtatgaagggaacagagtttcagttggggaagacgaaaaagttctgacagtggatgatggtggttgttgcacagcaacatgaatgtacttaatgccacagaactgtatgcttaaaaatggttgaaacggtaaatttgatataatgtgtattgaacctatttccagatcaaaacagagagatctacattccttttggtggtgtcaaaataaaccattatcttgaaatagc

SEQ ID NO: 157984 - DNA, 9016 bp, Homo sapiens
  Payload ID: 10946
  Gene Symbol: NCKAP1L
  Gene Name: NCK-associated protein 1-like
  Uniprot ID: P55160
  ENST ID: ENST00000293373
  CDS Start-End: 80-3463
agagggtgtcaccatctaagctgaaagtgtttggggagatcagacattgctgtctggtgctcctctctcagtggccatcatgtctttgacatctgcttaccagcataaattagcagagaagctcactatcctgaatgatcgcggtcagggggttctcatccgtatgtataacatcaagaagacttgttcagaccccaaatctaagccacctttcttactggaaaagtccatggaaccatctctcaagtatatcaacaagaaatttcccaacatagatgtccgaaacagcacgcaacatttaggaccagtacatcgtgaaaaagccgagataattagattcctcaccaactactaccagtcatttgtggatgtcatggaatttcgggatcatgtatatgaacttctcaacaccattgatgcctgccagtgccattttgatatcaatctcaactttgatttcactcggagttacctggacttgattgtaacttacacctcagtcattttacttctgtcacggattgaagatcggcggatactcattggcatgtacaattgtgcccatgagatgctgcatgggcatggtgaccccagttttgcccgtctgggtcagatggtcttggagtatgaccaccctctgaagaagctgacagaagagtttgggcctcacacaaaggctgtgagtggagccctcctctctttgcatttcctctttgtccgaagaaaccagggggctgagcagtggcgcagtgcccaacttctaagcctcatcagcaaccccccagccatgattaaccctgctaattcagatacaatggcctgtgagtatctgtctgtggaagtaatggagcgctggattatcattgggtttcttctttgtcatgggtgcctcaactccaatagccagtgccagaagctgtggaagctgtgtctgcagggctccctctacatcacccttatccgtgaggatgtgctgcaggtgcacaaagtcaccgaggacctgtttagcagtttgaaagggtatggcaagagagtggcagacataaaggagagcaaggaacatgtaattgcaaacagtggccagtttcattgtcaacggcggcaatttctgcggatggcagtgaaggagctggagactgtgttggctgatgaaccgggactactgggtcctaaggctctttttgctttcatggccctgtccttcattcgtgatgaggtcacctggctggttcgccacacagagaatgtcaccaagacaaagacacctgaggactatgctgactcgagcattgcagagctacttttcttgttggaggggattaggtctctggtccgaagacacatcaaagtgatacagcaataccaccttcagtacttggcaagatttgatgctcttgtgctcagtgacatcattcagaacttgtctgtgtgtccagaggaggagtccatcatcatgtcctcattcgtcagtatcctctcctctctgaatctcaaacaagttgataatggagaaaaatttgaattctcaggattgaggctggactggttccgcctacaggcatacactagcgtggctaaggcccctctgcacctgcatgagaaccctgacttagccaaggtgatgaacctcattgtcttccactcccgaatgctggactccgtagaaaaattgctggtggaaacttctgatctgtctactttctgctttcatcttcgtatctttgagaagatgtttgccatgaccttggaggaatctgccatgttgcgttatgccattgctttccccctgatttgtgctcactttgtccactgcactcatgagatgtgcccagaggagtacccccacctcaagaaccatggtcttcaccactgcaactccttcctggaagagttggccaagcagaccagcaattgcgtcctggagatctgtgctgagcagcgaaacctgagcgagcagcttctacctaagcactgtgccactacaatcagcaaagccaagaacaagaaaaccaggaagcagaggcagactcccagaaaaggagagcccgagagggacaagccaggagctgagagtcaccggaagaaccgcagcattgtcaccaacatggacaagctacacctaaacttgacagaactggcactgacaatgaatcatgtatacagtttctccgtgtttgaacatactatcttcccttctgagtacctcagcagccacctggaggccagactcaacagagccattgtgtggctggctggctacaatgccacgacccaggagatcgtacggccttctgagctgttggcaggagtcaaagcatacattggtttcatacagtcactggcccagtttttgggtgcagatgcttccagagtcatccgcaacgccctcctgcagcagacacaaccactggattcctgtggggaacagacaatcaccacactctacacaaactggtacctggaaagtctgcttagacaggcaagcagtgggaccatcatcctctccccagccatgcaggccttcgtcagcctgcccagagaaggggagcagaacttcagtgcagaggagttctctgacatctctgagatgcgggccttggcagaactcctgggcccctatggcatgaagttcctgagtgaaaacctgatgtggcatgtgacctctcagattgtggagctgaagaagctggtggtggaaaacatggacatacttgttcagatcagatccaactttagcaagccggacttgatggcttccctgctgccccagctgacaggggctgaaaatgtgctaaagcgcatgaccatcattggggttatcctcagtttcagggccatggcccaagagggacttcgggaggttttctcctcccactgcccatttcttatgggtcccattgagtgcttgaaggagtttgtcactccagacacagacatcaaggtgaccttgagtatctttgagctggcatctgctgcaggtgtgggctgtgacattgacccagccttggtggctgccattgctaatctgaaagctgatacttcatctcctgaggaggaatataaggtggcctgcctgctcttgatctttctggcagtttccctcccactccttgccactgacccttcttccttttatagcattgagaaggatggttacaacaacaatattcattgcttgaccaaagccatcatccaggtgtctgctgccctcttcacgctctacaacaagaacattgaaactcacctcaaggaatttctggtggtggcctctgtcagcctcttgcagctgggccaggagactgacaagcttaaaaccagaaatcgagaatccatttctctgctcatgcgcttggtggtggaggagtcatccttcctgaccctggacatgctggagtcctgtttcccttatgtcctgcttcgaaatgcctatcgggaggtgtctcgggccttccacctaaactgaatgcctgccagtacccactgaagagccctttggaccttcctaaacccttgccatagtggaagctgtggtcactttcgcagggggtgggaatggggtggggtcactaaggagagagggtcaggagccagagttgatgagcagatctgtggaagaacaatccagggctgagaaatcgtagagcagtgaggcaggctgggagcatggaggacagcttatggaaaaagttagggcgtggggccacatgtgtgaattttacaatgaaaaaaggagtaacgtacaagtatattttctatcttctggtgacttgagcttgagctctgacaggcatgggcctctccgaccttcatcactattcttaggataatgctggcgggcagagatgatcaatcatcatattaaatcataatgagcttataatcctcccactggagctgctattgtctcctgcacattcattaggaccattatcttctctcttcctttttcaaatgtgttcagcaaacattcaacctgctcctactgcagagtagcagcaaaggagcccctcttttcctttgtggggctcttcgaggggtcattgggtctcttcctttgcccccagcttgactgcgtttcctactggggcaaggaggaagtgcccttcagagatgttcactgcccacctactctactacattgtttgttacaagttctctcttgctttaacccctcctgctttgatatctccacaacccagagcagagggtcagttagtctccgtcaattctaggttacatgacaactgattggcccagacttaggtgggttttccctcctgtaccatttgggggtactctgccttttattgggagggactaatttaaccccaaatccttttgtcagcctgggtatagctgttgctccaggaagggatttctcttctggatcttaaatttcacagacctcattaggttgtatggccctgagagtgggtatccttgagggagtacaagctgtttcaacttagcccttttctgcgctaattagaatttcaagcgtcacagagcctgggggctttcaagatagcactaaactaggtttacttaactccttggcaggaaatagtggcccccatgcatcacttctgtgaatccactgccagggagaagtggagaaacagatcatatatgtcacaggtctagagtggttggaattgacaaatataattagctagttggttaattagggtcatgtccatactttcatgatgaaagggaagcagttgtcggttttcagcaaaaacgattcagccttcctgaagcctatttgatagctgttttggggttttgtacatgtgtttgctttttatttcttgagacccaggcttagtcaatactttcttaacttggcacccataatcaacatacagatttttcttagcaacagttgtctgctctttagggtggaagcgatagagaatcctgcttcgtgcatcagcaaatcctccttccttgctatgggaagggcttatgttctaaagggtgattcagtgtcaggcttatgagactgagagtaaagttgatgaggaagaggaggctcagaagtatctgaacaactactctatatgtttatatttttctgcttgaggggatagagatccctcctccatctgcatctgcatatagaactgcttaagaggacagcaagacaagttgctgcagggggatggagggtagacagaatgcctttttttaaaactgaaaattttattgagatacttaatccacctgcacttgtaagaaatcatacagagaaattctattttcctttacacagtttccctgaatgctaacatctagcaaaactgtagtacactgccacaaccaggataactgacattgatataatctactgatcttgttcagatttccttccccagttttgcttatgttcatttctctctgtgtgtgcacgtgtgtgtgttatctatttctatacagctttatcatgtgtaggtttgtgtatctgccactgcagtcaacatacagaacaggccgggcgcagtggctcacgcctgtaatcccagcactttgggaggccaaggcaggtggatcacctgaggtcaggggtttgagagcagcctggccaatatagtgaaacaccgtctctactaaaaataccaaaactagccgggcgtggtggtgcatgcctgtagtcccactactcaggaggctgaggcagcagaataacttgatcccgggaggcggaggttgcagtaagctaagatcctgccacagcattccaggctgagtgacagagcgagactctgtctcaaaaaataaataataatttaaaaaaagatacagaacagttccatcaccacaaggatccctcgcattgctcttttatagcaattttatagcaattttctcctcccacaacccccttccccatctctagctcctggtaacacagatatattctctatttctaaaattttgtcatttgatatatctttttgtaaacatataattatacacacatatttctctaccacttatactttttcaaagtgctttcacatccttatagcaattctgcaaggtagccagggaaggctttcctatttcaggtcagaaaacagatttagaaatattaaatgacttaatgaaggtcacatgtttagcagtagaactagaactgggacccaagtctgatgttcagtcctagaccttttctacttgcccggtctgcctcttcacaagggaagacttgggttttagaatccagagaccttagaaggagcaaattggagaaggtgaggacatgatggcctttactaccggaagcaaaaagtgaatgtccagaggtgaagggacagagaagtaacaggacccatcagcatttcaggcaatttgcttcctttaccaggagggtctctgtcctcttacaacctgggaaaaaataagttgtgtcccaggttgtaagtttgctttacttaggcccaaaggaactaaagaatggatatcagaaatctcaccccaattgttttgtcttacaggcacagaataggttctagcctcagcattttcattaatgtagtgtttttattaacatctccattaacttgcttgcagcaatgagatggaattatgcctcccacaaggcctggggcaagatacttgcataggtgcccccttttgtttggacagtagaaacactgcctcccctgccatggtgttcaatccagttggcaggtgggccagcttcaaagtgcagaaggaactgggtgtggtggctcacccctgtaatcccagcactttgggaggcaggcggatcgcttgaactcaggagtttgagaccactctgggcaacacagtgaaaccctgtctctccaaaaatacaaaaaattagctgggcatggtggctgttgtctgtaatcccaacactttgggaggctgaggccagtggatctcttgagctaaggaggttaagaccagcctggtcaacatggcgaactccgtctctacaaaaaaatacgaaaattagctgggcgtagtagttcctgcctgtagtcctagctacttggaaggctgaggtggggaggatcgcttgagtccgggaggcagaggttgcagtgagcgaagatgatgccattgcactccagtctgggtgacagagcaagatcctgtctcacaaaaaaaaaaaaaaaaaaaaatgcagaaggtccagggcctggccaaggggatgatgccctgtagcactttgctttgcaggaagggaacaactgtgctgtgaataccaggatccaggagggagggagggtatatctgtgtcccccagctagggacaaggcttccttaaccttaggtcctcatgcttatattagttcttctccaacaaagtttgactttgagaagaagctggcacatggctgaaatgcactcacgcggttgggggaagagtgttcttccagtcctcctccccacagggcctcctgcttctcctaagtacctgtcatcaaaggagatgaagatgaatcccccttcagcccccacacctcaatgagttgtcaagtactctccctcccacttgaataggaagcaggagcagcaggccaggttgcaggttgaggaagtcagaagttaacttgagctgagtttgcagctctggagagattgaggagcagacttttctcttgtcactttggaaggagaggattgtgaggctgcccctttaaatagcattcccgtaggaggcagatcacatccatccgtcacctactgccaaagcatcatttttggtttctatcaaactcaaagcttgttggaaaggattgtggggttaggggagtgaggaggcagagcctcctaggggtagggggcagtttagaagctgaaaaggagaggaatgagaaggagcctgggaaaggtgggggatgaggacaagaggaaaagacagggagagaatagttgtcttttgagcctcagagtggaacaagtatacccaattcttatctgtttagagacgcagcaaggtagaaatgggattgtattgcaacaagaggaatgaggttgagactaaacaccaggactggtgactaaagaaagtgaaaggagccacagagtgaaaaaggctgatagacttggctctggttttatcacttactctctgtgagaccctataatttttctgggttagtttagttctcatttatttttatttttactttttccatcaaactgtgttgtctatgaagttttcccatttattaaatgaagggaattagagtggatgaactctaatgtctctttcacgaataactttgtgtgtgtgtgcgtgtgtgtgtgtgtgtgtgtgtgtgtgtgtgaattagccttaaaatgaatcaggagcagggggtcttgggagagcaggatgtgacactgtgttaacaagaaatgttgagagagccctctggatgtatgtcttgcctctttcccacctattctagtttaaagacctgcctaaatttggaaactccttagctctaatcctaatttactaattagagctctttagcaccatcctaatttgcaattcttttgtagtttccagcccatttcattttcagttgataaggaggagattgctcccaaattttcagaaatggactgtgtaggagtgtgactagggtctcagatgcagccatttcttggctgggtctggggaaaagccaagggatgtgtgctaaaggtagatggacagagggtgggaagtcccttattatttccacttttttctccatctctgactctgccatctctttctgcctctgtactttctgggagctggttctgctgatacttctgctgaatctaaatgctgacctaacttggcaattcttttatgttaggagtcttagctgtgacagttcatccgcttcttcgcccttccatttcacttcttttctccttctctgactgggagaggaggagcctccactcagtatttagaacagagtaaataccttctcctgatcactcctccttccaacctccagaattttttgaaattaaaattcacattctggga

SEQ ID NO: 157985 - DNA, 3612 bp, Homo sapiens
  Payload ID: 10946
  Gene Symbol: NCKAP1L
  Gene Name: NCK-associated protein 1-like
  Uniprot ID: P55160
  ENST ID: ENST00000545638
  CDS Start-End: 101-3334
gtgctggggccaagcaggcattaaactctacccatcaagacaaaatgcctagacttgttcagaccccaaatctaagccacctttcttactggaaaagtccatggaaccatctctcaagtatatcaacaagaaatttcccaacatagatgtccgaaacagcacgcaacatttaggaccagtacatcgtgaaaaagccgagataattagattcctcaccaactactaccagtcatttgtggatgtcatggaatttcgggatcatgtatatgaacttctcaacaccattgatgcctgccagtgccattttgatatcaatctcaactttgatttcactcggagttacctggacttgattgtaacttacacctcagtcattttacttctgtcacggattgaagatcggcggatactcattggcatgtacaattgtgcccatgagatgctgcatgggcatggtgaccccagttttgcccgtctgggtcagatggtcttggagtatgaccaccctctgaagaagctgacagaagagtttgggcctcacacaaaggctgtgagtggagccctcctctctttgcatttcctctttgtccgaagaaaccagggggctgagcagtggcgcagtgcccaacttctaagcctcatcagcaaccccccagccatgattaaccctgctaattcagatacaatggcctgtgagtatctgtctgtggaagtaatggagcgctggattatcattgggtttcttctttgtcatgggtgcctcaactccaatagccagtgccagaagctgtggaagctgtgtctgcagggctccctctacatcacccttatccgtgaggatgtgctgcaggtgcacaaagtcaccgaggacctgtttagcagtttgaaagggtatggcaagagagtggcagacataaaggagagcaaggaacatgtaattgcaaacagtggccagtttcattgtcaacggcggcaatttctgcggatggcagtgaaggagctggagactgtgttggctgatgaaccgggactactgggtcctaaggctctttttgctttcatggccctgtccttcattcgtgatgaggtcacctggctggttcgccacacagagaatgtcaccaagacaaagacacctgaggactatgctgactcgagcattgcagagctacttttcttgttggaggggattaggtctctggtccgaagacacatcaaagtgatacagcaataccaccttcagtacttggcaagatttgatgctcttgtgctcagtgacatcattcagaacttgtctgtgtgtccagaggaggagtccatcatcatgtcctcattcgtcagtatcctctcctctctgaatctcaaacaagttgataatggagaaaaatttgaattctcaggattgaggctggactggttccgcctacaggcatacactagcgtggctaaggcccctctgcacctgcatgagaaccctgacttagccaaggtgatgaacctcattgtcttccactcccgaatgctggactccgtagaaaaattgctggtggaaacttctgatctgtctactttctgctttcatcttcgtatctttgagaagatgtttgccatgaccttggaggaatctgccatgttgcgttatgccattgctttccccctgatttgtgctcactttgtccactgcactcatgagatgtgcccagaggagtacccccacctcaagaaccatggtcttcaccactgcaactccttcctggaagagttggccaagcagaccagcaattgcgtcctggagatctgtgctgagcagcgaaacctgagcgagcagcttctacctaagcactgtgccactacaatcagcaaagccaagaacaagaaaaccaggaagcagaggcagactcccagaaaaggagagcccgagagggacaagccaggagctgagagtcaccggaagaaccgcagcattgtcaccaacatggacaagctacacctaaacttgacagaactggcactgacaatgaatcatgtatacagtttctccgtgtttgaacatactatcttcccttctgagtacctcagcagccacctggaggccagactcaacagagccattgtgtggctggctggctacaatgccacgacccaggagatcgtacggccttctgagctgttggcaggagtcaaagcatacattggtttcatacagtcactggcccagtttttgggtgcagatgcttccagagtcatccgcaacgccctcctgcagcagacacaaccactggattcctgtggggaacagacaatcaccacactctacacaaactggtacctggaaagtctgcttagacaggcaagcagtgggaccatcatcctctccccagccatgcaggccttcgtcagcctgcccagagaaggggagcagaacttcagtgcagaggagttctctgacatctctgagatgcgggccttggcagaactcctgggcccctatggcatgaagttcctgagtgaaaacctgatgtggcatgtgacctctcagattgtggagctgaagaagctggtggtggaaaacatggacatacttgttcagatcagatccaactttagcaagccggacttgatggcttccctgctgccccagctgacaggggctgaaaatgtgctaaagcgcatgaccatcattggggttatcctcagtttcagggccatggcccaagagggacttcgggaggttttctcctcccactgcccatttcttatgggtcccattgagtgcttgaaggagtttgtcactccagacacagacatcaaggtgaccttgagtatctttgagctggcatctgctgcaggtgtgggctgtgacattgacccagccttggtggctgccattgctaatctgaaagctgatacttcatctcctgaggaggaatataaggtggcctgcctgctcttgatctttctggcagtttccctcccactccttgccactgacccttcttccttttatagcattgagaaggatggttacaacaacaatattcattgcttgaccaaagccatcatccaggtgtctgctgccctcttcacgctctacaacaagaacattgaaactcacctcaaggaatttctggtggtggcctctgtcagcctcttgcagctgggccaggagactgacaagcttaaaaccagaaatcgagaatccatttctctgctcatgcgcttggtggtggaggagtcatccttcctgaccctggacatgctggagtcctgtttcccttatgtcctgcttcgaaatgcctatcgggaggtgtctcgggccttccacctaaactgaatgcctgccagtacccactgaagagccctttggaccttcctaaacccttgccatagtggaagctgtggtcactttcgcagggggtgggaatggggtggggtcactaaggagagagggtcaggagccagagttgatgagcagatctgtggaagaacaatccagggctgagaaatcgtagagcagtgaggcaggctgggagcatggaggacagcttatggaaaaagttagggcgtggggccacatgtgtgaattttacaatgaaaaaaggagtaacgtac

SEQ ID NO: 157986 - DNA, 3559 bp, Homo sapiens
  Payload ID: 10946
  Gene Symbol: NCKAP1L
  Gene Name: NCK-associated protein 1-like
  ENST ID: ENST00000548221
  CDS Start-End: 33-1382
tgctgtctggtgctcctctctcagtggccatcatgtctttgacatctgcttaccagcataaattagcagagaagctcactatcctgaatgatcgcggtcagggggttctcatccgtatgtataacatcaagaagacttgttcagaccccaaatctaagccacctttcttactggaaaagtccatggaaccatctctcaagtatatcaacaagaaatttcccaacatagatgtccgaaacagcacgcaacatttaggaccagtacatcgtgaaaaagccgagataattagattcctcaccaactactaccagtcatttgtggatgtcatggaatttcgggatcatgtatatgaacttctcaacaccattgatgcctgccagtgccattttgatatcaatctcaactttgatttcactcggagttacctggacttgattgtaacttacacctcagtcattttacttctgtcacggattgaagatcggcggatactcattggcatgtacaattgtgcccatgagatgctgcatgggcatggtgaccccagttttgcccgtctgggtcagatggtcttggagtatgaccaccctctgaagaagctgacagaagagtttgggcctcacacaaaggctgtgagtggagccctcctctctttgcatttcctctttgtccgaagaaaccagggggctgagcagtggcgcagtgcccaacttctaagcctcatcagcaaccccccagccatgattaaccctgctaattcagatacaatggcctgtgagtatctgtctgtggaagtaatggagcgctggattatcattgggtttcttctttgtcatgggtgcctcaactccaatagccagtgccagaagctgtggaagctgtgtctgcagggctccctctacatcacccttatccgtgaggatgtgctgcaggtgcacaaagtcaccgaggacctgtttagcagtttgaaagggtatggcaagagagtggcagacataaaggagagcaaggaacatgtaattgcaaacagtggccagtttcattgtcaacggcggcaatttctgcggatggcagtgaaggagctggagactgtgttggctgatgaaccgggactactgggtcctaaggctctttttgctttcatggccctgtccttcattcgtgatgaggtcacctggctggttcgccacacagagaatgtcaccaagacaaagacacctgaggactatgctgactcgagcattgcagagctacttttcttgttggaggggattaggtctctggtccgaagacacatcaaagtgatacagcaataccaccttcagtacttggcaagatttgatgctcttgtgctcagtgacatcattcagtttctgtcctagggaacctgtgcccacttgacagtaactgcagctccttttttagaacttgtctgtgtgtccagaggaggagtccatcatcatgtcctcattcgtcagtatcctctcctctctgaatctcaaacaagttgataatggagaaaaatttgaattctcaggattgaggctggactggttccgcctacaggcatacactagcgtggctaaggcccctctgcacctgcatgagaaccctgacttagccaaggtgatgaacctcattgtcttccactcccgaatgctggactccgtagaaaaattgctggtggaaacttctgatctgtctactttctgctttcatcttcgtatctttgagaagatgtttgccatgaccttggaggaatctgccatgttgcgttatgccattgctttccccctgatttgtgctcactttgtccactgcactcatgagatgtgcccagaggagtacccccacctcaagaaccatggtcttcaccactgcaactccttcctggaagagttggccaagcagaccagcaattgcgtcctggagatctgtgctgagcagcgaaacctgagcgagcagcttctacctaagcactgtgccactacaatcagcaaagccaagaacaagaaaaccaggaagcagaggcagactcccagaaaaggagagcccgagagggacaagccaggagctgagagtcaccggaagaaccgcagcattgtcaccaacatggacaagctacacctaaacttgacagaactggcactgacaatgaatcatgtatacagtttctccgtgtttgaacatactatcttcccttctgagtacctcagcagccacctggaggccagactcaacagagccattgtgtggctggctggctacaatgccacgacccaggagatcgtacggccttctgagctgttggcaggagtcaaagcatacattggtttcatacagtcactggcccagtttttgggtgcagatgcttccagagtcatccgcaacgccctcctgcagcagacacaaccactggattcctgtggggaacagacaatcaccacactctacacaaactggtacctggaaagtctgcttagacaggcaagcagtgggaccatcatcctctccccagccatgcaggccttcgtcagcctgcccagagaaggggagcagaacttcagtgcagaggagttctctgacatctctgagatgcgggccttggcagaactcctgggcccctatggcatgaagttcctgagtgaaaacctgatgtggcatgtgacctctcagattgtggagctgaagaagctggtggtggaaaacatggacatacttgttcagatcagatccaactttagcaagccggacttgatggcttccctgctgccccagctgacaggggctgaaaatgtgctaaagcgcatgaccatcattggggttatcctcagtttcagggccatggcccaagagggacttcgggaggttttctcctcccactgcccatttcttatgggtcccattgagtgcttgaaggagtttgtcactccagacacagacatcaaggtgaccttgagtatctttgagctggcatctgctgcaggtgtgggctgtgacattgacccagccttggtggctgccattgctaatctgaaagctgatacttcatctcctgaggaggaatataaggtggcctgcctgctcttgatctttctggcagtttccctcccactccttgccactgacccttcttccttttatagcattgagaaggatggttacaacaacaatattcattgcttgaccaaagccatcatccaggtgtctgctgccctcttcacgctctacaacaagaacattgaaactcacctcaaggaatttctggtggtggcctctgtcagcctcttgcagctgggccaggagactgacaagcttaaaaccagaaatcgagaatccatttctctgctcatgcgcttggtggtggaggagtcatccttcctgaccctggacatgctggagtcctgtttcccttatgtcctgcttcgaaatgcctatcgggaggtgtctcgggccttccacctaaactgaatgcctgccagtacccactgaagagccctttggaccttcctaaacccttgccatagtggaagctgtggtcactttcgcagggggtggg

SEQ ID NO: 157987 - DNA, 388 bp, Homo sapiens
  Payload ID: 10947
  Gene Symbol: NCKAP5
  Gene Name: NCK-associated protein 5
  ENST ID: ENST00000358991
  CDS Start-End: 182-388
caggctttgcagagtttagagcatattctacccaactggccccagatggaaaatactgtcttgaaattggatggctttttaagtgtagctctccacagcctgctcaaagaaaaaaaaaaatgaccctggaaacagacgggggattcttataagtcacaaaagaaaataaataacttcatccatggagggaaagagacagcttgagaaaagggactttggaaaaaggctgtctctagacagcagtcttgtggaatacatggactccaataaatacattgagcatctgctgactcagcttgaggagcaacacaggagtctctggagggagaagttggcagtggcccgactacagcgagaagttgcccaaagaacaagtgagggggccatg

SEQ ID NO: 157988 - DNA, 7593 bp, Homo sapiens
  Payload ID: 10947
  Gene Symbol: NCKAP5
  Gene Name: NCK-associated protein 5
  ENST ID: ENST00000317721
  CDS Start-End: 375-6104
gcaactacggagccgcagcccagggagcaagtctccgcaaacttgctccgcattcacggcaggacttcccagccgctgtggatgttcaggaaaaccgagtctgttctgttagcgtggcctttgaatgcttcaaaaataaacagaggataaccaaccgcgggaggaaatttttagctggagagagttgtagttcctgtgtctgtctccaggactgtgatatgtgttgactgaagagctaactacaagttcatcgtgaagaataaatgagataagctacctcaagtgcctgtaccaaaatagactcacaatacattgaccctggaaacagacgggggattcttataagtcacaaaagaaaataaataacttcatccatggagggaaagagacagcttgagaaaagggactttggaaaaaggctgtctctagacagcagtcttgtggaatgcatggactccaataaatacattgagcatctgctgactcagcttgaggagcaacacaggagtctctggagggagaagttggcagtggcccgactacagcgagaagttgcccaaagaacaagtgagggggccatgcatgagaagctgatacatgaactggaagaggagagacacttacgtcttcaaagcgagaagcggttgcaggaggtgaccctagagtctgaacgcaacagaattcagatgcgtagcttgcagcagcagttctccaggatggaagaaacagtacgaaatctattgcagagtcaaggatctccagagcagaaaaaagaagaaactgttaatataatggtctatcaggaaaagctgtcagaggaagagagaaaacataaggaagctttggaagatcttcacatggtggttgatgaggattcgaggagtgaaagcagcagtacagatgagggaaaagaaaagaccaaattgctattagagagattgaaagctctagaggcagagaattcagcgttggctttggagaatgaaaatcaaagggaacaatatgagcgatgtcttgatgaggtagccaaccaagttgttcaagctctgcttactcaaaaggatctaagagaggaatgtgtgaagttgaaaacaagagtgtttgatttggaacagcagaatcgaacactaagcatcctattccaacagcgagtcagacccacttctgatctgctcctccagaaacttcactcacgtctcttggatctttcatctggagatttgctttcagaggtggaaagaaaccgaagtctgacacagtcacgaactgatgctgaggtgcacgaacaccaactaaatacaaaatcggccttgaaatgccctggcttgggggctgtcatccctggtcatctctgtcctcgaaacagctacagtagcagcagtgaactgtctctttcaagcacctgcagcgagtactccagtggctcctcctacacgtggcacgatgggaagaacctcaggaaaaggcaatcatcacaaaactgggataaaaggctaagtattgattcttcgctcccaagtggctttgctagtcctacaaatgaactacctccaactcgtatcaaggaaagccacattttggaagggctaagaaagctacagaagcgaaaagtgttacttgaacccccatcagtgataaccaaatggggttataaagattgcatgaactcgaatgaaggaatatattctcctggaattaaaagtagcagcctcaaggagtatcccccctgcaaaacagctgacctggggagcccctgcaaggaaccccacaagacatttgtttatgatctagattcccacgttgatgcggacgatgacccttccaccttagcattgctccaagcagttccaaaccagagctgcaggccacatggcagtaaattaacccacagtgtttccgacagtctgtttggctgggagacaaacagaaaacactttctggaaggcacatcctcagtttatcccaaggaaaggcctgaaaagctgacaagttgcgccagcagctgtcccttagagatgaagctgtgcccaagtgtgcagacgcctcaggtacagagggagaggggcccacagggccaaggccatggccgcatggctctcaacctccagctttcagacactgatgacaatgaaacgtttgatgagctgcacatagagagcagtgatgagaaaagtccttcagacgtgtcattggctgccgacaccgataagtccgtggagaacctggatgtccttgtggggtttggaaaatctctatgtgggtctcctgaagaggaggaaaaacaagtgcccatcccttcagagactaggccaaagacttttagtttcattaagcagcaaagagttgtaaaaaggacttcttcagaagaatgtgtgactgtgatatttgatgcggaagacggtgagcccattgaattcagctctcaccagactggggttgtcactgttaccagaaatgagatttccatcaattcaactcctgctggacccaaggcagaacatactgagcttttacctcagggaattgcttgtttacagccaagagctgctgcaagagactatactttctttaaaaggtctgaagaggacactgagaaaaacattccaaaagataatgtagataatgttcccagggtgtccactgaatctttcagctccaggacagtgacacaaaatcctcagcagcaaaagctggtcaaaccaacacacaatatatcatgccagagtaattccaggtcttcggcacccatgggcatctatcaaaagcaaaatctgacaaaaatacctcccaggggcaagtcttcacctcagaaatcaaaactaatggagcccgaagccaccacactactcccttcatctggcctggtgactcttgaaaaatcaccagccttagctcctgggaaactctcacgattcatgaagactgagagctcagggcccctctttgaattacgatcagatccacacattccaaaacattccgcccaacttccgcacagctccaggatgcccagcaggagggactgggtccagtgccccaagagtcagactccagggtcacggtcaaggcctgccattgagtctagtgacagtggagagccccccacgagggatgaacactgtggctctgggccggaggcaggggtgaaatccccttcccctccgccccctccaggcaggtccgtctccctgctggccaggcccagctatgactattcaccagcaccttcatccaccaagtccgaaaccagggtccccagtgaaacagcaaggaccccattcaaatccccgctgctgaaaggaatttctgctccagttatttcttctaatccggccacgacagaagtgcagaggaagaaaccttctgtggccttcaaaaagcctatcttcactcaccctatgccctccccagaagcagtcattcaaacccgatgccctgctcatgccccctccagctccttcaccgtaatggctctggggcctccaaaggtctctccgaagagaggtgtccccaaaacctctcctcgccaaacacttgggaccccacaaagggacataggattacagactcccaggatctctccttcaacccatgagccactggaaatgacgtcctccaaaagtgtatctccagggagaaaaggacaattgaatgatagcgcctccacaccccccaagccttccttcttaggggtaaatgagtcaccatcatctcaggtcagcagttcctcatcatcctcatcacccgccaaaagccataacagccctcatggttgtcaaagtgctcatgagaaaggactgaaaactcgccttccagtgggactcaaagtgctcatgaagtctccccagctgctcaggaaaagttccaccgtgccagggaaacatgaaaaagacagtttaaatgaagcctccaaaagttccgtggctgtgaacaagtctaagccagaggactccaagaatccagcaagcatggagatcacagcgggtgaaagaaatgtgaccctaccggattcacaagcacagggcagtttagctgatgggcttcccctggaaacagcactacaagagccattggaaagtagcatccctgggagtgatggaagggatggggtagataatagatccatgagaagatccctttcctccagcaaaccacacctaaaaccagctctgggtatgaatggcgccaaagcccgcagccacagcttcagtacacactcaggagacaagccttctacgccccccatcgaagggtcaggcaaagtccgcactcagatcattaccaataccgccgagagaggcaattctcttacccggcagaactcttccacggaaagctctcccaacaaggccccttctgctcccatgttggagagtctccccagtgttgggaggccctcggggcacccctcctccgggaagggctccctggggagctcaggcagcttcagcagtcagcatgggagcccaagtaagttgcctttgaggatccctccaaagtctgagggactcctcatcccacctggaaaggaagaccagcaggccttcacccagggagagtgccccagtgccaatgtggctgtacttggggaaccaggcagtgaccgccgcagttgcccacccaccccaacagactgccctgaagccctgcagagcccagggaggactcagcatccaagcacttttgaaacaagcagtacatccaagctagaaacttctggaaggcatccagatgcctctgcaaccgcgactgatgctgtgagttcagaagcccccctctcacccacaatcgaagaaaaggtcatgttgtgcattcaggaaaatgtggaaaagggccaagtgcaaacaaagcccacctctgtggaagcaaagcagaagcctgggccttcttttgccagctggtttggttttcggaagagtagacttccagctctgagtagcaggaaaatggacatctccaaaaccaaagtagaaaagaaagatgcaaaagtcttggggtttggaaacagacaactaaaatcagaaagaaaaaaagagaaaaagaagcctgaactacagtgtgagacagaaaatgagcttatcaaggacaccaagtcagcagataatccagatggcggtttacaaagcaaaaataatcggagaacaccacaagacatttacaaccaactgaagattgaaccaaggaatagacacagccctgttgcatgttcaacgaaagacaccttcatgacggaactcttgaacagagttgataagaaagcagctccacagacagaaagtggatcaagtaatgcttcctgcaggaatgtgttaaagggcagttctcagggctcctgtctcatcggcagctctatcagtactcaaggaaaccacaagaaaaacatgaaaatcaaagccgatatggaagtaccaaaagactccctggtaaaagaggcaaatgaaaacttgcaagaggatgaagacgatgcagttgcagattctgtatttcagagccacatcatagaatccaactgccagatgagaacattggacagtgggatcggaacctttccactcccagactcgggaaatcgctcgacaggacgctacctatgccagccagactccccagaggacgctgagcctctcctgcctctccagtcagccctttctgcagtttcttccatgagagcccaaacccttgaacgtgaagtgccttcctccacagacggccagcgccctgcagatagcgccattgttcattccacatccgaccccatcatgaccgccagagggatgaggcctcttcagagccgcctccccaaaccagcttcctcaggaaaagtcagttcccaaaagcagaatgaagcagagccaaggcctcagacatgctcatcattcggatatgctgaagacccaatggcaagccagccgcttccagactgggggagtgaagttgctgccaccgggacccaggacaaggcacccagaatgtgtacgtactctgccagcggtggcagtaatagtgacagtgacctggactatggagataatggttttggagctggaaggggacagttagtgaaagcactgaagagcgctgccccagaaattgagacaacttgaagaaacaaaagacgatcccgagaatagattatcgaaaatttccctagagtcattcaataaatttaacagcaatactgtgattttattagaaaaagagaagaactctctgaacaaggttgaaggacagaaggaagaaaaagaaaaaaatgaagagacatctttgagtagttcagataggcctggggtagacaacttggaatctttgagtgattctttatatgatagcttctcttcctgtgccagtcaaggttcaaatgatgtataaaggacatctcttcccttagtgagctgggactggagcgcttaagaaatgatgggtggggggtggggggtgcaccgcttgatagagataacaataaactattgcagtaccagagccttccttgtcaaattcacagcaggcaacccaccagagcttatttctctgacagggcaataaagatagactccatttattgtgtttcaagaggattaagcgtaaacacatctatgatacagaatccttaattttgcactttttttgaatatttgtacagaagttgtaaattttttggaagagaaattatatttgtagcaaaaaaagacagcaataaatggaatcagtgccatgctcttgaaataatgtactaagtcttagaagttgatgataatatatattttttaaaatcccaactgaagtttttgtgaagttcgttgtcctggtcctcaaattgtttgtgggtacactctgtaaacctacaacagggcctgccaaaaaatcggagggttcctcctcatctccatctcacaaatctcaatttgatggaaatgttcattttagtgtaatttcagattcgttgccagagattcaggtgatagtaataagtgtcattctgcttctgctgaaaaatgaaaagggtcctgaagtgtggacactgattgggagtgtgacattgtatcagaaatgaccgaattctattcccaataccagtttttccttccagacatttctttagattgtcttttacttagtgcttctctatgatcctgaatattatttgatttttatcttcttgctctttttattaaaatctgggcactctaaaaatgaaaacaaatttctatttgcaatgttcacttttaaaaataaaattaatggtgctacgaagaattctttttaatatccttttttttctacaaagactgtttatatgtaaggataaattctattttaaaggttatgtgtattttttctagatgtgaactatttataattacttatgtacaggagcttgtaaactaggcccaatagaaatatttttaggatctatatggctactttagcacataattgtttctttaaagagtattgtatgatcagtgttatttggttaatttgtgcaatttgttttattttatcttaaatgaaaattatgtaaaatgtccttgtctttcagactttaaaaaatctttttgtttcctttctgaataaaagttatatcacatttgc

SEQ ID NO: 157989 - DNA, 3636 bp, Homo sapiens
  Payload ID: 10947
  Gene Symbol: NCKAP5
  Gene Name: NCK-associated protein 5
  ENST ID: ENST00000405974
  CDS Start-End: 375-2147
gcaactacggagccgcagcccagggagcaagtctccgcaaacttgctccgcattcacggcaggacttcccagccgctgtggatgttcaggaaaaccgagtctgttctgttagcgtggcctttgaatgcttcaaaaataaacagaggataaccaaccgcgggaggaaatttttagctggagagagttgtagttcctgtgtctgtctccaggactgtgatatgtgttgactgaagagctaactacaagttcatcgtgaagaataaatgagataagctacctcaagtgcctgtaccaaaatagactcacaatacattgaccctggaaacagacgggggattcttataagtcacaaaagaaaataaataacttcatccatggagggaaagagacagcttgagaaaagggactttggaaaaaggctgtctctagacagcagtcttgtggaatgcatggactccaataaatacattgagcatctgctgactcagcttgaggagcaacacaggagtctctggagggagaagttggcagtggcccgactacagcgagaagttgcccaaagaacaagtgagggggccatgcatgagaagctgatacatgaactggaagaggagagacacttacgtcttcaaagcgagaagcggttgcaggaggtgaccctagagtctgaacgcaacagaattcagatgcgtagcttgcagcagcagttctccaggatggaagaaacagtacgaaatctattgcagagtcaaggatctccagagcagaaaaaagaagaaactgttaatataatggtctatcaggaaaagctgtcagaggaagagagaaaacataaggaagctttggaagatcttcacatggtggttgatgaggattcgaggagtgaaagcagcagtacagatgagggaaaagaaaagaccaaattgctattagagagattgaaagctctagaggcagagaattcagcgttggctttggagaatgaaaatcaaagggaacaatatgagcgatgtcttgatgaggtagccaaccaagttgttcaagctctgcttactcaaaaggatctaagagaggaatgtgtgaagttgaaaacaagagtgtttgatttggaacagcagaatcgaacactaagcatcctattccaacagcgagtcagacccacttctgatctgctcctccagaaacttcactcacgtctcttggatctttcatctggagatttgctttcagaggtggaaagaaaccgaagtctgacacagtcacgaactgatgctgaggtgcacgaacaccaactaaatacaaaatcggccttgaaatgccctggcttgggggctgtcatccctggtcatctctgtcctcgaaacagctacagtagcagcagtgaactgtctctttcaagcacctgcagcgagtactccagtggctcctcctacacgtggcacgatgggaagaacctcaggaaaagggtaaaagaggcaaatgaaaacttgcaagaggatgaagacgatgcagttgcagattctgtatttcagagccacatcatagaatccaactgccagatgagaacattggacagtgggatcggaacctttccactcccagactcgggaaatcgctcgacaggacgctacctatgccagccagactccccagaggacgctgagcctctcctgcctctccagtcagccctttctgcagtttcttccatgagagcccaaacccttgaacgtgaagtgccttcctccacagacggccagcgccctgcagatagcgccattgttcattccacatccgaccccatcatgaccgccagagggatgaggcctcttcagagccgcctccccaaaccagcttcctcaggaaaagtcagttcccaaaagcagaatgaagcagagccaaggcctcagacatgctcatcattcggatatgctgaagacccaatggcaagccagccgcttccagactgggggagtgaagttgctgccaccgggacccaggacaaggcacccagaatgtgtacgtactctgccagcggtggcagtaatagtgacagtgacctggactatggagataatggttttggagctggaaggggacagttagtgaaagcactgaagagcgctgccccagaaattgagacaacttgaagaaacaaaagacgatcccgagaatagattatcgaaaatttccctagagtcattcaataaatttaacagcaatactgtgattttattagaaaaagagaagaactctctgaacaaggttgaaggacagaaggaagaaaaagaaaaaaatgaagagacatctttgagtagttcagataggcctggggtagacaacttggaatctttgagtgattctttatatgatagcttctcttcctgtgccagtcaaggttcaaatgatgtataaaggacatctcttcccttagtgagctgggactggagcgcttaagaaatgatgggtggggggtggggggtgcaccgcttgatagagataacaataaactattgcagtaccagagccttccttgtcaaattcacagcaggcaacccaccagagcttatttctctgacagggcaataaagatagactccatttattgtgtttcaagaggattaagcgtaaacacatctatgatacagaatccttaattttgcactttttttgaatatttgtacagaagttgtaaattttttggaagagaaattatatttgtagcaaaaaaagacagcaataaatggaatcagtgccatgctcttgaaataatgtactaagtcttagaagttgatgataatatatattttttaaaatcccaactgaagtttttgtgaagttcgttgtcctggtcctcaaattgtttgtgggtacactctgtaaacctacaacagggcctgccaaaaaatcggagggttcctcctcatctccatctcacaaatctcaatttgatggaaatgttcattttagtgtaatttcagattcgttgccagagattcaggtgatagtaataagtgtcattctgcttctgctgaaaaatgaaaagggtcctgaagtgtggacactgattgggagtgtgacattgtatcagaaatgaccgaattctattcccaataccagtttttccttccagacatttctttagattgtcttttacttagtgcttctctatgatcctgaatattatttgatttttatcttcttgctctttttattaaaatctgggcactctaaaaatgaaaacaaatttctatttgcaatgttcacttttaaaaataaaattaatggtgctacgaagaattctttttaatatccttttttttctacaaagactgtttatatgtaaggataaattctattttaaaggttatgtgtattttttctagatgtgaactatttataattacttatgtacaggagcttgtaaactaggcccaatagaaatatttttaggatctatatggctactttagcacataattgtttctttaaagagtattgtatgatcagtgttatttggttaatttgtgcaatttgttttattttatcttaaatgaaaattatgtaaaatgtccttgtctttcagactttaaaaaatctttttgtttcctttctgaataaaagttatatcacatttgc

SEQ ID NO: 157990 - DNA, 2390 bp, Homo sapiens
  Payload ID: 10947
  Gene Symbol: NCKAP5
  Gene Name: NCK-associated protein 5
  Uniprot ID: O14513
  ENST ID: ENST00000409213
  CDS Start-End: 378-2150
gaagcaactacggagccgcagcccagggagcaagtctccgcaaacttgctccgcattcacggcaggacttcccagccgctgtggatgttcaggaaaaccgagtctgttctgttagcgtggcctttgaatgcttcaaaaataaacagaggataaccaaccgcgggaggaaatttttagctggagagagttgtagttcctgtgtctgtctccaggactgtgatatgtgttgactgaagagctaactacaagttcatcgtgaagaataaatgagataagctacctcaagtgcctgtaccaaaatagactcacaatacattgaccctggaaacagacgggggattcttataagtcacaaaagaaaataaataacttcatccatggagggaaagagacagcttgagaaaagggactttggaaaaaggctgtctctagacagcagtcttgtggaatacatggactccaataaatacattgagcatctgctgactcagcttgaggagcaacacaggagtctctggagggagaagttggcagtggcccgactacagcgagaagttgcccaaagaacaagtgagggggccatgcatgagaagctgatacatgaactggaagaggagagacacttacgtcttcaaagcgagaagcggttgcaggaggtgaccctagagtctgaacgcaacagaattcagatgcgtagcttgcagcagcagttctccaggatggaagaaacagtacgaaatctattgcagagtcaaggatctccagagcagaaaaaagaagaaactgttaatataatggtctatcaggaaaagctgtcagaggaagagagaaaacataaggaagctttggaagatcttcacatggtggttgatgaggattcgaggagtgaaagcagcagtacagatgagggaaaagaaaagaccaaattgctattagagagattgaaagctctagaggcagagaattcagcgttggctttggagaatgaaaatcaaagggaacaatatgagcgatgtcttgatgaggtagccaaccaagttgttcaagctctgcttactcaaaaggatctaagagaggaatgtgtgaagttgaaaacaagagtgtttgatttggaacagcagaatcgaacactaagcatcctattccaacagcgagtcagacccacttctgatctgctcctccagaaacttcactcacgtctcttggatctttcatctggagatttgctttcagaggtggaaagaaaccgaagtctgacacagtcacgaactgatgctgaggtgcacgaacaccaactaaatacaaaatcggccttgaaatgccctggcttgggggctgtcatccctggtcatctctgtcctcgaaacagctacagtagcagcagtgaactgtctctttcaagcacctgcagcgagtactccagtggctcctcctacacgtggcacgatgggaagaacctcaggaaaagggtaaaagaggcaaatgaaaacttgcaagaggatgaagacgatgcagttgcagattctgtatttcagagccacatcatagaatccaactgccagatgagaacattggacagtgggatcggaacctttccactcccagactcgggaaatcgctcgacaggacgctacctatgccagccagactccccagaggacgctgagcctctcctgcctctccagtcagccctttctgcagtttcttccatgagagcccaaacccttgaacgtgaagtgccttcctccacagacggccagcgccctgcagatagcgccattgttcattccacatccgaccccatcatgaccgccagagggatgaggcctcttcagagccgcctccccaaaccagcttcctcaggaaaagtcagttcccaaaagcagaatgaagcagagccaaggcctcagacatgctcatcattcggatatgctgaagacccaatggcaagccagccgcttccagactgggggagtgaagttgctgccaccgggacccaggacaaggcacccagaatgtgtacgtactctgccagcggtggcagtaatagtgacagtgacctggactatggagataatggttttggagctggaaggggacagttagtgaaagcactgaagagcgctgccccagaaattgagacaacttgaagaaacaaaagacgatcccgagaatagattatcgaaaatttccctagagtcattcaataaatttaacagcaatactgtgattttattagaaaaagagaagaactctctgaacaaggttgaaggacagaaggaagaaaaagaaaaaaatgaagagacatctttgagtagttcagataggcctggggtagacaacttggaatctttgagtgattctttatatgatagcttctcttcctgtgc

SEQ ID NO: 157991 - DNA, 7594 bp, Homo sapiens
  Payload ID: 10947
  Gene Symbol: NCKAP5
  Gene Name: NCK-associated protein 5
  Uniprot ID: O14513
  ENST ID: ENST00000409261
  CDS Start-End: 375-6104
gcaactacggagccgcagcccagggagcaagtctccgcaaacttgctccgcattcacggcaggacttcccagccgctgtggatgttcaggaaaaccgagtctgttctgttagcgtggcctttgaatgcttcaaaaataaacagaggataaccaaccgcgggaggaaatttttagctggagagagttgtagttcctgtgtctgtctccaggactgtgatatgtgttgactgaagagctaactacaagttcatcgtgaagaataaatgagataagctacctcaagtgcctgtaccaaaatagactcacaatacattgaccctggaaacagacgggggattcttataagtcacaaaagaaaataaataacttcatccatggagggaaagagacagcttgagaaaagggactttggaaaaaggctgtctctagacagcagtcttgtggaatacatggactccaataaatacattgagcatctgctgactcagcttgaggagcaacacaggagtctctggagggagaagttggcagtggcccgactacagcgagaagttgcccaaagaacaagtgagggggccatgcatgagaagctgatacatgaactggaagaggagagacacttacgtcttcaaagcgagaagcggttgcaggaggtgaccctagagtctgaacgcaacagaattcagatgcgtagcttgcagcagcagttctccaggatggaagaaacagtacgaaatctattgcagagtcaaggatctccagagcagaaaaaagaagaaactgttaatataatggtctatcaggaaaagctgtcagaggaagagagaaaacataaggaagctttggaagatcttcacatggtggttgatgaggattcgaggagtgaaagcagcagtacagatgagggaaaagaaaagaccaaattgctattagagagattgaaagctctagaggcagagaattcagcgttggctttggagaatgaaaatcaaagggaacaatatgagcgatgtcttgatgaggtagccaaccaagttgttcaagctctgcttactcaaaaggatctaagagaggaatgtgtgaagttgaaaacaagagtgtttgatttggaacagcagaatcgaacactaagcatcctattccaacagcgagtcagacccacttctgatctgctcctccagaaacttcactcacgtctcttggatctttcatctggagatttgctttcagaggtggaaagaaaccgaagtctgacacagtcacgaactgatgctgaggtgcacgaacaccaactaaatacaaaatcggccttgaaatgccctggcttgggggctgtcatccctggtcatctctgtcctcgaaacagctacagtagcagcagtgaactgtctctttcaagcacctgcagcgagtactccagtggctcctcctacacgtggcacgatgggaagaacctcaggaaaaggcaatcatcacaaaactgggataaaaggctaagtattgattcttcgctcccaagtggctttgctagtcctacaaatgaactacctccaactcgtatcaaggaaagccacattttggaagggctaagaaagctacagaagcgaaaagtgttacttgaacccccatcagtgataaccaaatggggttataaagattgcatgaactcgaatgaaggaatatattctcctggaattaaaagtagcagcctcaaggagtatcccccctgcaaaacagctgacctggggagcccctgcaaggaaccccacaagacatttgtttatgatctagattcccacgttgatgcggacgatgacccttccaccttagcattgctccaagcagttccaaaccagagctgcaggccacatggcagtaaattaacccacagtgtttccgacagtctgtttggctgggagacaaacagaaaacactttctggaaggcacatcctcagtttatcccaaggaaaggcctgaaaagctgacaagttgcgccagcagctgtcccttagagatgaagctgtgcccaagtgtgcagacgcctcaggtacagagggagaggggcccacagggccaaggccatggccgcatggctctcaacctccagctttcagacactgatgacaatgaaacgtttgatgagctgcacatagagagcagtgatgagaaaagtccttcagacgtgtcattggctgccgacaccgataagtccgtggagaacctggatgtccttgtggggtttggaaaatctctatgtgggtctcctgaagaggaggaaaaacaagtgcccatcccttcagagactaggccaaagacttttagtttcattaagcagcaaagagttgtaaaaaggacttcttcagaagaatgtgtgactgtgatatttgatgcggaagacggtgagcccattgaattcagctctcaccagactggggttgtcactgttaccagaaatgagatttccatcaattcaactcctgctggacccaaggcagaacatactgagcttttacctcagggaattgcttgtttacagccaagagctgctgcaagagactatactttctttaaaaggtctgaagaggacactgagaaaaacattccaaaagataatgtagataatgttcccagggtgtccactgaatctttcagctccaggacagtgacacaaaatcctcagcagcaaaagctggtcaaaccaacacacaatatatcatgccagagtaattccaggtcttcggcacccatgggcatctatcaaaagcaaaatctgacaaaaatacctcccaggggcaagtcttcacctcagaaatcaaaactaatggagcccgaagccaccacactactcccttcatctggcctggtgactcttgaaaaatcaccagccttagctcctgggaaactctcacgattcatgaagactgagagctcagggcccctctttgaattacgatcagatccacacattccaaaacattccgcccaacttccgcacagctccaggatgcccagcaggagggactgggtccagtgccccaagagtcagactccagggtcacggtcaaggcctgccattgagtctagtgacagtggagagccccccacgagggatgaacactgtggctctgggccggaggcaggggtgaaatccccttcccctccgccccctccaggcaggtccgtctccctgctggccaggcccagctatgactattcaccagcaccttcatccaccaagtccgaaaccagggtccccagtgaaacagcaaggaccccattcaaatccccgctgctgaaaggaatttctgctccagttatttcttctaatccggccacgacagaagtgcagaggaagaaaccttctgtggccttcaaaaagcctatcttcactcaccctatgccctccccagaagcagtcattcaaacccgatgccctgctcatgccccctccagctccttcaccgtaatggctctggggcctccaaaggtctctccgaagagaggtgtccccaaaacctctcctcgccaaacacttgggaccccacaaagggacataggattacagactcccaggatctctccttcaacccatgagccactggaaatgacgtcctccaaaagtgtatctccagggagaaaaggacaattgaatgatagcgcctccacaccccccaagccttccttcttaggggtaaatgagtcaccatcatctcaggtcagcagttcctcatcatcctcatcacccgccaaaagccataacagccctcatggttgtcaaagtgctcatgagaaaggactgaaaactcgccttccagtgggactcaaagtgctcatgaagtctccccagctgctcaggaaaagttccaccgtgccagggaaacatgaaaaagacagtttaaatgaagcctccaaaagttccgtggctgtgaacaagtctaagccagaggactccaagaatccagcaagcatggagatcacagcgggtgaaagaaatgtgaccctaccggattcacaagcacagggcagtttagctgatgggcttcccctggaaacagcactacaagagccattggaaagtagcatccctgggagtgatggaagggatggggtagataatagatccatgagaagatccctttcctccagcaaaccacacctaaaaccagctctgggtatgaatggcgccaaagcccgcagccacagcttcagtacacactcaggagacaagccttctacgccccccatcgaagggtcaggcaaagtccgcactcagatcattaccaataccgccgagagaggcaattctcttacccggcagaactcttccacggaaagctctcccaacaaggccccttctgctcccatgttggagagtctccccagtgttgggaggccctcggggcacccctcctccgggaagggctccctggggagctcaggcagcttcagcagtcagcatgggagcccaagtaagttgcctttgaggatccctccaaagtctgagggactcctcatcccacctggaaaggaagaccagcaggccttcacccagggagagtgccccagtgccaatgtggctgtacttggggaaccaggcagtgaccgccgcagttgcccacccaccccaacagactgccctgaagccctgcagagcccagggaggactcagcatccaagcacttttgaaacaagcagtacatccaagctagaaacttctggaaggcatccagatgcctctgcaaccgcgactgatgctgtgagttcagaagcccccctctcacccacaatcgaagaaaaggtcatgttgtgcattcaggaaaatgtggaaaagggccaagtgcaaacaaagcccacctctgtggaagcaaagcagaagcctgggccttcttttgccagctggtttggttttcggaagagtagacttccagctctgagtagcaggaaaatggacatctccaaaaccaaagtagaaaagaaagatgcaaaagtcttggggtttggaaacagacaactaaaatcagaaagaaaaaaagagaaaaagaagcctgaactacagtgtgagacagaaaatgagcttatcaaggacaccaagtcagcagataatccagatggcggtttacaaagcaaaaataatcggagaacaccacaagacatttacaaccaactgaagattgaaccaaggaatagacacagccctgttgcatgttcaacgaaagacaccttcatgacggaactcttgaacagagttgataagaaagcagctccacagacagaaagtggatcaagtaatgcttcctgcaggaatgtgttaaagggcagttctcagggctcctgtctcatcggcagctctatcagtactcaaggaaaccacaagaaaaacatgaaaatcaaagccgatatggaagtaccaaaagactccctggtaaaagaggcaaatgaaaacttgcaagaggatgaagacgatgcagttgcagattctgtatttcagagccacatcatagaatccaactgccagatgagaacattggacagtgggatcggaacctttccactcccagactcgggaaatcgctcgacaggacgctacctatgccagccagactccccagaggacgctgagcctctcctgcctctccagtcagccctttctgcagtttcttccatgagagcccaaacccttgaacgtgaagtgccttcctccacagacggccagcgccctgcagatagcgccattgttcattccacatccgaccccatcatgaccgccagagggatgaggcctcttcagagccgcctccccaaaccagcttcctcaggaaaagtcagttcccaaaagcagaatgaagcagagccaaggcctcagacatgctcatcattcggatatgctgaagacccaatggcaagccagccgcttccagactgggggagtgaagttgctgccaccgggacccaggacaaggcacccagaatgtgtacgtactctgccagcggtggcagtaatagtgacagtgacctggactatggagataatggttttggagctggaaggggacagttagtgaaagcactgaagagcgctgccccagaaattgagacaacttgaagaaacaaaagacgatcccgagaatagattatcgaaaatttccctagagtcattcaataaatttaacagcaatactgtgattttattagaaaaagagaagaactctctgaacaaggttgaaggacagaaggaagaaaaagaaaaaaatgaagagacatctttgagtagttcagataggcctggggtagacaacttggaatctttgagtgattctttatatgatagcttctcttcctgtgccagtcaaggttcaaatgatgtataaaggacatctcttcccttagtgagctgggactggagcgcttaagaaatgatgggtggggggtggggggtgcaccgcttgatagagataacaataaactattgcagtaccagagccttccttgtcaaattcacagcaggcaacccaccagagcttatttctctgacagggcaataaagatagactccatttattgtgtttcaagaggattaagcgtaaacacatctatgatacagaatccttaattttgcactttttttgaatatttgtacagaagttgtaaattttttggaagagaaattatatttgtagcaaaaaaagacagcaataaatggaatcagtgccatgctcttgaaataatgtactaagtcttagaagttgatgataatatatattttttaaaatcccaactgaagtttttgtgaagttcgttgtcctggtcctcaaattgtttgtgggtacactctgtaaacctacaacagggcctgccaaaaaatcggagggttcctcctcatctccatctcacaaatctcaatttgatggaaatgttcattttagtgtaatttcagattcgttgccagagattcaggtgatagtaataagtgtcattctgcttctgctgaaaaatgaaaagggtcctgaagtgtggacactgattgggagtgtgacattgtatcagaaatgaccgaattctattcccaataccagtttttccttccagacatttctttagattgtcttttacttagtgcttctctatgatcctgaatattatttgatttttatcttcttgctctttttattaaaatctgggcactctaaaaatgaaaacaaatttctatttgcaatgttcacttttaaaaataaaattaatggtgctacgaagaattctttttaatatccttttttttctacaaagactgtttatatgtaaggataaattctattttaaaggttatgtgtattttttctagatgtgaactatttataattacttatgtacaggagcttgtaaactaggcccaatagaaatatttttaggatctatatggctactttagcacataattgtttctttaaagagtattgtatgatcagtgttatttggttaatttgtgcaatttgttttattttatcttaaatgaaaattatgtaaaatgtccttgtctttcagactttaaaaaatctttttgtttcctttctgaataaaagttatatcacatttgca

SEQ ID NO: 157992 - DNA, 2158 bp, Homo sapiens
  Payload ID: 10947
  Gene Symbol: NCKAP5
  Gene Name: NCK-associated protein 5
  ENST ID: ENST00000427594
  CDS Start-End: 1-344
gacagcttgagaaaagggactttggaaaaaggctgtctctagacagcagtcttgtggaatacatggactccaataaatacattgagcatctgctgactcagcttgaggagcaacacaggagtctctggagggagaagttggcagtggcccgactacagcgagaagttgcccaaagaacaagtgagggggccatgcatgagaagctgatacatgaactggaagaggagagacacttacgtcttcaaagcgagaagcggttgcaggaggtgaccctagagtctgaacgcaacagaattcagatgcgtagcttgcagcagcagttctccagaaggaggaaaatgtaacaagatgagaaaagctgtcaattgacctttggacaagcatcagcacagagctcttctcctcttctgcacttgttcccatgtctgactgttcgtcaactttgacctgtctcagaggctggctctcctgagtgccttgctcctcctgatgaatacagagggcaattttctgttgatttggaattgctatttccacatcatcagcaatatttctgcctgagacttttcataaaaattggggcctctcatctgctgctctgtgtgaatctaccagaagttgaagatggtaaagcaacattggttcaaggataaattttcttcaaattacaacagatggaagaaaagattttaaatgacctcttttaaaatgcctggataacataatatggatcatattttggtgtcagaagtttgtatcttagtgatctagcatgtaagctctcccttaagcaatgcaaaggaaagccaaaaccaattatgtagcaaactggaaagaaaggctgttttcggctccttgggcaaatactaacttactgaaagctgaacattactttattgttttgtatttctctttctgcctaataaatgatgaaatggtcacatgtttcttcttaaatttttttaaagaggtatatgtttttgagtagacaacgtgaaagtcatgttgcctattattcatccctgtagagaaaacagtattaacacagagtatagttccaatttcattgcaaagagcactatcttatttaatgggttgtccaggacctggtgtcagtgtacctctaagtagcttaataactctggttaagtaatttgacccttttgggtctcaatttgctcatctgtaacatgagtaaattcaattgcattatagttttataatgctttttatgctttttaaaaggccctgcattagaaatgaaatgtacttacttattgggtgaagtaataatttcacatttgtaaccaggccttcttgaagattctaacaatgagttttatgttgaggtcttggaggagactgtcttattgtccatgctgtaatcacagggaggctctgtgggactgggttttggccatgtctattttggttacttgactctggagaagttgagattagaaaactgccgagcctagatgaaaaatttctgttgggaacagccaaaattaaatactggggaacttggctggcaaaaggaagttaagatactctgctgtgaacatataaccaagattgctcttggctctgatgttgtccactttaggatttatttgaactggtttggtaaaaagtctaaacagagataactttatgacaaccagaattgttttcactttttaacaatttctctgaagaaagagccatcaataaaaataccaatgatttagtctctcctctaaatatgttttaataacatattataacttctgatacattactgttcctactccaacacattttttcctttaagaaaatgtgtgagatacagaataatgttttaaaactgaaaactgaattgatttctactttcaataataaatgttttattttttggtgtggtttatagaaaatccacttttcttacgtttatagtttagataagtttggacaatcattgaccctcatgtaactaccaccacaattaaaatacagaatattttcatgtcctggaccagttctctccctccctctttgttctcatttccctcccaagcccctggtaactactagtcttatttctctccttatagttttgccttttccagaaaggcttataaatgacgaagtcataaagtatggaactttttggtctggc

SEQ ID NO: 157993 - DNA, 4900 bp, Homo sapiens
  Payload ID: 10948
  Gene Symbol: NCKAP5L
  Gene Name: NCK-associated protein 5-like
  Uniprot ID: Q9HCH0
  ENST ID: ENST00000335999
  CDS Start-End: 203-4207
ggaggcggctccggcacccccctttctctgccccccgcccccaagccgcggccatggacctggcggatccggcctgccctggcccagctcaacacctgatttcggcaaggtgaccgttctggatgctagagtgagtgtgcccacctgcgtaagggggcagagacagcctgccggggcttctcttccttgttcccagggccagatgtcagaggccatggaccagccagctgggggtcctggaaacccaaggccaggagagggtgatgatggcagcatggagccaggcacctgccaggagcttctgcaccgactgcgggagctggaggcagagaactcggcacttgcccaggccaacgaaaaccagcgggagacttatgagcgctgtctggacgaggttgccaaccatgtggtacaggcgttgctgaaccagaaggacctgcgagaggagtgcatcaagctgaagaagagagtgtttgacctggaacggcagaaccagatgctgagtgccctgtttcagcagaaactccagctcacgacaggctcgctccctcagatcccactcactccactccagccaccatcagagccaccagcctccccctccctgagctccactgagggaccggctgccccgctgcctctggggcactgtgctgggcagagagaggtatgttgggagcagcagctgaggccaggaggcccaggccccccagccgccccacccccagcgctggatgccctatccccgttccttcggaagaaggcccagattctggaggtgctgagagccctggaagagactgaccccttgcttctctgctcacctgccaccccctggcggcctccaggccaggggcctggctccccagagcccatcaacggcgagctgtgtggcccgcctcagcctgaaccctcaccctgggcgccctgcctgctgctaggccctggcaacctgggaggcctgctgcactgggagcgcctcttggggggtctgggaggggaagaggacactgggcggccctggggtcctagcaggggacctcctcaggcccagggcaccagctctggcccaaactgtgccccaggcagcagctcctcctcctcttctgatgaggcaggtgaccccaatgaggcacccagccccgacaccctgctcggtgccctggcccgcagacagttgaacctgggccagctccttgaggacacagagtcttacctacaggccttcctggccggggctgcaggcccactcaatggggaccacccaggtcctgggcagtcatcctccccagaccaggcgcccccacagctgtctaagtccaaaggcctccccaagtcagcttggggtgggggtaccccagaggcccacaggccaggcttcggtgctacctcagagggccaggggcccctccccttccttagcatgttcatgggtgctggggatgccccactgggctctcggcctggccacccccattcctcatctcaggtgaaaagcaagctccaaattggccccccttctcctggggaagctcagggaccccttctgccctctccagctaggggtctcaagtttctaaagctgcctccaacctcggagaagagccccagcccaggaggcccgcagctcagtccccagctcccccggaactcgcgaatcccctgtcggaacagtggctcagacggcagcccctccccactgttggcccgaaggggtctgggtggaggagagctgtccccagagggggcgcaaggcctgcccaccagcccttcaccctgctacacaaccccagactccacacagctcagacccccgcagtcagccttgtccaccacgctgtccccaggcccagtggtgtctccctgctatgagaacattctggacctttctcggagcacctttagggggccttccccagagccacctccatccccactgcaggtgcccacctacccacagctaactctggaggtaccacaggcccctgaggtcctcagaagccctggagtaccccccagtccttgcctcccagaatcgtacccctatgggagcccccaagagaagagtttggacaaggcaggctcggagtctccccatcccggccgcaggaccccaggcaactcatccaagaagcccagccaggggtcaggacggcgacctggggatcctggcagcacacctctgcgggacagactggcggccctggggaagctgaagacaggccccgagggggccctgggctcagagaagaatggggtgccagccaggcctggcaccgaaaagacccggggacctgggaagtcaggggagagtgctggagacatggtgccctccatccacaggccactggagcagctagaagccaagggggggatacggggggcagtggccttgggcacaaacagcctgaagcagcaggaacctggacttatgggggatcccggggcccgagtctactcctctcactccatgggggcccgggtggacctggagcctgtctcaccaaggagctgcctcaccaaagtggagctggccaagagccggctggcaggggccctgtgcccccaggtaccccgtacccctgccaaagtgccaacctcagccccaagcctgggcaagcccaataagagccctcacagcagccccaccaagctcccttccaagtcaccaaccaaggtggtgcctcgacctggggctccgctagtcaccaaggagtcccccaagcctgacaaagggaagggccctccctgggcagactgtggtagtaccacggcccagtccacacccctagtacctggccccactgacccaagtcagggccctgaggggctggccccacactcagccatcgaggagaaggtgatgaagggcattgaggagaacgtgctgcggctccagggccaggagcgagcccctggcgccgaggtcaagcaccgcaacaccagcagcatcgccagctggttcggccttaagaagagcaagctgccagcgctgaaccgccgcacagaggccaccaagaacaaggagggggctggcgggggctccccgctccggagggaagtcaagatggaagcccggaagctggaggccgagagcctcaacatctccaagctgatggccaaggcggaagacctgcgtcgggcactggaagaggagaaggcctacctaagcagccgggcccggccacggcctggtggcccagccccagggcccaacacggggctggggcaggtgcagggccagctggctggcatgtaccaaggtgcagacaccttcatgcagcagctgctaaacagggtggatggcaaggagctgccatccaagagctggcgggagcccaagcctgagtacggggatttccagccggtgtcttctgaccccaagagcccctggccagcctgtgggccccggaatggcctggtgggccctcttcagggctgcggaaaacctcctggaaagccgagcagcgagccagggaggcgggaagagatgccctcggaggacagcctggccgagccagtgcccacctcacacttcacagcctgtggctccttgactcgaaccttggacagtggcattgggaccttcccacccccagaccatggtagcagtgggacccccagcaagaatcttcctaagaccaagccaccgcggctggatcccccacctggggtacccccagctcggcccccaccccttaccaaagtcccccgccgcgcccacacactggagcgggaggtgccaggcatagaggagctgctggtgagtgggcggcaccccagcatgccagccttccctgcactgctacccgctgctccgggccaccggggccatgagacctgtcctgatgatccctgtgaagacccaggccccacccctcctgtccagctggccaagaactggaccttccccaatactagggcagccggcagctcctcggaccctctcatgtgcccaccccgacaactggaggggctgcccaggacccccatggccctgcccgtggaccggaagcgaagccaggagcccagccgcccgtcccctacgccccagggcccacctttcgggggtagccgcacccccagcacttcggacatggccgaggaaggcagagtggccagcgggggccccccagggctggagacctcggagtctctcagtgactcactctacgactcgctgtcctcttgtgggagtcagggctgaggggctgcgccacgccacggccccgctggagctggggaccacagactggaccggctctcttcatgcccagcccccggagacggggacccctccctgaagggaccaaggaggcaggtggataagaaggtgaaaagggggtccctggcacaccccaccacccactgcttcggcggatgagatgaccgtgctcagctcagggagagaccccgcccttggtcccttctctcacccagagtaaggctcttcctggaagggactgggggttaaaggccactgtgtcgcagccctccagtccctacttcaggctgagccatcttgtggtgctgggcttcctgcccaccagccgtgccatctctgcccaacccggctgctcctctgccccgaagccctcgcgaggccctcctggaggcccccgtgctggtggagtttgggggccagggggacaagttgccttctctctctgccctggtcctccctgctgtctggatggtgctgccctcctctgccccatgcctttggggtctgttcgtccgtcttttttgttgttgtttttatatattgaagcgcctggcccagcccccagcccccagccccgcactgcggttaatttatgtgttgtttaaaatgcggctgctctgcttcctgcctctgcttctgccgtatccctaataaaatgtggaggccccctccctg

SEQ ID NO: 157994 - DNA, 4235 bp, Homo sapiens
  Payload ID: 10948
  Gene Symbol: NCKAP5L
  Gene Name: NCK-associated protein 5-like
  ENST ID: ENST00000433948
  CDS Start-End: 1-3013
cagctctggcccaaactgtgccccaggcagcagctcctcctcctcttctgatgaggcaggtgaccccaatgaggcacccagccccgacaccctgctcggtgccctggcccgcagacagttgaacctgggccagctccttgaggacacagagtcttacctacaggccttcctggccggggctgcaggcccactcaatggggaccacccaggtcctgggcagtcatcctccccagaccaggcgcccccacagctgtctaagtccaaaggcctccccaagtcagcttggggtgggggtaccccagaggcccacaggccaggcttcggtgctacctcagagggccaggggcccctccccttccttagcatgttcatgggtgctggggatgccccactgggctctcggcctggccacccccattcctcatctcaggtgaaaagcaagctccaaattggccccccttctcctggggaagctcagggaccccttctgccctctccagctaggggtctcaagtttctaaagctgcctccaacctcggagaagagccccagcccaggaggcccgcagctcagtccccagctcccccggaactcgcgaatcccctgtcggaacagtggctcagacggcagcccctccccactgttggcccgaaggggtctgggtggaggagagctgtccccagagggggcgcaaggcctgcccaccagcccttcaccctgctacacaaccccagactccacacagctcagacccccgcagtcagccttgtccaccacgctgtccccaggcccagtggtgtctccctgctatgagaacattctggacctttctcggagcacctttagggggccttccccagagccacctccatccccactgcaggtgcccacctacccacagctaactctggaggtaccacaggcccctgaggtcctcagaagccctggagtaccccccagtccttgcctcccagaatcgtacccctatgggagcccccaagagaagagtttggacaaggcaggctcggagtctccccatcccggccgcaggaccccaggcaactcatccaagaagcccagccaggggtcaggacggcgacctggggatcctggcagcacacctctgcgggacagactggcggccctggggaagctgaagacaggccccgagggggccctgggctcagagaagaatggggtgccagccaggcctggcaccgaaaagacccggggacctgggaagtcaggggagagtgctggagacatggtgccctccatccacaggccactggagcagctagaagccaagggggggatacggggggcagtggccttgggcacaaacagcctgaagcagcaggaacctggacttatgggggatcccggggcccgagtctactcctctcactccatgggggcccgggtggacctggagcctgtctcaccaaggagctgcctcaccaaagtggagctggccaagagccggctggcaggggccctgtgcccccaggtaccccgtacccctgccaaagtgccaacctcagccccaagcctgggcaagcccaataagagccctcacagcagccccaccaagctcccttccaagtcaccaaccaaggtggtgcctcgacctggggctccgctagtcaccaaggagtcccccaagcctgacaaagggaagggccctccctgggcagactgtggtagtaccacggcccagtccacacccctagtacctggccccactgacccaagtcagggccctgaggggctggccccacactcagccatcgaggagaaggtgatgaagggcattgaggagaacgtgctgcggctccagggccaggagcgagcccctggcgccgaggtcaagcaccgcaacaccagcagcatcgccagctggttcggccttaagaagagcaagctgccagcgctgaaccgccgcacagaggccaccaagaacaaggagggggctggcgggggctccccgctccggagggaagtcaagatggaagcccggaagctggaggccgagagcctcaacatctccaagctgatggccaaggcggaagacctgcgtcgggcactggaagaggagaaggcctacctaagcagccgggcccggccacggcctggtggcccagccccagggcccaacacggggctggggcaggtgcagggccagctggctggcatgtaccaaggtgcagacaccttcatgcagcagctgctaaacagggtggatggcaaggagctgccatccaagagctggcgggagcccaagcctgagtacggggatttccagccggtgtcttctgaccccaagagcccctggccagcctgtgggccccggaatggcctggtgggccctcttcagggctgcggaaaacctcctggaaagccgagcagcgagccagggaggcgggaagagatgccctcggaggacagcctggccgagccagtgcccacctcacacttcacagcctgtggctccttgactcgaaccttggacagtggcattgggaccttcccacccccagaccatggtagcagtgggacccccagcaagaatcttcctaagaccaagccaccgcggctggatcccccacctggggtacccccagctcggcccccaccccttaccaaagtcccccgccgcgcccacacactggagcgggaggtgccaggcatagaggagctgctggtgagtgggcggcaccccagcatgccagccttccctgcactgctacccgctgctccgggccaccggggccatgagacctgtcctgatgatccctgtgaagacccaggccccacccctcctgtccagctggccaagaactggaccttccccaatactagggcagccggcagctcctcggaccctctcatgtgcccaccccgacaactggaggggctgcccaggacccccatggtgagaattgcagcagaggaaagggaaaggactcgggagcaggagggagtgatgtggggagaccagtttctccagtaaggtacggcctgtgtgtcgcacagtctcagtgctgcaccctctgggaggaggacccctgggatgccctgtgagcggccctccccactgccctccttgcacttctctcgtggggaaaggtttctgtccctccccagaaccttgtaggactgttctcagttgtacctccagcctgtttcctctgaagtataccccaccttgggccccctctggagcagccccccatcaggtgcacagacgcccctcagagctcagtgcctctgaggctgggccgaaaggtggagaggagcttcctcccgagctgcccctcctttcccaggccctgcccgtggaccggaagcgaagccaggagcccagccgcccgtcccctacgccccagggcccacctttcgggggtagccgcacccccagcacttcggacatggccgaggaaggcagagtggccagcgggggccccccagggctggagacctcggagtctctcagtgactcactctacgactcgctgtcctcttgtgggagtcagggctgaggggctgcgccacgccacggccccgctggagctggggaccacagactggaccggctctcttcatgcccagcccccggagacggggacccctccctgaagggaccaaggaggcaggtggataagaaggtgaaaagggggtccctggcacaccccaccacccactgcttcggcggatgagatgaccgtgctcagctcagggagagaccccgcccttggtcccttctctcacccagagtaaggctcttcctggaagggactgggggttaaaggccactgtgtcgcagccctccagtccctacttcaggctgagccatcttgtggtgctgggcttcctgcccaccagccgtgccatctctgcccaacccggctgctcctctgccccgaagccctcgcgaggccctcctggaggcccccgtgctggtggagtttgggggccagggggacaagttgccttctctctctgccctggtcctccctgctgtctggatggtgctgccctcctctgccccatgcctttggggtctgttcgtccgtcttttttgttgttgtttttatatattgaagcgcctggcccagcccccagcccccagccccgcactgcggttaatttatgtgttgtttaaaatgcggctgctctgcttcctgcctctgcttctgccgtatccctaataaaatgtggaggccccctccctg

SEQ ID NO: 157995 - DNA, 5134 bp, Homo sapiens
  Payload ID: 10949
  Gene Symbol: NDC1
  Gene Name: NDC1 transmembrane nucleoporin
  Uniprot ID: Q9BTX1
  ENST ID: ENST00000371429
  CDS Start-End: 600-2624
gcgtacctattgtggagaagaccaccacatcctttggtttcacttttaggtgacttataaagtaatagggagaaatgagggcagatcattttgctagctctaactgaagaattccagtcaatcaatactgtggctgttatcggctttataaaagactactattcccagcatgcctcaaggcacctccaggaagaccttgactcccagcattctgtactttggaactccgagtcccagaatgcaacattcctcctacttcctctcagggggccgtcgagactacagttcccagcatgcagcgccgccacctgcttctggcgccccgctggaccctgcttcgaagggaccgtttggtcgccagagggcggttcctggagttacagccgcgtttgcgggacgtgtctgcgcggcagtcctggcctgttgagcttgtccagacgaagcctcgcagggatgggttggagcctgggccgggcttcgctcaggcagcgtttgaggcagacccagcagggtcctcctggggccttcctgcctttgaactgcggtggcgggcgggcgcacggtctcctgtacgccctagactaggggccgccatctccatggccacggccgtgagccggccctgcgccggcaggtcgcgggacatactgtggcgcgttttgggctggaggatagttgcaagtattgtttggtcagtgctatttctacccatctgcaccacagtatttataattttcagcaggattgatttgtttcatcctatacagtggctgtctgattctttcagtgacctgtatagttcctatgtaatcttttacttcctgctgctgtcagtggtaataataataataagtattttcaatgtggagttctatgcagttgtgccttctattccttgctccagactagctctgatagggaagatcattcatcctcagcaactcatgcactcatttattcatgctgcaatgggaatggtgatggcctggtgtgctgcagtgataacccagggccagtacagctttcttgtggttccctgcactggtactaacagctttggtagccctgctgcgcaaacctgcttaaatgaatatcatctttttttcctactgactggagcatttatgggctatagctatagcctcctgtattttgttaacaacatgaactatcttccatttcccatcatacagcaatacaagttcttgcgttttaggagatctctgctcttattagttaaacacagttgtgtggaatcactgttcctggttagaaatttctgcattttatattattttcttggctatattcccaaagcttggattagcactgctatgaaccttcacatagatgagcaggttcataggccacttgacacagtgagtggcctcttaaatctctcgttactctaccatgtctggctgtgtggtgtctttctcctgacgacttggtatgtctcatggatactcttcaaaatctatgccacagaggctcatgtgtttcctgttcaaccaccatttgcagaagggtcagatgagtgccttccaaaagtgttaaatagcaatcctccccccatcataaagtatttagccttgcaggacctgatgttgctttctcaatattctccttcacgaagacaagaagttttcagcctcagccaaccaggtggacatccccacaattggacagccatttcaagggagtgtttgaatcttttaaatggtatgactcagaaactgattctctatcaagaagctgctgctacgaatgggagagtgtcttcatcttacccagtggaacctaagaaattaaattctccagaagaaactgcttttcagacaccaaaatctagccagatgcctcggccttcagtgccaccattagttaaaacatcactgttttcttcaaaattatctacacctgatgttgtgagcccatttgggaccccatttggctctagtgtaatgaatcggatggctggaatttttgatgtaaacacctgctatgggtcaccgcaaagtcctcagctaataagaagggggccaagattgtggacatcagcttctgatcagcaaatgactgaattttctaatccttctccatctacctctattagtgctgagggtaagacaatgagacaacccagtgtgatttattcatggattcagaataaacgtgaacagattaagaatttcttgtcaaaacgggtgctgataatgtattttttcagtaagcacccagaggcctccattcaggctgttttttcagatgcccaaatgcatatttgggcattagaaggtctgtcgcacttagtagcagcatcatttacagaggatagatttggagttgtccagacgacactaccagctatccttaatactttgttgacactgcaagaggcagtcgacaagtactttaagcttcctcatgcttccagtaaaccaccccggatttcaggaagccttgtggacacttcatataaaacattaagatttgcattcagagcatcactgaaaactgccatctatcgaataactactacatttggtgaacatctgaatgctgtgcaagcatctgcagaacatcagaaaagacttcaacagttcttggagttcaaagaatagttaagtaatataaactgtgttcattacactgctgatacaactacagatgggacagtaaatgttcagcattcttggatcagaagaaaacggactaattagatgcttcctttgtcgtggtggttgctttgaaaactatactttaatgggagaaatcatggaaagaaattctcaacagaataactgaaaactgccttttctgtaccgattgctttttgtgtgtgtggtataataaaatctttattcaattttacagaagcattgatggcagtcgaaatgtctctagctcatataacttaatagtaataactaaaaaacttttagaatttacttttgaaaggagggaagccagttctgaaatgagtataggttgatttcatagtcttcttaattaagagtttagctctttgtaaactcaaaatacataaactttttaagtgtagtttcatttactgaaggataaaaatggtaacagtgcagcaatattcacaaaaaatattgtctaacggacatattttgttaatctgttaggttgggtttttgtttccagggacaaattaaatttgtatgattacccaaaaaagggtctcagtttacagatgctaactctatataaaggaatgtggaaaaactcagttcttaagttacaagattaaaaattcacatttggtctttaagaaacaattgactgacatctatgaatttattttgtatcatgctagtaaacacgaagtattaatgtatgggtattttcccagctagttttgctttctttttctggagcaaaacattaagtgattgcagagtttttcaagcaagagaaaaaggtttgcaaaaaaacccaggaaatgttcccttttttccccaccattcatcttcattagatcaaattctgtgaaacttgtctggtctctcaaagggagcagcctctgtagtgttaaatggctaattaaaataggaagatctttatagccagaaacaacttagtcatcaaatagcaagtgaaaccaaaacgtcagagggattactgtacttggaagtatgttgtgtgtcccaaatgtgaacgaagtattgttagaatttattagatcagcttctttggagatcaaagattggaaatcctagtcatagatattcactggactggctttggactgaaatgctcctttgtaattcttttcctattgtcttttccttctagtgtcccaaaatattttctttaaagtcagcacagtactgtatatgaatctttaatgtggtatcatatatgtctacttttgtctgattcatcgatgtattatatctttataattgaatattttagctccgggtcctgttgccccttcaagcagtacatgccaaattataaataggtgctactggccttgagcatatcactgtgggacagttccccaattgtcaagtgtttagatatgtagactattgccatttgtttttttgttttggttttgctttgtgtctgaagctgaattgatttcttttttttgaatgtgaaagttgaatttcaaacgtagtcatttcttacagatggccaagacagaaaattgtggctaggttgactgagaactgttgtcttccatgtattaacacaattaagctttttatattccactctctgtgctgaccctggctgaggcattttgggagacaaggactctgaatcttctgcttccattaaagaagaactgtgatattcaacattggatttctgagaataaagataggatgattcctttgaactttgacttacttgtataaaatgtccagctaggttaggtttttgccatttcctatatactttgggtaaagctacatttgatgagcaatgtgaatgtttctgagaatgttcattcctgttttctcttaagagaatgtgctgtgtactaaatacaggccacatagtgtctgcctgttgaagatctggaaactgcctccccagatctgtattgtatttggtaggtaagggggtcagtttctttttctcattgtgtgttgataatctacacaccatctgttggaaccagggtgttattatggggaactcctcctgtgtactaggaggaggaccttagggagaccaagaggagagaagcatttcctttgatgaagtcacatcctgtctatgagcccactaatgctgtaacattggcctgaaagagagtgttctttaaaagcctttctcggctgttagtataaaaacatgatggtatcagctcttagcatgtttgcttgacccttatggaaggtataaatccacagaacttccttcccagagaactgggaaattgtcctagaaataaaccttgtacagttgagtggacatggataagcaacaatttgttactttgcaggatttgttccttggtaattgtttggtgtgtcatcctgtaaatattcatgatagtctgtttatatccttttgtatatcgttgatactggattgggtagaaaaataaattggcaatttaaaaaaatggaacagttaattgaaa

SEQ ID NO: 157996 - DNA, 2172 bp, Homo sapiens
  Payload ID: 10950
  Gene Symbol: NDC80
  Gene Name: NDC80 kinetochore complex component
  Uniprot ID: O14777
  ENST ID: ENST00000261597
  CDS Start-End: 183-2111
actgcgcgcgtcgtgcgtaatgacgtcagcgccggcggagaatttcaaattcgaacggctttggcgggccgaggaaggacctggtgttttgatgaccgctgtcctgtctagcagatacttgcacggtttacagaaattcggtccctgggtcgtgtcaggaaactggaaaaaaggtcataagcatgaagcgcagttcagtttccagcggtggtgctggccgcctctccatgcaggagttaagatcccaggatgtaaataaacaaggcctctatacccctcaaaccaaagagaaaccaacctttggaaagttgagtataaacaaaccgacatctgaaagaaaagtctcgctatttggcaaaagaactagtggacatggatcccggaatagtcaacttggtatattttccagttctgagaaaatcaaggacccgagaccacttaatgacaaagcattcattcagcagtgtattcgacaactctgtgagtttcttacagaaaatggttatgcacataatgtgtccatgaaatctctacaagctccctctgttaaagacttcctgaagatcttcacatttctttatggcttcctgtgcccctcatacgaacttcctgacacaaagtttgaagaagaggttccaagaatctttaaagaccttgggtatccttttgcactatccaaaagctccatgtacacagtgggggctcctcatacatggcctcacattgtggcagccttagtttggctaatagactgcatcaagatacatactgccatgaaagaaagctcacctttatttgatgatgggcagccttggggagaagaaactgaagatggaattatgcataataagttgtttttggactacaccataaaatgctatgagagttttatgagtggtgccgacagctttgatgagatgaatgcagagctgcagtcaaaactgaaggatttatttaatgtggatgcttttaagctggaatcattagaagcaaaaaacagagcattgaatgaacagattgcaagattggaacaagaaagagaaaaagaaccgaatcgtctagagtcgttgagaaaactgaaggcttccttacaaggagatgttcaaaagtatcaggcatacatgagcaatttggagtctcattcagccattcttgaccagaaattaaatggtctcaatgaggaaattgctagagtagaactagaatgtgaaacaataaaacaggagaacactcgactacagaatatcattgacaaccagaagtactcagttgcagacattgagcgaataaatcatgaaagaaatgaattgcagcagactattaataaattaaccaaggacctggaagctgaacaacagaagttgtggaatgaggagttaaaatatgccagaggcaaagaagcgattgaaacacaattagcagagtatcacaaattggctagaaaattaaaacttattcctaaaggtgctgagaattccaaaggttatgactttgaaattaagtttaatcccgaggctggtgccaactgccttgtcaaatacagggctcaagtttatgtacctcttaaggaactcctgaatgaaactgaagaagaaattaataaagccctaaataaaaaaatgggtttggaggatactttagaacaattgaatgcaatgataacagaaagcaagagaagtgtgagaactctgaaagaagaagttcaaaagctggatgatctttaccaacaaaaaattaaggaagcagaggaagaggatgaaaaatgtgccagtgagcttgagtccttggagaaacacaagcacctgctagaaagtactgttaaccaggggctcagtgaagctatgaatgaattagatgctgttcagcgggaataccaactagttgtgcaaaccacgactgaagaaagacgaaaagtgggaaataacttgcaacgtctgttagagatggttgctacacatgttgggtctgtagagaaacatcttgaggagcagattgctaaagttgatagagaatatgaagaatgcatgtcagaagatctctcggaaaatattaaagagattagagataagtatgagaagaaagctactctaattaagtcttctgaagaatgaagataaaatgttgatcatgtatatatatccatagtgaataaaattgtctcagtaaagtgta

SEQ ID NO: 157997 - DNA, 442 bp, Homo sapiens
  Payload ID: 10950
  Gene Symbol: NDC80
  Gene Name: NDC80 kinetochore complex component
  ENST ID: ENST00000574096
  CDS Start-End: 1-99
acgactgaagaaagacgaaaagtgggaaataacttgcaacgtctgttagagatggttgctacacatgttgggtctgtagagaggcggatgctggggtgaagcagccgcatgctaaggaacaccaaggactgccaggagccgccagcaactggggagagacgaagaaggattcttccctagagccttcagagagaccatggccctgctgacgtcttgatttcaaacttccggcctccagagctgaaagagtacatttctgttgttttaagccacctagtttgtggcaatttgttacagtatcagtatttgaaatcgcaaaaaaatcaacaaaaacaacaagaaaaaataatgtggcatgttagtttcccattgctaatgtaacaaattaccaccaacctaatggcttaaaacaacacaaatttgtcatcttagagttattaag

SEQ ID NO: 157998 - DNA, 553 bp, Homo sapiens
  Payload ID: 10950
  Gene Symbol: NDC80
  Gene Name: NDC80 kinetochore complex component
  ENST ID: ENST00000575515
  CDS Start-End: 129-553
acggctttggcgggccgaggaaggacctggtgttttgatgaccgctgtcctgtctagcagatacttgcacggtttacagaaattcggtccctgggtcgtgtcaggaaactggaaaaaaggtcataagcatgaagcgcagttcagtttccagcggtggtgctggccgcctctccatgcaggagttaagatcccaggatgtaaataaacaaggcctctatacccctcaaaccaaagagaaaccaacctttggaaagttgagtataaacaaaccgacatctgaaagaaaagtctcgctatttggcaaaagatggagtctcgctctgtcgcccaggctggaatgcagtggcgcgatctcagctcactgcaacctctgcctcgccagttcaagcaattctcctgcctcagcctcccgagtagctgggattacagaactagtggacatggatcccggaatagtcaacttggtatattttccagttctgagaaaatcaaggacccgagaccacttaatgacaaagcattcattcagcagtgtattcgacaactctgtgag

SEQ ID NO: 157999 - DNA, 1075 bp, Homo sapiens
  Payload ID: 10950
  Gene Symbol: NDC80
  Gene Name: NDC80 kinetochore complex component
  ENST ID: ENST00000576274
  CDS Start-End: 1-507
tgtattcgacaactctgtgagtttcttacagaaaatggttatgcacataatgtgtccatgaaatctctacaagctccctctgttaaagacttcctgaagatcttcacatttctttatggcttcctgtgcccctcatacgaacttcctgacacaaagtttgaagaagaggttccaagaatctttaaagaccttgggtatccttttgcactatccaaaagctccatgtacacagtgggggctcctcatacatggcctcacattgtggcagccttagtttggctaatagactgcatcaagagtcttgctttgttgcccaggctggaatgcagtggcatgatctcagctcactacaatctccacctcccaggttcaagcaattctcatgcctcagcctcccaagtagctaggattacaggtgcccaccaccacgcccagctaatttttgtattttcagtagagacagcgtgtcaccatgttggccaggctgatcttgaactcctgacctaaggtgatccacctgcctcagcctcccaaagtgctgggattacaagtgtgagccaccatgcctggccatgtagttttcttaatatcaaacaacatattttttatcaatgccatgtgttttgttactatgatgaacagactctctttttttaattctatttccatggtgattattactaaaagagttttttgtgtttactacccttattgaattgctttattacaactactgttctcagttgatttctattactaaccactgtttttaaattaaatatttttcattgtatcgtttagtatgatatattcagtagaagataatgttttgcatgttgaagtttattcacttttatcaaagaatgatctttgaaggttatcctatgcttttgcaggatgtattgagattattcttgttatcttgacctattgatctaatatgttgatttcctaatgacctctatttgttcattgtttattattcatttgttatgctcctaaattgtttgttcatgctttgtaaataaactttgatttcctatttcactatgcctccttgcacagaacttggcac

SEQ ID NO: 158000 - DNA, 8030 bp, Homo sapiens
  Payload ID: 10951
  Gene Symbol: NDST1
  Gene Name: N-deacetylase/N-sulfotransferase (heparan glucosaminyl) 1
  Uniprot ID: P52848
  ENST ID: ENST00000261797
  CDS Start-End: 503-3151
aacagtaatgccatttttcctggccctgggattaggtgcagccgtgttaaggagaggacattcgagagggcgtggcgaagtgaagaggaacctcacgccactgcctggagctccgccttagccccgtgggccccacggagtgagcggcatgcagcacccccgggcctgtccagtgtcctctggcctgctgccctgcacccccagaaggccctgacgccctggggcacttctgctctgcacaggaccacgcgggggtttgccatggtgacataaaggggcgcggaggaaggaaggagcgtgaccagcctgtggactgcgcccctggctgggaggaaggactgggggcccagatcctccactcccagtgccccacaagggcgtcgcttcctaagtctctgtgaatttgttggtcagtggacgattctcgtgtctcctcctgtgtggggccttggggtagccagggcaggccgggcctccggtggccaaggtctcggaggccaggatgcctgccctggcatgcctccggaggctgtgtcggcacgtgtccccgcaggctgtccttttcctgctgttcatcttctgcctgttcagcgttttcatctcggcctactacctatatggctggaagcgaggcctggagccctcggcggatgcccccgagcctgactgcggggacccgccgcctgtggcccccagtcgcctgctgccactcaagcctgtgcaggcagccaccccttcccgcacagacccgttggtgctggtctttgtggagagcctctactcgcaactgggccaggaggtggtggccatcctggagtccagccgcttcaaataccgcacagagattgcgccgggcaagggtgacatgcccacgctcactgacaagggccgtggccgcttcgccctcatcatctatgagaacatcctcaagtatgtcaacctggacgcctggaaccgggagctgctggacaagtactgtgtggcctacggcgtgggcatcattggcttcttcaaggccaatgagaacagcctgctgagtgcgcagctcaagggcttccccctgttcctgcactcaaacctgggcctgaaggactgcagcatcaaccccaagtccccgctgctctacgtgacgcgacctagcgaggtggagaaaggtgtgctccccggcgaggactggacggttttccagtcaaatcactccacctatgagccagtgctgctggccaagacgcgctcgtctgagtccatcccacacctgggcgcagacgccggcctgcatgctgcactgcacgccactgtggtccaggacctgggcctgcacgacggcatccagcgcgtgctgtttggcaacaacctgaacttctggctgcacaagcttgtcttcgtggatgccgtggccttcctcacggggaagcgcctctccctgccattggaccgctacatcctggtggacattgatgacatcttcgtgggcaaggagggcacacgcatgaaggtggaggacgtgaaggccctgtttgacacacagaacgaactacgcgcacacatcccaaacttcaccttcaacctgggctactcagggaaattcttccacacaggtaccaatgctgaggacgctggggatgatctgctgctgtcgtatgtgaaggagttctggtggttcccccacatgtggagccacatgcagccccaccttttccacaaccagtccgtgttggccgagcagatggccttgaacaagaagttcgctgtcgagcatggcattcccacagacatggggtatgcagtggcgccccaccactcgggcgtgtaccccgtgcacgtgcagctgtacgaggcttggaagcaggtgtggagcatccgcgtgaccagcacggaggagtacccccacctgaagccagcccgctaccgccgtggcttcatccacaatggcatcatggttctcccacggcagacctgcggcctcttcacacacaccatcttctacaacgagtaccctggcggctccagtgagctggacaagatcatcaacgggggcgagctcttcctcaccgtgctcctcaatcctatcagcatcttcatgacgcacctgtccaactatgggaatgaccgcctgggcctgtacaccttcaagcacctggtgcgcttcctgcactcctggacgaacctccggctgcagacactgccccctgtgcagttggcgcagaagtacttccagatcttctccgaggagaaggacccgctctggcaggacccctgcgaggacaaacgtcacaaagacatctggtccaaggagaagacgtgtgaccgcttcccaaagctcctcatcatcggcccccagaaaacaggcaccactgccctctacctgttcctgggcatgcaccctgacctaagcagcaactaccccagctctgagacctttgaggagatccagttttttaatggccacaactatcacaaaggcatcgactggtacatggagttcttccccatcccttccaacaccacctccgacttctactttgagaaaagcgccaactactttgattcagaagtggcgccccggcgggcagcagccctcttgcccaaagccaaggtcctgaccatcctcatcaaccccgcggaccgggcctattcctggtaccagcaccagcgagcccatgacgacccagtggccctaaagtacaccttccatgaggtgattaccgccggctctgacgcatcctcgaagctgcgtgccctccagaaccgctgcctggtccctggctggtacgccacccacatcgagcgctggctcagtgcctatcacgccaaccagattctggtcttggatggcaaactgcttcgcacagaacctgccaaagtgatggacatggtgcagaagttccttggggtgaccaacaccattgactaccacaaaaccttggcgtttgatccaaagaaaggattttggtgccaactgcttgaaggaggaaaaaccaagtgtctgggcaaaagcaagggccggaaatatcccgagatggacttggattcccgagccttcctgaaggactattaccgggaccacaacatcgagctctccaagctgctgtataagatgggccagacacttcccacttggctacgagaggacctccagaacaccaggtagccgtggccaccacagccagactgaacgtttgtgaaagctgggacatcccaccacacgctgagccagacctgcagagtgggaagctggaccagggcagctgcgcacttatgagcaatactctgtggaggtctggtggggctgggggagcacccaggcggatctgcaagcacctcggagcacccaccgctgggtctgcggcctaagggacctccctcgccagcagaggtccattccgttcccagctgctcctggggaggccgcttcctggtaggagggagtccacgagactcttttctgtccctcactgtgttccgccgactgtcccctctcgtcacccatcactccctgcttccgcagggcgcccctcagtattcgctgccatatgtccctgtcctccaggctgtaggggaggagagcctggccgggggagacagactggacatttccctgtttcgagccaggctcttccaaggggccagctgggtccccggagtcagtcctaggctggatgggagggtggccccctcaagaggactcccagcctccacatctggttcctaccttcacatctcaccctcccgttctggggaagaatttctggttcctacagtatccactccatcctcaaggcttcccgcagggccttggggcactgccttgccatcgggcccagttctccgggccccacctgcacccctttcttccccctgggatatgatgtgtggtgtttcctgtggtaaaagactgaggcaggccaggggtctgccagtaacatgttcccatgtacagacacggtccccacaccctcccagcctcaggcccaggcagacatgggcgagctggtgagactgccagccacggctttgcttagccacctgtggccgagggctctcagagacccccttaacctcccaaatactaagaagctaaaatattttaatattttgtttttttttttcttggtgccagagtttataccctgggtgctggggtcgcactgtgttatatatatatatatatatatataatgtgtatatatatatattctattttttttggttgggttcgtttttaattcagtcctacaaaatggtggtaagccccagtctcaggggtcaccctgtcttagagctagagatgaggtggcagggagggaggctgtgtcctcagtggcctggggctgagcagaccttaggaaggggccctccccagtgccgtggctgctctggggctaccccaggtgaacagaggtggtgagatgcgcagggaagaccagctctctccaggacatcgggctgcgtgaagtccagtgaccctgaggggattttggccaaaggaaacagccagggctgggctaggagagctggggtcaaaagctgccccacccactctccctcacatggtgctaggctgggagctgccctgagagctgggatgcccaccaaggcccacagaactgtctccaggcccttgtagacagtgggatctctgggctgatttctggttggggtctgctcctaccccaccccatttaacaatgtgaagtgactgaggctggggtgcctctccctggccccctccaactgccaaattctgcttccctctgaaccccaggaaatactttctggagaggcttgtcttgttcagaagactctagcatcttggggctggaaggtcctttgacgggtatgaaacaggtccagaaaggggaggtggcctgcttggccgacgtcatggagccagctgggagcagggctgagcgttgaacccgaggctcccggttccaagtcccatcgtgctcctcttccaatgccacactgcctctgagcccatccttgggaccctactctgtgccaggttcctgtcccttcctccgtcacagcatggtcattccaggatatggggacaaaccactccttcccagccagggtgcctttgagccttctcattccgaggtctgcgtttgcatccctgtcgtgttctccctcgaggggtccttccccagcctgtgggggcctgggtctgttctgagctgattcccttttctccagttctctgctgggatgaagaaagttggacactcagtgggaccagctgcaggtggtttcactgtgtacacagcagtgtccccatcatgcctctcaatggggcctgcaagcctgggaacttgggcatcgttgggccagcaggatgagcagcaaagggtctgaggacagggtggcatgtctgcttgtgtgctcatgaagacatgcccacgccatggagccaggggcttatagagaggggcagtgacttccagagtcccatccgtcagtgaggggactgggctgcgggatgggtgaggatcttacagctcccaggttcggaaatctaccctctaggcctggaggcctctctcgcagagcatggaaggcaggagaggtgggctggcctagggcaggagctccacttctctctgcctctggctatgggaaggagcaggcggttggaaatcctgtgacagcagagatcttctggatttttgcctggacccttctgcaagcctggagactggacctgccacatgttccaagtctgtctgcctaggtcactgctgccacttctcctcccactaacagacctttcttgaagacccactaggtccagacactgccgggacttgcaggtatggggggtagaaggagaggcagataagctgcctggggggctgttagctaatgggtacaaggacaccccctcccgagaagagaagccacagatgagtgggccagcgaggccagtcttcaatgtccactaattcactctaagcatttggccaaaaaaaggagagagaaataactgaaattgttcaggtggctccatcgtctattctgtggtcccctccatgagcctttgccccagggtgggtgcaggtgcgagtgtcacctgcagctgcctcagtcattcagagttccagagccttctgtggtggagcatcctgctgcttggaggatgagtctgaagtttaaaaatgggccttttctgagcccccctgatgagcagtcagtgcttctgggcccagctaaggaagccatctgttcccagcagaggagagctgctgcgctgacctgcagaggttggtggtcccagcacagagctgtgcccatgggcttgttagtgggaaaagcaaatacaacaatgttttaccaaacatttaattatgaatgcccactccccagcatctagatctaaaattattaacattttgccacattctttttctctctctgtgtatgtatatgttttctctgtcctaatttaaaagtacattgcaaacatcatgaaacttgatccctgaaagcttcagcctgcatctcctaagagttagggcattgtcctacacattggcccagtatcacagccaagacgagaagtcatttcccagcgatgtctgctatctaatctgtattcaaatccccccaattgtctcccaggtaacttatgtgtctggttttggaatcagcatccagtcacggtgcacacattgcattttctaactatgtttttaaaacctctttgaatgctgaaaggtcttccctcagctcactttgagtttttaaatgacattgtttttgaggccctaggcctgctgtctttttgaagccccacattctgaatttgtcagattgtttgctcatggtgtcgcataaccacttcttctatcccctgtactttcaaggataatttaggctacatgagattttgccttttgtgctgacttgacagcttcacttctgcctaagatgcgcctccactgtcacctgtaccaagtgccaaaacagcagaggggccagttagagcaagagctctgggggggccggaaagtctccctggagaaggccgtaatatctgggccttggaaggaaggacacagggctctggaaggaggaggctgcatgcctgaaggctgggccttcgaccctggggatgggccacagggcaccaaacacatcatatgtctctctctttctattttggggtcccagggttttcatttcctggagacccgtggtctgtgtgcactggagcagagccaggctctcagttgcagcagggaaaagcctacatggggaactgcctcccgcaagctgtggtgtgagaagagccctggctggcagcaggagctgtgaagtttcatcccagccgggtgcatttagtagctgcctgaccatcttcctcccaggccctcagtttcttcatctgtagaatgagcagataggggccacagcagggattttcacacatcaaaggaggcagcctctgctctagttgatgtgaggatgagggggcggcctagaccccctgctgcccaggccgttgaggcaacactgggttcctggcttgacagctgtgggctggctgcccttgccagctcagacggctggcgagttttcagcttccctaagggactggcatagggttttgtggggtcaatgccaggaacctgggggaaactggatgcgttttatcctaagaagttcatccctcctgctcttactgtttccggccctggaggagaatgagggaggagagggttttctatgactgtgttagcttttattattagcaagagggctccttttgtaatttgtgcatgaaattcatgtcatttcctgggagaggagagggccgactggagagggtggggggcacactggggaagcaggcagaggtttccttcccttgtaggggggtggggagagtggggagagggggtgctatccagttcgcctgatgagggctctcgaaccagccgttttgggttgtgttaaaggtgagaccttcctccattaatgtacaatctcgaactaactgctaataaagtggggttctgtttgta

SEQ ID NO: 158001 - DNA, 576 bp, Homo sapiens
  Payload ID: 10951
  Gene Symbol: NDST1
  Gene Name: N-deacetylase/N-sulfotransferase (heparan glucosaminyl) 1
  ENST ID: ENST00000519157
  CDS Start-End: 100-576
gttaaccctggcccgggccggagcccggaggcgcacgcacggcccgggggacccaggcgtcccgctcctcgccgggagcgccccttcccccgagccaggatgcctgccctggcatgcctccggaggctgtgtcggcacgtgtccccgcaggctgtccttttcctgctgttcatcttctgcctgttcagcgttttcatctcggcctactacctatatggctggaagcgaggcctggagccctcggcggatgcccccgagcctgactgcggggacccgccgcctgtggcccccagtcgcctgctgccactcaagcctgtgcaggcagccaccccttcccgcacagacccgttggtgctggtctttgtggagagcctctactcgcaactgggccaggaggtggtggccatcctggagtccagccgcttcaaataccgcacagagattgcgccgggcaagggtgacatgcccacgctcactgacaagggccgtggccgcttcgccctcatcatctatgagaacatcctcaagtatgtcaacctggacgcctggaaccgggagctgctggacaagtactgt

SEQ ID NO: 158002 - DNA, 3449 bp, Homo sapiens
  Payload ID: 10951
  Gene Symbol: NDST1
  Gene Name: N-deacetylase/N-sulfotransferase (heparan glucosaminyl) 1
  ENST ID: ENST00000523767
  CDS Start-End: 590-3067
gattcattctgttctcccggccccgaagggatgacgaggccctgagcaccgatccatgcccacgcctgtggatgaaagctgatatgaggaggcccaggggacctgagggagtcggctccctctgctacctcctgtctcttgagtatcctgtgatcgtgacctgtccattcccaccagtgcaggggtccatgagcccccaaagccttagccccgtgggccccacggagtgagcggcatgcagcacccccgggcctgtccagtgtcctctggcctgctgccctgcacccccagaaggccctgacgccctggggcacttctgctctgcacaggaccacgcgggggtttgccatggtgacataaaggggcgcggaggaaggaaggagcgtgaccagcctgtggactgcgcccctggctgggaggaaggactgggggcccagatcctccactcccagtgccccacaagggcgtcgcttcctaagtctctgtgaatttgttggtcagtggacgattctcgtgtctcctcctgtgtggggccttggggtagccagggcaggccgggcctccggtggccaaggtctcggaggccaggatgcctgccctggcatgcctccggaggctgtgtcggcacgtgtccccgcaggctgtccttttcctgctgttcatcttctgcctgttcagcgttttcatctcggcctactacctatatggctggaagcgaggcctggagccctcggcggatgcccccgagcctgactgcggggacccgccgcctgtggcccccagtcgcctgctgccactcaagcctgtgcaggcagccaccccttcccgcacagacccgttggtgctggtctttgtggagagcctctactcgcaactgggccaggaggtggtggccatcctggagtccagccgcttcaaataccgcacagagattgcgccgggcaagggtgacatgcccacgctcactgacaagggccgtggccgcttcgccctcatcatctatgagaacatcctcaagtatgtcaacctggacgcctggaaccgggagctgctggacaagtactgtgtggcctacggcgtgggcatcattggcttcttcaaggccaatgagaacagcctgctgagtgcgcagctcaagggcttccccctgttcctgcactcaaacctgggcctgaaggactgcagcatcaaccccaagtccccgctgctctacgtgacgcgacctagcgaggtggagaaaggtgtgctccccggcgaggactggacggttttccagtcaaatcactccacctatgagccagtgctgctggccaagacgcgctcgtctgagtccatcccacacctgggcgcagacgccggcctgcatgctgcactgcacgccactgtggtccaggacctgggcctgcacgacggcatccagcgcgtgctgtttggcaacaacctgaacttctggctgcacaagcttgtcttcgtggatgccgtggccttcctcacggggaagcgcctctccctgccattggaccgctacatcctggtggacattgatgacatcttcgtgggcaaggagggcacacgcatgaaggtggaggacgtgaaggccctgtttgacacacagaacgaactacgcgcacacatcccaaacttcaccttcaacctgggctactcagggaaattcttccacacaggtaccaatgctgaggacgctggggatgatctgctgctgtcgtatgtgaaggagttctggtggttcccccacatgtggagccacatgcagccccaccttttccacaaccagtccgtgttggccgagcagatggccttgaacaagaagttcgctgtcgagcatggcattcccacagacatggggtatgcagtggcgccccaccactcgggcgtgtaccccgtgcacgtgcagctgtacgaggcttggaagcaggtgtggagcatccgcgtgaccagcacggaggagtacccccacctgaagccagcccgctaccgccgtggcttcatccacaatggcatcatggttctcccacggcagacctgcggcctcttcacacacaccatcttctacaacgagtaccctggcggctccagtgagctggacaagatcatcaacgggggcgagctcttcctcaccgtgctcctcaatcctatcagcatcttcatgacgcacctgtccaactatgggaatgaccgcctgggcctgtacaccttcaagcacctggtgcgcttcctgcactcctggacgaacctccggctgcagacactgccccctgtgcagttggcgcagaagtacttccagatcttctccgaggagaaggacccgctctggcaggacccctgcgaggacaaacgtcacaaagacatctggtccaaggagaagacgtgtgaccgcttcccaaagctcctcatcatcggcccccagaaaacaggcaccactgccctctacctgttcctgggcatgcaccctgacctaagcagcaactaccccagctctgagacctttgaggagatccagttttttaatggccacaactatcacaaaggcatcgactggtacatggagttcttccccatcccttccaacaccacctccgacttctactttgagaaaagcgccaactactttgattcagaagtggcgccccggcgggcagcagccctcttgcccaaagccaaggtcctgaccatcctcatcaaccccgcggaccgggcctattcctggtaccagattctggtcttggatggcaaactgcttcgcacagaacctgccaaagtgatggacatggtgcagaagttccttggggtgaccaacaccattgactaccacaaaaccttggcgtttgatccaaagaaaggattttggtgccaactgcttgaaggaggaaaaaccaagtgtctgggcaaaagcaagggccggaaatatcccgagatggacttggattcccgagccttcctgaaggactattaccgggaccacaacatcgagctctccaagctgctgtataagatgggccagacacttcccacttggctacgagaggacctccagaacaccaggtagccgtggccaccacagccagactgaacgtttgtgaaagctgggacatcccaccacacgctgagccagacctgcagagtgggaagctggaccagggcagctgcgcacttatgagcaatactctgtggaggtctggtggggctgggggagcacccaggcggatctgcaagcacctcggagcacccaccgctgggtctgcggcctaagggacctccctcgccagcagaggtccattccgttcccagctgctcctggggaggccgcttcctggtaggagggagtccacgagactcttttctgtccctcactgtgttccgccgactgtcccctctcgtcacccatcactccctgcttccgcagggcgcccctcagtattcgctgccat

SEQ ID NO: 158003 - DNA, 777 bp, Homo sapiens
  Payload ID: 10951
  Gene Symbol: NDST1
  Gene Name: N-deacetylase/N-sulfotransferase (heparan glucosaminyl) 1
  ENST ID: ENST00000522491
  CDS Start-End: 574-777
gggagaatccgggtggaagtcgagaaatccagccccgatagcagcgctcggtcccgccccggcccccgccccggggcgctcaccgcacgcccgccggccgccccggcctccggagctcttctctggccggcacccacgcggcatcacgggatcgaaccccgctcccagcggccgcgattcggggagccttagccccgtgggccccacggagtgagcggcatgcagcacccccgggcctgtccagtgtcctctggcctgctgccctgcacccccagaaggccctgacgccctggggcacttctgctctgcacaggaccacgcgggggtttgccatggtgacataaaggggcgcggaggaaggaaggagcgtgaccagcctgtggactgcgcccctggctgggaggaaggactgggggcccagatcctccactcccagtgccccacaagggcgtcgcttcctaagtctctgtgaatttgttggtcagtggacgattctcgtgtctcctcctgtgtggggccttggggtagccagggcaggccgggcctccggtggccaaggtctcggaggccaggatgcctgccctggcatgcctccggaggctgtgtcggcacgtgtccccgcaggctgtccttttcctgctgttcatcttctgcctgttcagcgttttcatctcggcctactacctatatggctggaagcgaggcctggagccctcggcggatgcccccgagcctgactgcggggacccgccgcctgtggcccccagtcgcctgctg

SEQ ID NO: 158004 - DNA, 769 bp, Homo sapiens
  Payload ID: 10951
  Gene Symbol: NDST1
  Gene Name: N-deacetylase/N-sulfotransferase (heparan glucosaminyl) 1
  ENST ID: ENST00000518299
  CDS Start-End: 701-769
gtgatcgtgacctgtccattcccaccagtgcaggggtccatgagcccccaaaggtgcagtgagttgtaggcatttctgtgttttctttttctgaagaaagagtttgttggtttcatcagatcatcagaaggctgggtgtccctgtggagtgctgacggggccgtgtgcactgcgggcttgagaaatggtggcagcgtggtgcaaatagaaagtagcctggtggcagtgtagcatcctgggtcagggtgtggtcttggagacgggctgttggcttctgagctggcacctccacttaggagctgtgtgacattggccttagccccgtgggccccacggagtgagcggcatgcagcacccccgggcctgtccagtgtcctctggcctgctgccctgcacccccagaaggccctgacgccctggggcacttctgctctgcacaggaccacgcgggggtttgccatggtgacataaaggggcgcggaggaaggaaggagcgtgaccagcctgtggactgcgcccctggctgggaggaaggactgggggcccagatcctccactcccagtgccccacaagggcgtcgcttcctaagtctctgtgaatttgttggtcagtggacgattctcgtgtctcctcctgtgtggggccttggggtagccagggcaggccgggcctccggtggccaaggtctcggaggccaggatgcctgccctggcatgcctccggaggctgtgtcggcacgtgtccccgcaggctgtccttttcctgctg

SEQ ID NO: 158005 - DNA, 3535 bp, Homo sapiens
  Payload ID: 10952
  Gene Symbol: NDST2
  Gene Name: N-deacetylase/N-sulfotransferase (heparan glucosaminyl) 2
  Uniprot ID: P52849
  ENST ID: ENST00000299641
  CDS Start-End: 344-2995
aggtagaggggaagagattgaactttgctgacctttgatgtgaggcgctcagccagggccaaggggagagcctggcaagatttgcagcctgaagccatgggccagggggccatggtgacctgagacaagtggactctgtatagttgccccctgcttccccttctacctcccctaccctatgctaaggggactcgtctccacctcgtaaaggaaactccccaagggaatccctgtcccctattttcctatccttctacccttccaagacagtcctagcctatagaactcctacctcccatcccctgaggtggtccccattcctccctcccttcctccccccgccatgctccagttgtggaaggtggtacgcccagctcggcagctggaactgcaccgcctcatactgctgctgatcgctttcagcctgggctccatgggcttcctggcttattatgtgtccaccagccctaaggccaaggaacccttgcccctgcccttgggagactgcagcagcggtggggcagctggtcctggccctgcacggcctccagttccacctcggccccccaggcctccagagacagctcgaactgaacccgtggtccttgtgtttgtggagagtgcatactcacagctggggcaggaaattgtggccatcctggagtctagtcgttttcgttatagcactgagttggcacctggccgaggggacatgcccacattgactgataatacccatggccgctatgtcttggtcatttatgagaacctgctcaagtatgtcaacctggatgcctggagtcgggaactgctagaccggtactgcgtggagtatggtgtgggcatcattggctttttccgagcccacgagcacagcctactgagcgcccagctcaagggctttcccctttttttacactcaaacttggggctccgggactaccaagtgaatccttctgccccgctactgcatctcacacgccccagccgcctagaaccagggccactgcctggtgatgactggaccatcttccaatccaatcatagtacatatgaaccagtgcttcttgccagccttcggccagctgagcccgcagtgccaggaccagttcttcgtcgggcccggcttcccactgtggtacaggacctggggcttcatgatggcatccagcgggtgctctttggacatggcctttccttctggctccacaaacttatcttcgttgatgctgttgcatacctcactggcaagcgcctctgcctggaccttgaccgctacatcttggtagacatcgatgacatctttgtgggcaaggaagggacccgcatgaaggtggctgatgttgaggctctgttgaccacccagaacaaactcaggaccttagttcccaacttcaccttcaacttgggcttctcgggcaagttctatcatactgggacagaggaggaggatgcaggggacgacatgctgctgaagcaccgcaaagagttctggtggttcccccacatgtggagccacatgcagccacacctgttccacaatcgctccgtgctggctgaccagatgaggctcaacaaacagtttgctctggagcatgggattcccacggacctggggtatgctgtggccccccaccactcgggtgtgtaccccatccacacgcagctctatgaggcctggaaatccgtgtggggcatccaggtgaccagcactgaggagtatccccatctccgccctgcccgctaccgccgtggcttcattcacaatggcattatggtgctgccccggcagacatgtggcctcttcactcacacaatcttctataatgagtatcctggaggctctcgtgaactagaccggagcatccgaggtggagagctctttctgacagtgctgcttaatccgatcagcatctttatgacccatctgtccaattatggaaatgaccggctgggcctatacacctttgagagcttggtgcgcttcctccagtgttggacacggctgcgcctacagacccttcctcctgtcccacttgcacagaagtactttgaacttttccctcaggagcgaagccccctttggcagaatccctgtgatgacaagaggcacaaagatatctggtccaaggagaaaacctgtgatcgtctcccgaagttcctcattgtgggaccccagaaaacagggactacagctattcacttcttcctgagcctgcacccagctgtaactagcagcttccctagccccagcacatttgaggagattcagttcttcaacagccctaattaccacaagggtattgactggtacatggatttcttccctgttccttccaatgccagcactgatttcctatttgaaaaaagtgccacctactttgactctgaagttgtaccacggcggggggctgccctcctgccacgagccaagatcatcacagtgctcaccaaccctgctgacagggcctactcctggtaccagcatcagcgagcccatggagacccagttgctctgaactataccttctatcaggtgatttcagcctcctcccagacccctctggcactacgctccctgcagaaccgctgtcttgtccctggctactattctacccatctacaacgctggctgacttactacccctctggacagttgctgattgtggatgggcaagagctgcgtaccaacccagcagcctcaatggagagcatccagaagttcctgggtatcacaccctttctgaactacacacggaccctcaggtttgatgatgataagggattttggtgccagggacttgaaggtggtaagactcgctgtctaggccggagcaaaggccggaggtatccagatatggacactgagtcccgtcttttccttacggattttttccggaaccataatttggagttgtcgaagctgctgagccggcttggacagccagtgccctcgtggcttcgggaagaactgcagcattccagtctgggctgatgtcccagcctcccataccagcaaaatgccccctgcttccctaaggggcaggtccagagcagggcccacaagggggattagagtggcctggcccctccccctctacctcagtagcccccaggcctgagatggctgagaagggaagggtatccttttcccacagttctgggacaaataaaggggcttcctttggtaccccacataatagtgctaggtacctttgacccatcatcttgggaggtggggaggaatgagagggtccaggcagggtgtaggggaatgtattagtccaatgagatttccctcttcatccgcagcagtgtatctattctatacctggctatgggagagaccccttgcatgggagggaccccttgctatggcccctttagccaggcagtgggatctacctgtggcccggcctccctaatgtcattcacattgaatggggatgaggtcggacagtggctcatagagccgagtatgagccctagctgtgggctagaaatgtccttaataaacatccttatttttctgttt

SEQ ID NO: 158006 - DNA, 3749 bp, Homo sapiens
  Payload ID: 10952
  Gene Symbol: NDST2
  Gene Name: N-deacetylase/N-sulfotransferase (heparan glucosaminyl) 2
  Uniprot ID: P52849
  ENST ID: ENST00000309979
  CDS Start-End: 558-3209
gagatggcggagcagccgcgacgcggcccgtggccccgaaagcagggaagccgggcagccccgggacgcggcggagcccggggacagcggggacgccgcccagtcctccgggtatgaagctaaaatgcagcggctaagaacgcggctctggagcttgacaggcctgacgtcgaatcccagccctcccaccaactgagctgtgtgatcctgggcaaggtagaggggaagagattgaactttgctgacctttgatgtgaggcgctcagccagggccaaggggagagcctggcaagatttgcagcctgaagccatgggccagggggccatggtgacctgagacaagtggactctgtatagttgccccctgcttccccttctacctcccctaccctatgctaaggggactcgtctccacctcgtaaaggaaactccccaagggaatccctgtcccctattttcctatccttctacccttccaagacagtcctagcctatagaactcctacctcccatcccctgaggtggtccccattcctccctcccttcctccccccgccatgctccagttgtggaaggtggtacgcccagctcggcagctggaactgcaccgcctcatactgctgctgatcgctttcagcctgggctccatgggcttcctggcttattatgtgtccaccagccctaaggccaaggaacccttgcccctgcccttgggagactgcagcagcggtggggcagctggtcctggccctgcacggcctccagttccacctcggccccccaggcctccagagacagctcgaactgaacccgtggtccttgtgtttgtggagagtgcatactcacagctggggcaggaaattgtggccatcctggagtctagtcgttttcgttatagcactgagttggcacctggccgaggggacatgcccacattgactgataatacccatggccgctatgtcttggtcatttatgagaacctgctcaagtatgtcaacctggatgcctggagtcgggaactgctagaccggtactgcgtggagtatggtgtgggcatcattggctttttccgagcccacgagcacagcctactgagcgcccagctcaagggctttcccctttttttacactcaaacttggggctccgggactaccaagtgaatccttctgccccgctactgcatctcacacgccccagccgcctagaaccagggccactgcctggtgatgactggaccatcttccaatccaatcatagtacatatgaaccagtgcttcttgccagccttcggccagctgagcccgcagtgccaggaccagttcttcgtcgggcccggcttcccactgtggtacaggacctggggcttcatgatggcatccagcgggtgctctttggacatggcctttccttctggctccacaaacttatcttcgttgatgctgttgcatacctcactggcaagcgcctctgcctggaccttgaccgctacatcttggtagacatcgatgacatctttgtgggcaaggaagggacccgcatgaaggtggctgatgttgaggctctgttgaccacccagaacaaactcaggaccttagttcccaacttcaccttcaacttgggcttctcgggcaagttctatcatactgggacagaggaggaggatgcaggggacgacatgctgctgaagcaccgcaaagagttctggtggttcccccacatgtggagccacatgcagccacacctgttccacaatcgctccgtgctggctgaccagatgaggctcaacaaacagtttgctctggagcatgggattcccacggacctggggtatgctgtggccccccaccactcgggtgtgtaccccatccacacgcagctctatgaggcctggaaatccgtgtggggcatccaggtgaccagcactgaggagtatccccatctccgccctgcccgctaccgccgtggcttcattcacaatggcattatggtgctgccccggcagacatgtggcctcttcactcacacaatcttctataatgagtatcctggaggctctcgtgaactagaccggagcatccgaggtggagagctctttctgacagtgctgcttaatccgatcagcatctttatgacccatctgtccaattatggaaatgaccggctgggcctatacacctttgagagcttggtgcgcttcctccagtgttggacacggctgcgcctacagacccttcctcctgtcccacttgcacagaagtactttgaacttttccctcaggagcgaagccccctttggcagaatccctgtgatgacaagaggcacaaagatatctggtccaaggagaaaacctgtgatcgtctcccgaagttcctcattgtgggaccccagaaaacagggactacagctattcacttcttcctgagcctgcacccagctgtaactagcagcttccctagccccagcacatttgaggagattcagttcttcaacagccctaattaccacaagggtattgactggtacatggatttcttccctgttccttccaatgccagcactgatttcctatttgaaaaaagtgccacctactttgactctgaagttgtaccacggcggggggctgccctcctgccacgagccaagatcatcacagtgctcaccaaccctgctgacagggcctactcctggtaccagcatcagcgagcccatggagacccagttgctctgaactataccttctatcaggtgatttcagcctcctcccagacccctctggcactacgctccctgcagaaccgctgtcttgtccctggctactattctacccatctacaacgctggctgacttactacccctctggacagttgctgattgtggatgggcaagagctgcgtaccaacccagcagcctcaatggagagcatccagaagttcctgggtatcacaccctttctgaactacacacggaccctcaggtttgatgatgataagggattttggtgccagggacttgaaggtggtaagactcgctgtctaggccggagcaaaggccggaggtatccagatatggacactgagtcccgtcttttccttacggattttttccggaaccataatttggagttgtcgaagctgctgagccggcttggacagccagtgccctcgtggcttcgggaagaactgcagcattccagtctgggctgatgtcccagcctcccataccagcaaaatgccccctgcttccctaaggggcaggtccagagcagggcccacaagggggattagagtggcctggcccctccccctctacctcagtagcccccaggcctgagatggctgagaagggaagggtatccttttcccacagttctgggacaaataaaggggcttcctttggtaccccacataatagtgctaggtacctttgacccatcatcttgggaggtggggaggaatgagagggtccaggcagggtgtaggggaatgtattagtccaatgagatttccctcttcatccgcagcagtgtatctattctatacctggctatgggagagaccccttgcatgggagggaccccttgctatggcccctttagccaggcagtgggatctacctgtggcccggcctccctaatgtcattcacattgaatggggatgaggtcggacagtggctcatagagccgagtatgagccctagctgtgggctagaaatgtccttaataaacatccttatttttctgttt

SEQ ID NO: 158007 - DNA, 447 bp, Homo sapiens
  Payload ID: 10952
  Gene Symbol: NDST2
  Gene Name: N-deacetylase/N-sulfotransferase (heparan glucosaminyl) 2
  ENST ID: ENST00000429742
  CDS Start-End: 1-447
ggagacccagttgctctgaactataccttctatcaggtgatttcagcctcctcccagacccctctggcactacgctccctgcagaaccgctgtcttgtccctggctactattctacccatctacaacgctggctgacttactacccctctggacagttgctgattgtggatgggcaagagctgcgtaccaacccagcagcctcaatggagagcatccagaagttcctgggtatcacaccctttctgaactacacacggaccctcaggtttgatgatgataagggattttggtgccagggacttgaaggtggtaagactcgctgtctaggccggagcaaaggccggaggtatccagatatggacactgaggtaagtaaagccaggggcaggggaatccctctccacttccaggatctgattctgtgtcccacttcttaccatttctgc

SEQ ID NO: 158008 - DNA, 5961 bp, Homo sapiens
  Payload ID: 10953
  Gene Symbol: NDST3
  Gene Name: N-deacetylase/N-sulfotransferase (heparan glucosaminyl) 3
  Uniprot ID: O95803
  ENST ID: ENST00000296499
  CDS Start-End: 404-3025
ccggtcccttggcgacgggtcttgcatgtgacactcttgccctctagtgcctcaccagcttggtagcagtttgatggctaatattaataagatgttacataacatgagagtactgggccaggactggtgttgctaccacttgtaaagtcaaaaagcctgagccgatggtaacgagtggtactgtttccgtttcttttccatctattgcaactttctcaagcattttcagctctgaactttaattccagactgtattttctgtgagtcctgatcaagtgatacaaatgagctgcaatggtgacataaactcttgacagagattggaaaagtagctggaacaccatcttttcttttaactttttatggtgcttctgttggcatagttggggaaagcacctacaacatgagttttatcatgaagcttcacagacactttcaaagaacagtcattctgcttgccactttttgtatggtgagcattatcatttctgcttactacctgtacagtggctacaaacaggaaaatgaactctctgagacggcttcagaagttgactgtggcgacctccaacacctaccatatcaactaatggaagtgaaagcaatgaagctttttgatgcctcaaggacagaccccacagtcctagtatttgtagagagccagtactcatctcttggtcaagacatcattatgattctagaatcaagtagattccagtatcacattgaaattgcccctggaaagggagatctcccagtgcttatagacaaaatgaaaggcaaatacattctcattatttatgagaatattttaaagtatataaatatggattcctggaatcgaagccttctagataaatactgtgtagaatatggtgtgggtgtcattggattccacaaaactagtgagaagagtgtacagagctttcagttaaaaggtttccctttttccatatatggaaatcttgcagtaaaagattgttgtattaatcctcattctccattgattcgtgtgaccaaatcttccaagcttgaaaaaggttctttacctggaactgactggacagtttttcagattaatcattcagcctatcaaccagtaatatttgccaaagtaaagaccccagaaaacctttctccttccatctctaaaggtgctttttatgccactattatacatgacctggggcttcatgatggaattcaaagggttctttttggcaacaacttgaacttttggctgcacaagctcatcttcatagatgccatctccttcttatcagggaagaggctgacattgtccttggacaggtacattcttgtggatattgatgatatatttgtgggaaaagagggaacaagaatgaacaccaatgatgtaaaggccctgcttgatactcagaatcttttgcgtgcacaaatcacaaattttacattcaacctgggattttcagggaaattttaccatacaggaactgaagaggaagatgaaggagatgactgtctgttggggtctgtggatgagttctggtggtttcctcacatgtggagccatatgcagccccacctcttccacaatgagtcatctttggtggagcagatgattctcaacaaaaaatttgccttagagcacggcattccaacggacatgggctacgctgtggcccctcaccattcgggcgtctaccctgtacatgttcagctttatgaggcctggaagaaggtctggaatattaaaatcaccagcactgaagaatatccacatctgaagccagctagataccggaggggttttatccacaaaaacatcatggttctcccaagacaaacctgtgggcttttcactcacaccattttctacaaagaatatccagggggtcctaaagagctggataagagtatccaaggaggagaacttttcttcactgtcgtcctcaaccctatcagcattttcatgacccatttgtccaactatgggaatgaccgactgggattatatacatttgttaatctggccaactttgtgaagagctggaccaacctgcgacttcagactctgcctccagtacaactggcccacaagtattttgagctgtttcctgatcagaaagaccctctctggcagaatccttgcgatgacaaacgccacagagacatttggtctaaagaaaaaacttgtgatcgcttaccaaaattcttggtaataggaccccagaaaactggtaccactgctttgtatttgttcctggttatgcatccttccatccttagtaactcccccagcccaaaaacctttgaggaggtacagttctttaatagaaataactaccacagggggattgattggtatatggatttcttcccagtcccatctaatgtcactaccgactttttgtttgagaagagtgccaattacttccactcagaggaagcccctaaaagagctgcttctctggttcccaaagccaagattatcaccattctcattgacccttcagaccgagcatactcctggtaccagcatcagcgatcacatgaagaccctgcagctctgaagtttagcttctacgaagtgatctcagcagggccccgtgcaccctcggagctcagagccttgcagaagagatgtttggtcccggggtggtatgccagccacatcgagagatggcttgtttatttccccccatttcagttgctaattattgatgggcaacaactaagaactgatcctgctacagtgatggatgaagtacagaagtttctaggagtcttgcctcattataattactcagaagctttaacgtttgattctcataaaggtttctggtgtcagttactggaagaaggtaaaacaaaatgccttggaaagagcaaaggaagaaaataccctccaatggattctgatagcaggacatttctgtcaagctactatcgagatcacaacgtggaactctcaaagctgctgcacaaactgggtcagcctctgccatcctggctgagacaggagctgcagaaagtaagatagcactgagagaaaacttgagacttcatcgtccatgtagaacacaccttttccaaagcttccagaagctaccaaaaggcagttgaaaaatatacctcttcaaatgagaaaaaagaacagtttcttccatgtgctggcacgtggatgattagaaaaaaagaaaaagtatgtgttacaagccttgaggcctgtggcctttctcttaacccatatctgagcctgtgggattattgtagactactgtgcactcatgtggaagtcaattgcaaccaacataaatatcaaacacaaatgcagaactgttccatttcatagtaatatttacacttttatatatcaactaagattgtgtctctgtaggtttttagaccactgtttgcctgtacgatgttttcttattattttattctataaagtgtcctatgaaacaagaagcaaaataaacatcacaatgtagcataaaatgtcaaaagcataacacccatgaaaaatgcttgccaaaatttaaatccacttaagtatttagaaataattgtaaattataatttgtgctagatcagagtggaaaagttatatatgagtgttatctgcaccaaaaaaaaataagtgctatagcaaaagtgattttttcatatacatagtctagtgaatatatgtaaaaattactaactcttccatcacaacgtaattgttatactgaaatatatactgtaaagctgttggatggtaaatagaaacacatcaagtacaccaaaacagtaaataacaatgtaaagtgtactgactgaatcctctaaaagggagaaattgtaggggtctaaaaacatatcatcgagaattctatgtccacttgctgtaagctgtgaatctatcccagtagtcctcactagttctacagaaatgcatgcctagagtctgaggtatgtgtcatctccagaaacaggttgacttttaaatgtgaatagctatttttaatgctccccaaaacaaaacctattaaactaaaactaaaaacagtttccctagatgatgtggttaggctatttacatttaggttattaaaaaattgcattttcccagatagttcaaaataaaattatgtaatgtagtagagatttataacaaaaaacaaattaatatattatttgtaatctaatgtttgcaatgatacttttgatataaggcaaagaaacataagcagagcagaggcccatttttgaaaatatttcacccatcactctggtggaagtaacagatcataggtacaattaaggattagctactaaattaaatgcaggaagtacaaagatgagcaagtcatgctcttgaaatatatttacatttcaattgtaaataatatatatggttaataaagtttccaaaaaagaaaagaatacatcatacttattttcctgttaatatttacttaatttttttttttgagagggggacagagtctcactatgtcacccaggctggagtgcaatggtgtgatctcagctcactgcaacctccgcctcctgggttcaagtgattctcctgcctcagcctcctgaggagctgggattacagccatgcaccaccacgcccgggtaatttttgtatttttagtagtgacagggtttcaccatgttgactaggctgatcttgaactcctgacctcatgatccacccaccttggcctctcaaagtgctgagattacaagcgtgagccaccatgccctgactacttaatttttaaatgtactgtacatatacataaaatttaagtagtaaattaattccctgctatgattataagcctttataaaatattatcaaaggtatgattagaaacaaatgggaggaaaacccatagtaaaaatattttcattgtcattttaatgggtaaaactatcaattactaattagaaaatgaattgtgagatccacttactataaatttttaactgtacattataattacttttttaaagtttcatgtacctaaagcatatgctaatttttaaatatactattagcagaaaaaattggaaaaatcaccaatttttaagactcttgactctaaaagcaaaatcaaagtgatttggacaaatatgggaaacacagtcttcatgcttactgctgtctcttttatagcagcagatgccagacatgctaggaaaattactatagtcttccatctccaccaacttaagaaaactggcttaggaaggttaaacatgagaataggcctcagcagttatatacagtgtcatgttttcatttggcaacaacatttattctaataaaaaaagaaaagaaaaactgatacatttatgctttaatggtaagatgtacatttgaactgctaagcaaagctgctaatggcctattttgtttaggtaaatcgagttgactgaacacttcatccttttaaatagatgtcaaaaacatactccgtgtttgtataaagacaggagaaaaaggaagagatcttaccaaaatttattcattcacaagtacatgtattacgctagctagagcagcaaacctgtgaaaggatttttgaccactcaatgtgtcttgaagacagcatcaaattctagaggacatgcatactttccacattatatactccaactggttaatatgctaatctgaaagtaacataaatacatatgagagaataatgagagataatctgatttaaaactagctttgtatagaattccctttttcattgtttaaaatatgaaacttcctcaggaagaaatgaaatggttatttcaatgtttatagctgtaatattcttgtcattcacattgaatgaaaattactggaaacatttttttctctgagttttttaaaataaaaaacctagatataattctgatagtagcatggtacctcatatgtacaacaataaactgataggaaaatgaagagtttggacctgg

SEQ ID NO: 158009 - DNA, 3351 bp, Homo sapiens
  Payload ID: 10954
  Gene Symbol: NDST4
  Gene Name: N-deacetylase/N-sulfotransferase (heparan glucosaminyl) 4
  Uniprot ID: Q9H3R1
  ENST ID: ENST00000264363
  CDS Start-End: 680-3298
aaagaccgactacagctaaacaagaggcacagcagcactagcaacagcagagcaggagcagctggtattccggtgattaaatagttctcatagcctttttgctgtactcggtctgctccctggtgtaattctcgtgtccaagaaggaagctgcattttaacggtgtgctgaacagaggtttgaatcattccagctggctgcttgttttgaaaaggacaatgtgtgtataaataaaaggactctgctggaagagttcagacactaagactggagctagagagtgctcttggaatattgttgaggcagattgcatgaactgaaagctccttctaattaacctggagccaagtgaacctgaatactggatatctcatgttctaacacgggataaattcaagttagaaaaagacaaaatattgaaatgcttctctagattatgcttagaggattctgcagcaattctcagtattggacatattcaaaatctcctcaacgtatatccttcccatctattgccttccagctttaactcagttgtgctcccttcaaacattttacatgatttgcgatggttacatgaactctggggaagtgatatttgcaacatctcatactttattcactatggcactttaggaaacgaaattgggaaaaagcttccaaaacattattctaaaaaatgaatcttattgtgaaacttcggagaagttttcgaacattgattgttctcttagctaccttttgcttggtgagcattgtcatttctgcctattttctctactctggctacaaacaggaaatgacacttattgaaaccactgcagaagcagaatgcactgacatcaaaattctaccatataggtcaatggagctgaaaacagttaaacctattgacacatccaaaacggaccctactgtccttctcttcgtggagagccaatactctcaactcggtcaagatatcatagctattttggagtccagccgatttcagtaccacatggttattgcccctggaaagggagatatacctcctcttacagataatggcaaagggaaatatactttagttatttatgaaaatattctgaagtatgtcagcatggactcatggaatcgagagcttttagaaaaatactgtgtggaatacagtgttagtataatcggttttcataaagccaatgagaacagcttaccaagtacacaattaaaaggctttccgttaaaccttttcaataatctagctctaaaggactgttttgttaaccctcaatctcctttgctgcatattaccaaagcccccaaggttgagaaaggccctcttcctggggaagactggactattttccaatataatcattcaacctaccagcctgtacttttaactgagttacagacagaaaaatccctgtcatccttgtctagcaaaacactctttgcaacggtgattcaggatctggggcttcatgatggaattcagagagtactttttggcaacaacttgaacttttggctgcacaagctcatcttcatagatgccatctccttcttgtcagggaagaggctgacattgtccttggacaggtacatccttgtggacattgatgatatatttgttgggaaagagggaacaaggatgaatgtcaaagatgtgaaggcattactagagactcaaaatttactgcgcactcaggttgcaaattttaccttcaaccttggattttcagggaagttttaccacacagggactgaagaggaagatgaaggagatgaccttttacttcggtctgtggatgagttctggtggtttcctcacatgtggagccacatgcagccccacctcttccacaacgagtcatctttagtagagcagatgattctcaacaaggaatttgcactggaacatggaataccaatcaacatgggctatgctgtggccccacatcactcaggggtctacccggttcacattcagctgtatgcagcttggaagaaggtctggggtattcaagtcaccagcactgaagaatatccacatctgaaacctgcccggtacagaaagggcttcattcacaatagcatcatggtcctccctcgacagacttgtgggttgttcactcacactattttctacaaagaatatccaggaggaccccaagaactggataaaagtatcagaggaggtgaactttttctcacaatccttctaaacccaatcagcattttcatgacccatttatcaaactatggaaatgaccgcctagggttatatacctttgtgaacttggtcaactttgtgcagagctggaccaacctgaaattgcaaactctgcctccagtgcaactggcccaccagtattttgagctcttccctgagcagaaagaccctctatggcagaatccatgtgatgataaacgacacaaagacatctggtccagagagaaaacttgtgaccacttaccaaaatttctagtaattggtccacaaaaaacaggaacaactgcactttatttatttcttcttatgcatccttcaatcatcagcaatctccctagtccaaagacatttgaggaagttcagttctttaatggcaacaactatcacaaaggaatagactggtatatggactttttccctacaccatccaatactacaagtgactttctgtttgaaaagagtgctaattacttccattcggaagaagctccaagacgagccgcatctcttgtccccaaagccaagatcatcaccatcctcattgacccctcagacagggcatactcttggtaccagcaccaacgatcacatgaagatccagctgctctgaggttcaatttctatgaagttatttcaacaggacattgggctccatctgacttaaaaactttgcagagaagatgcctagtacctggatggtatgcagtccacatagaaagatggctaacttactttgctacttctcagttgctaattattgatggacagcagctgagatctgacccagctactgtgatggatgaagtccagaagtttctgggagttacacctcgttataattactctgaagcactaacgtttgatccccaaaagggtttttggtgtcaattactggaaggaggaaagacaaaatgccttggaaaaagcaaaggccgaaaatatccacctatggatccagagtctagaacgttcctctctaattactaccgagatcataatgtggaactatccaaactgctacacagactgggacagcctctgccatcgtggctgagacaggaactgcagaaagtgagatagcactggagacaagaactaagcctctcaagatacttttagtgttaaaaaaaaaa

SEQ ID NO: 158010 - DNA, 2015 bp, Homo sapiens
  Payload ID: 10954
  Gene Symbol: NDST4
  Gene Name: N-deacetylase/N-sulfotransferase (heparan glucosaminyl) 4
  Uniprot ID: Q9H3R1
  ENST ID: ENST00000504854
  CDS Start-End: 406-1515
tgctgtactcggtctgctccctggtgtaattctcgtgtccaagaaggaagctgcattttaacggtgtgctgaacagaggtttgaatcattccagctggctgcttgttttgaaaaggacaatgtgtgtataaataaaaggactctgctggaagagttcagacactaagactggagctagagagtgctcttggaatattgttgaggcagattgcatgaactgaaagctccttctaattaacctggagccaagtgaacctgaatactggatatctcatgttctaacacgggataaattcaagttagaaaaagacaaaatattgaaatgcttctctagggactgaagaggaagatgaaggagatgaccttttacttcggtctgtggatgagttctggtggtttcctcacatgtggagccacatgcagccccacctcttccacaacgagtcatctttagtagagcagatgattctcaacaaggaatttgcactggaacatggaataccaatcaacatgggctatgctgtggccccacatcactcaggggtctacccggttcacattcagctgtatgcagcttggaagaaggtctggggtattcaagtcaccagcactgaagaatatccacatctgaaacctgcccggtacagaaagggcttcattcacaatagcatcatggtcctccctcgacagacttgtgggttgttcactcacactattttctacaaagaatatccaggaggaccccaagaactggataaaagtatcagaggaggtgaactttttctcacaatccttctaaacccaatcagcattttcatgacccatttatcaaactatggaaatgaccgcctagggttatatacctttgtgaacttggtcaactttgtgcagagctggaccaacctgaaattgcaaactctgcctccagtgcaactggcccaccagtattttgagctcttccctgagcagaaagaccctctatggcagaatccatgtgatgataaacgacacaaagacatctggtccagagagaaaacttgtgaccacttaccaaaatttctagtaattggtccacaaaaaacaggaacaactgcactttatttatttcttcttatgcatccttcaatcatcagcaatctccctagtccaaagacatttgaggaagttcagttctttaatggcaacaactatcacaaaggaatagactggtatatggactttttccctacaccatccaatactacaagtgactttctgtttgaaaagagtgctaattacttccattcggaagaagctccaagacgagccgcatctcttgtccccaaagccaagatcatcaccatcctcattgacccctcagacagggcatactcttggtaccaggttggagtgcaatggcgtgatctcggctcactgcaaccttcacctcccaggttcatgccattctcctgcctcagcctcctgagtagctgggactacagcaccaacgatcacatgaagatccagctgctctgaggttcaatttctatgaagttatttcaacaggacattgggctccatctgacttaaaaactttgcagagaagatgcctagtacctggatggtatgcagtccacatagaaagatggctaacttactttgctacttctcagttgctaattattgatggacagcagctgagatctgacccagctactgtgatggatgaagtccagaagtttctgggagttacacctcgttataattactctgaagcactaacgtttgatccccaaaagggtttttggtgtcaattactggaaggaggaaagacaaaatgccttggaaaaagcaaaggccgaaaatatccacctatggatccagagtctagaacgttcctctctaattactaccgagatcataatgtggaactatccaaactgctacacagactgggacagcctctgccatcgtggctgagacaggaactgcagaaagtgagatagcactggagacaagaactaagcctctcaaga

SEQ ID NO: 158011 - DNA, 3439 bp, Homo sapiens
  Payload ID: 10954
  Gene Symbol: NDST4
  Gene Name: N-deacetylase/N-sulfotransferase (heparan glucosaminyl) 4
  Uniprot ID: Q9H3R1
  ENST ID: ENST00000613194
  CDS Start-End: 1817-2926
aaagaccgactacagctaaacaagaggcacagcagcactagcaacagcagagcaggagcagctggtattccggtgattaaatagttctcatagcctttttgctgtactcggtctgctccctggtgtaattctcgtgtccaagaaggaagctgcattttaacggtgtgctgaacagaggtttgaatcattccagctggctgcttgttttgaaaaggacaatgtgtgtataaataaaaggactctgctggaagagttcagacactaagactggagctagagagtgctcttggaatattgttgaggcagattgcatgaactgaaagctccttctaattaacctggagccaagtgaacctgaatactggatatctcatgttctaacacgggataaattcaagttagaaaaagacaaaatattgaaatgcttctctagattatgcttagaggattctgcagcaattctcagtattggacatattcaaaatctcctcaacgtatatccttcccatctattgccttccagctttaactcagttgtgctcccttcaaacattttacatgatttgcgatggttacatgaactctggggaagtgatatttgcaacatctcatactttattcactatggcactttaggaaacgaaattgggaaaaagcttccaaaacattattctaaaaaatgaatcttattgtgaaacttcggagaagttttcgaacattgattgttctcttagctaccttttgcttggtgagcattgtcatttctgcctattttctctactctggctacaaacaggaaatgacacttattgaaaccactgcagaagcagaatgcactgacatcaaaattctaccatataggtcaatggagctgaaaacagttaaacctattgacacatccaaaacggaccctactgtccttctcttcgtggagagccaatactctcaactcggtcaagatatcatagctattttggagtccagccgatttcagtaccacatggttattgcccctggaaagggagatatacctcctcttacagataatggcaaagggaaatatactttagttatttatgaaaatattctgaagtatgtcagcatggactcatggaatcgagagcttttagaaaaatactgtgtggaatacagtgttagtataatcggttttcataaagccaatgagaacagcttaccaagtacacaattaaaaggctttccgttaaaccttttcaataatctagctctaaaggactgttttgttaaccctcaatctcctttgctgcatattaccaaagcccccaaggttgagaaaggccctcttcctggggaagactggactattttccaatataatcattcaacctaccagcctgtacttttaactgagttacagacagaaaaatccctgtcatccttgtctagcaaaacactctttgcaacggtgattcaggatctggggcttcatgatggaattcagagagtactttttggcaacaacttgaacttttggctgcacaagctcatcttcatagatgccatctccttcttgtcagggaagaggctgacattgtccttggacaggtacatccttgtggacattgatgatatatttgttgggaaagagggaacaaggatgaatgtcaaagatgtgaaggcattactagagactcaaaatttactgcgcactcaggttgcaaattttaccttcaaccttggattttcagggaagttttaccacacagggactgaagaggaagatgaaggagatgaccttttacttcggtctgtggatgagttctggtggtttcctcacatgtggagccacatgcagccccacctcttccacaacgagtcatctttagtagagcagatgattctcaacaaggaatttgcactggaacatggaataccaatcaacatgggctatgctgtggccccacatcactcaggggtctacccggttcacattcagctgtatgcagcttggaagaaggtctggggtattcaagtcaccagcactgaagaatatccacatctgaaacctgcccggtacagaaagggcttcattcacaatagcatcatggtcctccctcgacagacttgtgggttgttcactcacactattttctacaaagaatatccaggaggaccccaagaactggataaaagtatcagaggaggtgaactttttctcacaatccttctaaacccaatcagcattttcatgacccatttatcaaactatggaaatgaccgcctagggttatatacctttgtgaacttggtcaactttgtgcagagctggaccaacctgaaattgcaaactctgcctccagtgcaactggcccaccagtattttgagctcttccctgagcagaaagaccctctatggcagaatccatgtgatgataaacgacacaaagacatctggtccagagagaaaacttgtgaccacttaccaaaatttctagtaattggtccacaaaaaacaggaacaactgcactttatttatttcttcttatgcatccttcaatcatcagcaatctccctagtccaaagacatttgaggaagttcagttctttaatggcaacaactatcacaaaggaatagactggtatatggactttttccctacaccatccaatactacaagtgactttctgtttgaaaagagtgctaattacttccattcggaagaagctccaagacgagccgcatctcttgtccccaaagccaagatcatcaccatcctcattgacccctcagacagggcatactcttggtaccaggttggagtgcaatggcgtgatctcggctcactgcaaccttcacctcccaggttcatgccattctcctgcctcagcctcctgagtagctgggactacagcaccaacgatcacatgaagatccagctgctctgaggttcaatttctatgaagttatttcaacaggacattgggctccatctgacttaaaaactttgcagagaagatgcctagtacctggatggtatgcagtccacatagaaagatggctaacttactttgctacttctcagttgctaattattgatggacagcagctgagatctgacccagctactgtgatggatgaagtccagaagtttctgggagttacacctcgttataattactctgaagcactaacgtttgatccccaaaagggtttttggtgtcaattactggaaggaggaaagacaaaatgccttggaaaaagcaaaggccgaaaatatccacctatggatccagagtctagaacgttcctctctaattactaccgagatcataatgtggaactatccaaactgctacacagactgggacagcctctgccatcgtggctgagacaggaactgcagaaagtgagatagcactggagacaagaactaagcctctcaagatacttttagtgtt

SEQ ID NO: 158012 - DNA, 1784 bp, Homo sapiens
  Payload ID: 10955
  Gene Symbol: NDRG2
  Gene Name: NDRG family member 2
  Uniprot ID: Q9UN36
  ENST ID: ENST00000298684
  CDS Start-End: 13-999
tgccaggccaccatggcggagctgcaggaggtgcagatcacagaggagaagccactgttgccaggacagacgcctgaggcggccaagactcactctgtggagacaccatacggctctgtcactttcactgtctatggcacccccaaacccaaacgcccagcgatccttacctaccacgatgtgggactcaactataaatcttgcttccagccactgtttcagttcgaggacatgcaggaaatcattcagaactttgtgcgggttcatgtggatgcccctggaatggaagagggagcccctgtgttccctttgggatatcagtacccatctctggaccagcttgcagacatgatcccttgcgtcctgcagtacctaaatttctctacaataattggagttggtgttggagctggagcctacatcctggcgagatatgctctaacaggcctcacctcttccattccggagatgatccttggacatcttttcagccaggaagagctctctggaaattctgagttgatacaaaagtacagaaatatcattacacatgcacccaacctggataacattgaattgtactggaacagctacaacaaccgccgagacctgaactttgagcgtggaggtgatatcaccctcaggtgtcctgtgatgctggtggtaggagaccaagcacctcatgaagatgcagtggtggaatgtaactcaaaactggaccccacccagacctcgttcctcaagatggctgactccggaggtcagccccagctgactcagccaggcaagctgaccgaggccttcaagtacttcctgcaaggcatgggctacatggcctcatcctgcatgactcgcctgtcccggtctcgtacagcctctctgaccagtgcagcatccgttgatggcaaccggtcccgctctcgcaccctgtcccagagcagcgagtctggaactctttcttcggggcccccggggcacaccatggaggtctcctgttgaatggcccttgttgccctagagtgggacccagccctcacctcccccagagctaacctgggaggtgctgaaggggcattgggccaccgtaagcaagggaaaaagggcagatcatgcggggagatgaccttgatctttgattgctaccctaaccttgacctttaacccgtgattccccccagctcctggaagagatgtcctaatatctcttagggacccagacccctaaattctcctcctcccccattttgatgttaaggtggagagggcatatgcatcctctgtcctgatctaggtgtctatagctgaggggtaagaggttgttgtagttgtcctggtgcctccatcagactctccctacttgtcccatatttgcaaggggaggggatttggggctggggctccattcaccaaagctgaggtggcttctcattaaccctttaggactctgaagggtatggacctacgtgaatgtgtgtcagggggagacttgctggtgggttagtggtcctcaggatgtgatagaaacatccagtgtaaaaaggaagttggaatgggagttggcgggcagtgaacgagtgtggggaaggattggtgctggggcaacaggaaggggcctggggccgtttggctgcactaactttggtagctcagtgtgcatctagagtgggactggggagggagctaagcttgggctgggctgcttggggcttggcatagggtggaaagggctaccctggggctctgaccacactgtagtatgtgtggagggtgccctcccgtctccc

SEQ ID NO: 158013 - DNA, 2122 bp, Homo sapiens
  Payload ID: 10955
  Gene Symbol: NDRG2
  Gene Name: NDRG family member 2
  Uniprot ID: Q9UN36
  ENST ID: ENST00000298687
  CDS Start-End: 174-1289
cggccccccgcattccccgcccccacctccccgccttgttgtccaacttctcccggagcagccggagagcaggcgtcgggacgcagcaaagagaggagagaccccagagtcagaaggagtgagaaccctgacccctaatcccactgcatccagccaataggagcccagccaccatggcggagctgcaggaggtgcagatcacagaggagaagccactgttgccaggacagacgcctgaggcggccaaggaggctgagttagctgcccgaatcctcctggaccagggacagactcactctgtggagacaccatacggctctgtcactttcactgtctatggcacccccaaacccaaacgcccagcgatccttacctaccacgatgtgggactcaactataaatcttgcttccagccactgtttcagttcgaggacatgcaggaaatcattcagaactttgtgcgggttcatgtggatgcccctggaatggaagagggagcccctgtgttccctttgggatatcagtacccatctctggaccagcttgcagacatgatcccttgcgtcctgcagtacctaaatttctctacaataattggagttggtgttggagctggagcctacatcctggcgagatatgctcttaaccacccggacactgttgaaggtcttgtcctcatcaacattgatcccaatgccaagggttggatggattgggcagcccacaagctaacaggcctcacctcttccattccggagatgatccttggacatcttttcagccaggaagagctctctggaaattctgagttgatacaaaagtacagaaatatcattacacatgcacccaacctggataacattgaattgtactggaacagctacaacaaccgccgagacctgaactttgagcgtggaggtgatatcaccctcaggtgtcctgtgatgctggtggtaggagaccaagcacctcatgaagatgcagtggtggaatgtaactcaaaactggaccccacccagacctcgttcctcaagatggctgactccggaggtcagccccagctgactcagccaggcaagctgaccgaggccttcaagtacttcctgcaaggcatgggctacatggcctcatcctgcatgactcgcctgtcccggtctcgtacagcctctctgaccagtgcagcatccgttgatggcaaccggtcccgctctcgcaccctgtcccagagcagcgagtctggaactctttcttcggggcccccggggcacaccatggaggtctcctgttgaatggcccttgttgccctagagtgggacccagccctcacctcccccagagctaacctgggaggtgctgaaggggcattgggccaccgtaagcaagggaaaaagggcagatcatgcggggagatgaccttgatctttgattgctaccctaaccttgacctttaacccgtgattccccccagctcctggaagagatgtcctaatatctcttagggacccagacccctaaattctcctcctcccccattttgatgttaaggtggagagggcatatgcatcctctgtcctgatctaggtgtctatagctgaggggtaagaggttgttgtagttgtcctggtgcctccatcagactctccctacttgtcccatatttgcaaggggaggggatttggggctggggctccattcaccaaagctgaggtggcttctcattaaccctttaggactctgaagggtatggacctacgtgaatgtgtgtcagggggagacttgctggtgggttagtggtcctcaggatgtgatagaaacatccagtgtaaaaaggaagttggaatgggagttggcgggcagtgaacgagtgtggggaaggattggtgctggggcaacaggaaggggcctggggccgtttggctgcactaactttggtagctcagtgtgcatctagagtgggactggggagggagctaagcttgggctgggctgcttggggcttggcatagggtggaaagggctaccctggggctctgaccacactgtagtatgtgtggagggtgccctcccgtctcccacaacttctgctataacaataaactgtagaggaatctgagtaccgtta

SEQ ID NO: 158014 - DNA, 2127 bp, Homo sapiens
  Payload ID: 10955
  Gene Symbol: NDRG2
  Gene Name: NDRG family member 2
  Uniprot ID: Q9UN36
  ENST ID: ENST00000350792
  CDS Start-End: 221-1294
atcctctccccaccccccgcctgcccgcgatcgccctctatttatagcggccccccgcattccccgcccccacctccccgccttgttgtccaacttctcccggagcagccggagagcaggcgtcgggacgcagcaaagagaggagagaccccagagtcagaaggagtgagaaccctgacccctaatcccactgcatccagccaataggagcccagccaccatggcggagctgcaggaggtgcagatcacagaggagaagccactgttgccaggacagacgcctgaggcggccaagactcactctgtggagacaccatacggctctgtcactttcactgtctatggcacccccaaacccaaacgcccagcgatccttacctaccacgatgtgggactcaactataaatcttgcttccagccactgtttcagttcgaggacatgcaggaaatcattcagaactttgtgcgggttcatgtggatgcccctggaatggaagagggagcccctgtgttccctttgggatatcagtacccatctctggaccagcttgcagacatgatcccttgcgtcctgcagtacctaaatttctctacaataattggagttggtgttggagctggagcctacatcctggcgagatatgctcttaaccacccggacactgttgaaggtcttgtcctcatcaacattgatcccaatgccaagggttggatggattgggcagcccacaagctaacaggcctcacctcttccattccggagatgatccttggacatcttttcagccaggaagagctctctggaaattctgagttgatacaaaagtacagaaatatcattacacatgcacccaacctggataacattgaattgtactggaacagctacaacaaccgccgagacctgaactttgagcgtggaggtgatatcaccctcaggtgtcctgtgatgctggtggtaggagaccaagcacctcatgaagatgcagtggtggaatgtaactcaaaactggaccccacccagacctcgttcctcaagatggctgactccggaggtcagccccagctgactcagccaggcaagctgaccgaggccttcaagtacttcctgcaaggcatgggctacatggcctcatcctgcatgactcgcctgtcccggtctcgtacagcctctctgaccagtgcagcatccgttgatggcaaccggtcccgctctcgcaccctgtcccagagcagcgagtctggaactctttcttcggggcccccggggcacaccatggaggtctcctgttgaatggcccttgttgccctagagtgggacccagccctcacctcccccagagctaacctgggaggtgctgaaggggcattgggccaccgtaagcaagggaaaaagggcagatcatgcggggagatgaccttgatctttgattgctaccctaaccttgacctttaacccgtgattccccccagctcctggaagagatgtcctaatatctcttagggacccagacccctaaattctcctcctcccccattttgatgttaaggtggagagggcatatgcatcctctgtcctgatctaggtgtctatagctgaggggtaagaggttgttgtagttgtcctggtgcctccatcagactctccctacttgtcccatatttgcaaggggaggggatttggggctggggctccattcaccaaagctgaggtggcttctcattaaccctttaggactctgaagggtatggacctacgtgaatgtgtgtcagggggagacttgctggtgggttagtggtcctcaggatgtgatagaaacatccagtgtaaaaaggaagttggaatgggagttggcgggcagtgaacgagtgtggggaaggattggtgctggggcaacaggaaggggcctggggccgtttggctgcactaactttggtagctcagtgtgcatctagagtgggactggggagggagctaagcttgggctgggctgcttggggcttggcatagggtggaaagggctaccctggggctctgaccacactgtagtatgtgtggagggtgccctcccgtctcccacaacttctgctataacaataaactgtagaggaatctgagtaccgtta

SEQ ID NO: 158015 - DNA, 2047 bp, Homo sapiens
  Payload ID: 10955
  Gene Symbol: NDRG2
  Gene Name: NDRG family member 2
  Uniprot ID: Q9UN36
  ENST ID: ENST00000360463
  CDS Start-End: 150-1223
tctccccaccccccgcctgcccgcgatcgccctctatttatagcggccccccgcattccccgcccccacctccccgccttgttgtccaacttctcccggagcagccggagagcaggcgtcgggacgcagcaaagagaggagaggccaccatggcggagctgcaggaggtgcagatcacagaggagaagccactgttgccaggacagacgcctgaggcggccaagactcactctgtggagacaccatacggctctgtcactttcactgtctatggcacccccaaacccaaacgcccagcgatccttacctaccacgatgtgggactcaactataaatcttgcttccagccactgtttcagttcgaggacatgcaggaaatcattcagaactttgtgcgggttcatgtggatgcccctggaatggaagagggagcccctgtgttccctttgggatatcagtacccatctctggaccagcttgcagacatgatcccttgcgtcctgcagtacctaaatttctctacaataattggagttggtgttggagctggagcctacatcctggcgagatatgctcttaaccacccggacactgttgaaggtcttgtcctcatcaacattgatcccaatgccaagggttggatggattgggcagcccacaagctaacaggcctcacctcttccattccggagatgatccttggacatcttttcagccaggaagagctctctggaaattctgagttgatacaaaagtacagaaatatcattacacatgcacccaacctggataacattgaattgtactggaacagctacaacaaccgccgagacctgaactttgagcgtggaggtgatatcaccctcaggtgtcctgtgatgctggtggtaggagaccaagcacctcatgaagatgcagtggtggaatgtaactcaaaactggaccccacccagacctcgttcctcaagatggctgactccggaggtcagccccagctgactcagccaggcaagctgaccgaggccttcaagtacttcctgcaaggcatgggctacatggcctcatcctgcatgactcgcctgtcccggtctcgtacagcctctctgaccagtgcagcatccgttgatggcaaccggtcccgctctcgcaccctgtcccagagcagcgagtctggaactctttcttcggggcccccggggcacaccatggaggtctcctgttgaatggcccttgttgccctagagtgggacccagccctcacctcccccagagctaacctgggaggtgctgaaggggcattgggccaccgtaagcaagggaaaaagggcagatcatgcggggagatgaccttgatctttgattgctaccctaaccttgacctttaacccgtgattccccccagctcctggaagagatgtcctaatatctcttagggacccagacccctaaattctcctcctcccccattttgatgttaaggtggagagggcatatgcatcctctgtcctgatctaggtgtctatagctgaggggtaagaggttgttgtagttgtcctggtgcctccatcagactctccctacttgtcccatatttgcaaggggaggggatttggggctggggctccattcaccaaagctgaggtggcttctcattaaccctttaggactctgaagggtatggacctacgtgaatgtgtgtcagggggagacttgctggtgggttagtggtcctcaggatgtgatagaaacatccagtgtaaaaaggaagttggaatgggagttggcgggcagtgaacgagtgtggggaaggattggtgctggggcaacaggaaggggcctggggccgtttggctgcactaactttggtagctcagtgtgcatctagagtgggactggggagggagctaagcttgggctgggctgcttggggcttggcatagggtggaaagggctaccctggggctctgaccacactgtagtatgtgtggagggtgccctcccgtctcccacaacttctgctataacaataaactgtagaggaatctga

SEQ ID NO: 158016 - DNA, 2096 bp, Homo sapiens
  Payload ID: 10955
  Gene Symbol: NDRG2
  Gene Name: NDRG family member 2
  Uniprot ID: Q9UN36
  ENST ID: ENST00000397844
  CDS Start-End: 326-1351
actcctgcgccctcgacgttcccccgtgccccctttcggcgccagcacacctgcccctgccagccggcgagacccccgcctcctcagcggcggtcccgcccacctcctcctttcttaatctagttctctgtgttcgggcggggggagtcgaactcgtggggtgtcagtatcccgggttcgtctccccactaccggttcccaccactgagtctgggggcgaaggaaggagccagagtgcaattgcagatccagaccccagagtcagaaggagtgagaaccctgacccctaatcccactgcatccagccaataggagcccagccaccatggcggagctgcaggaggtgcagatcacagaggagaagccactgttgccaggacagacgcctgaggcggccaagactcactctgtggagacaccatacggctctgtcactttcactgtctatggcacccccaaacccaaacgcccagcgatccttacctaccacgatgtgggactcaactataaatcttgcttccagccactgtttcagttcgaggacatgcaggaaatcattcagaactttgtgcgggttcatgtggatgcccctggaatggaagagggagcccctgtgttccctttgggatatcagtacccatctctggaccagcttgcagacatgatcccttgcgtcctgcagtacctaaatttctctacaataattggagttggtgttggagctggagcctacatcctggcgagatatgctcttaaccacccggacactgttgaaggtcttgtcctcatcaacattgatcccaatgccaagggttggatggattgggcagcccacaagctaacaggcctcacctcttccattccggagatgatccttggacatcttttcagccaggaagagctctctggaaattctgagttgatacaaaagtacagaaatatcattacacatgcacccaacctggataacattgaattgtactggaacagctacaacaaccgccgagacctgaactttgagcgtggaggtgatatcaccctcaggtgtcctgtgatgctggtggtaggagaccaagcacctcatgaagatgcagtgatggctgactccggaggtcagccccagctgactcagccaggcaagctgaccgaggccttcaagtacttcctgcaaggcatgggctacatggcctcatcctgcatgactcgcctgtcccggtctcgtacagcctctctgaccagtgcagcatccgttgatggcaaccggtcccgctctcgcaccctgtcccagagcagcgagtctggaactctttcttcggggcccccggggcacaccatggaggtctcctgttgaatggcccttgttgccctagagtgggacccagccctcacctcccccagagctaacctgggaggtgctgaaggggcattgggccaccgtaagcaagggaaaaagggcagatcatgcggggagatgaccttgatctttgattgctaccctaaccttgacctttaacccgtgattccccccagctcctggaagagatgtcctaatatctcttagggacccagacccctaaattctcctcctcccccattttgatgttaaggtggagagggcatatgcatcctctgtcctgatctaggtgtctatagctgaggggtaagaggttgttgtagttgtcctggtgcctccatcagactctccctacttgtcccatatttgcaaggggaggggatttggggctggggctccattcaccaaagctgaggtggcttctcattaaccctttaggactctgaagggtatggacctacgtgaatgtgtgtcagggggagacttgctggtgggttagtggtcctcaggatgtgatagaaacatccagtgtaaaaaggaagttggaatgggagttggcgggcagtgaacgagtgtggggaaggattggtgctggggcaacaggaaggggcctggggccgtttggctgcactaactttggtagctcagtgtgcatctagagtgggactggggagggagctaagcttgggctgggctgcttggggcttggcatagggtggaaagggctaccctggggctctga

SEQ ID NO: 158017 - DNA, 2084 bp, Homo sapiens
  Payload ID: 10955
  Gene Symbol: NDRG2
  Gene Name: NDRG family member 2
  Uniprot ID: Q9UN36
  ENST ID: ENST00000397847
  CDS Start-End: 179-1261
attgaccccagagtccctgttggccatcctctccccaccccccgcctgcccgcgatcgccctctatttatagcggccccccgcattccccgcccccacctccccgccttgttgtccaacttctcccggagcagccggagagcaggcgtcgggacgcagcaaagagaggagaggccaccatggcggagctgcaggaggtgcagatcacagaggagaagccactgttgccaggacagacgcctgaggcggccaaggaggctgagttagctgcccgaatcctcctggaccagggacagactcactctgtggagacaccatacggctctgtcactttcactgtctatggcacccccaaacccaaacgcccagcgatccttacctaccacgatgtgggactcaactataaatcttgcttccagccactgtttcagttcgaggacatgcaggaaatcattcagaactttgtgcgggttcatgtggatgcccctggaatggaagagggagcccctgtgttccctttgggatatcagtacccatctctggaccagcttgcagacatgatcccttgcgtcctgcagtacctaaatttctctacaataattggagttggtgttggagctggagcctacatcctggcgagatatgctcttaaccacccggacactgttgaaggtcttgtcctcatcaacattgatcccaatgccaagggttggatggattgggcagcccacaagctaacaggcctcacctcttccattccggagatgatccttggacatcttttcagccaggaagagctctctggaaattctgagttgatacaaaagtacagaaatatcattacacatgcacccaacctggataacattgaattgtactggaacagctacaacaaccgccgagacctgaactttgagcgtggaggtgatatcaccctcaggtgtcctgtgatgctggtggtggaatgtaactcaaaactggaccccacccagacctcgttcctcaagatggctgactccggaggtcagccccagctgactcagccaggcaagctgaccgaggccttcaagtacttcctgcaaggcatgggctacatggcctcatcctgcatgactcgcctgtcccggtctcgtacagcctctctgaccagtgcagcatccgttgatggcaaccggtcccgctctcgcaccctgtcccagagcagcgagtctggaactctttcttcggggcccccggggcacaccatggaggtctcctgttgaatggcccttgttgccctagagtgggacccagccctcacctcccccagagctaacctgggaggtgctgaaggggcattgggccaccgtaagcaagggaaaaagggcagatcatgcggggagatgaccttgatctttgattgctaccctaaccttgacctttaacccgtgattccccccagctcctggaagagatgtcctaatatctcttagggacccagacccctaaattctcctcctcccccattttgatgttaaggtggagagggcatatgcatcctctgtcctgatctaggtgtctatagctgaggggtaagaggttgttgtagttgtcctggtgcctccatcagactctccctacttgtcccatatttgcaaggggaggggatttggggctggggctccattcaccaaagctgaggtggcttctcattaaccctttaggactctgaagggtatggacctacgtgaatgtgtgtcagggggagacttgctggtgggttagtggtcctcaggatgtgatagaaacatccagtgtaaaaaggaagttggaatgggagttggcgggcagtgaacgagtgtggggaaggattggtgctggggcaacaggaaggggcctggggccgtttggctgcactaactttggtagctcagtgtgcatctagagtgggactggggagggagctaagcttgggctgggctgcttggggcttggcatagggtggaaagggctaccctggggctctgaccacactgtagtatgtgtggagggtgccctcccgtctcccacaacttctgctataacaataaactgtagaggaatctg

SEQ ID NO: 158018 - DNA, 2022 bp, Homo sapiens
  Payload ID: 10955
  Gene Symbol: NDRG2
  Gene Name: NDRG family member 2
  Uniprot ID: Q9UN36
  ENST ID: ENST00000397851
  CDS Start-End: 84-1199
gggtctgcgggaagcccgagccggggcgggcccgagtcaaaggcaagtgaaggtggaagcggccgcggcggcagcaggccaccatggcggagctgcaggaggtgcagatcacagaggagaagccactgttgccaggacagacgcctgaggcggccaaggaggctgagttagctgcccgaatcctcctggaccagggacagactcactctgtggagacaccatacggctctgtcactttcactgtctatggcacccccaaacccaaacgcccagcgatccttacctaccacgatgtgggactcaactataaatcttgcttccagccactgtttcagttcgaggacatgcaggaaatcattcagaactttgtgcgggttcatgtggatgcccctggaatggaagagggagcccctgtgttccctttgggatatcagtacccatctctggaccagcttgcagacatgatcccttgcgtcctgcagtacctaaatttctctacaataattggagttggtgttggagctggagcctacatcctggcgagatatgctcttaaccacccggacactgttgaaggtcttgtcctcatcaacattgatcccaatgccaagggttggatggattgggcagcccacaagctaacaggcctcacctcttccattccggagatgatccttggacatcttttcagccaggaagagctctctggaaattctgagttgatacaaaagtacagaaatatcattacacatgcacccaacctggataacattgaattgtactggaacagctacaacaaccgccgagacctgaactttgagcgtggaggtgatatcaccctcaggtgtcctgtgatgctggtggtaggagaccaagcacctcatgaagatgcagtggtggaatgtaactcaaaactggaccccacccagacctcgttcctcaagatggctgactccggaggtcagccccagctgactcagccaggcaagctgaccgaggccttcaagtacttcctgcaaggcatgggctacatggcctcatcctgcatgactcgcctgtcccggtctcgtacagcctctctgaccagtgcagcatccgttgatggcaaccggtcccgctctcgcaccctgtcccagagcagcgagtctggaactctttcttcggggcccccggggcacaccatggaggtctcctgttgaatggcccttgttgccctagagtgggacccagccctcacctcccccagagctaacctgggaggtgctgaaggggcattgggccaccgtaagcaagggaaaaagggcagatcatgcggggagatgaccttgatctttgattgctaccctaaccttgacctttaacccgtgattccccccagctcctggaagagatgtcctaatatctcttagggacccagacccctaaattctcctcctcccccattttgatgttaaggtggagagggcatatgcatcctctgtcctgatctaggtgtctatagctgaggggtaagaggttgttgtagttgtcctggtgcctccatcagactctccctacttgtcccatatttgcaaggggaggggatttggggctggggctccattcaccaaagctgaggtggcttctcattaaccctttaggactctgaagggtatggacctacgtgaatgtgtgtcagggggagacttgctggtgggttagtggtcctcaggatgtgatagaaacatccagtgtaaaaaggaagttggaatgggagttggcgggcagtgaacgagtgtggggaaggattggtgctggggcaacaggaaggggcctggggccgtttggctgcactaactttggtagctcagtgtgcatctagagtgggactggggagggagctaagcttgggctgggctgcttggggcttggcatagggtggaaagggctaccctggggctctgaccacactgtagtatgtgtggagggtgccctcccgtctcccacaacttctgctataacaataaactgtagaggaatctg

SEQ ID NO: 158019 - DNA, 2079 bp, Homo sapiens
  Payload ID: 10955
  Gene Symbol: NDRG2
  Gene Name: NDRG family member 2
  Uniprot ID: Q9UN36
  ENST ID: ENST00000397853
  CDS Start-End: 140-1255
aagcccgagccggggcgggcccgagtcaaaggcaagtgaaggtggaagcggccgcggcggcagcagaccccagagtcagaaggagtgagaaccctgacccctaatcccactgcatccagccaataggagcccagccaccatggcggagctgcaggaggtgcagatcacagaggagaagccactgttgccaggacagacgcctgaggcggccaaggaggctgagttagctgcccgaatcctcctggaccagggacagactcactctgtggagacaccatacggctctgtcactttcactgtctatggcacccccaaacccaaacgcccagcgatccttacctaccacgatgtgggactcaactataaatcttgcttccagccactgtttcagttcgaggacatgcaggaaatcattcagaactttgtgcgggttcatgtggatgcccctggaatggaagagggagcccctgtgttccctttgggatatcagtacccatctctggaccagcttgcagacatgatcccttgcgtcctgcagtacctaaatttctctacaataattggagttggtgttggagctggagcctacatcctggcgagatatgctcttaaccacccggacactgttgaaggtcttgtcctcatcaacattgatcccaatgccaagggttggatggattgggcagcccacaagctaacaggcctcacctcttccattccggagatgatccttggacatcttttcagccaggaagagctctctggaaattctgagttgatacaaaagtacagaaatatcattacacatgcacccaacctggataacattgaattgtactggaacagctacaacaaccgccgagacctgaactttgagcgtggaggtgatatcaccctcaggtgtcctgtgatgctggtggtaggagaccaagcacctcatgaagatgcagtggtggaatgtaactcaaaactggaccccacccagacctcgttcctcaagatggctgactccggaggtcagccccagctgactcagccaggcaagctgaccgaggccttcaagtacttcctgcaaggcatgggctacatggcctcatcctgcatgactcgcctgtcccggtctcgtacagcctctctgaccagtgcagcatccgttgatggcaaccggtcccgctctcgcaccctgtcccagagcagcgagtctggaactctttcttcggggcccccggggcacaccatggaggtctcctgttgaatggcccttgttgccctagagtgggacccagccctcacctcccccagagctaacctgggaggtgctgaaggggcattgggccaccgtaagcaagggaaaaagggcagatcatgcggggagatgaccttgatctttgattgctaccctaaccttgacctttaacccgtgattccccccagctcctggaagagatgtcctaatatctcttagggacccagacccctaaattctcctcctcccccattttgatgttaaggtggagagggcatatgcatcctctgtcctgatctaggtgtctatagctgaggggtaagaggttgttgtagttgtcctggtgcctccatcagactctccctacttgtcccatatttgcaaggggaggggatttggggctggggctccattcaccaaagctgaggtggcttctcattaaccctttaggactctgaagggtatggacctacgtgaatgtgtgtcagggggagacttgctggtgggttagtggtcctcaggatgtgatagaaacatccagtgtaaaaaggaagttggaatgggagttggcgggcagtgaacgagtgtggggaaggattggtgctggggcaacaggaaggggcctggggccgtttggctgcactaactttggtagctcagtgtgcatctagagtgggactggggagggagctaagcttgggctgggctgcttggggcttggcatagggtggaaagggctaccctggggctctgaccacactgtagtatgtgtggagggtgccctcccgtctcccacaacttctgctataacaataaactgtagaggaatctga

SEQ ID NO: 158020 - DNA, 1309 bp, Homo sapiens
  Payload ID: 10955
  Gene Symbol: NDRG2
  Gene Name: NDRG family member 2
  ENST ID: ENST00000397856
  CDS Start-End: 93-1163
gcggccgcggcggcagcagaccccagagtcagaaggagtgagaaccctgacccctaatcccactgcatccagccaataggagcccagccaccatggcggagtgcaggaggtgcagatcacagaggagaagccactgttgccaggacagacgcctgagggccaagactcactctgtggagacaccatacggctctgtcactttcactgtctatggcacccccaaacccaaacgcccagcgatccttacctaccacgatgtgggactcaactataaatcttgcttccagccactgtttcagttcgaggacatgcaggaaatcattcagaactttgtgcgggttcatgtggatgcccctggaatggaagagggagcccctgtgttccctttgggatatcagtacccatctctggaccagcttgcagacatgatcccttgcgtcctgcagtacctaaatttctctacaataattggagttggtgttggagctggagcctacatcctggcgagatatgctcttaaccacccggacactgttgaaggtcttgtcctcatcaacattgatcccaatgccaagggttggatggattgggcagcccacaagctaacaggcctcacctcttccattccggagatgatccttggacatcttttcagccaggaagagctctctggaaattctgagttgatacaaaagtacagaaatatcattacacatgcacccaacctggataacattgaattgtactggaacagctacaacaaccgccgagacctgaactttgagcgtggaggtgatatcaccctcaggtgtcctgtgatgctggtggtaggagaccaagcacctcatgaagatgcagtggtggaatgtaactcaaaactggaccccacccagacctcgttcctcaagatggctgactccggaggtcagccccagctgactcagccaggcaagctgaccgaggccttcaagtacttcctgcaaggcatgggctacatggcctcatcctgcatgactcgcctgtcccggtctcgtacagcctctctgaccagtgcagcatccgttgatggcaaccggtcccgctctcgcaccctgtcccagagcagcgagtctggaactctttcttcggggcccccggggcacaccatggaggtctcctgttgaatggcccttgttgccctagagtgggacccagccctcacctcccccagagctaacctgggaggtgctgaaggggcattgggccaccgtaagcaagggaaaaagggcagatcatgcggggagatgaccttgatctttgattgctaccc

SEQ ID NO: 158021 - DNA, 2054 bp, Homo sapiens
  Payload ID: 10955
  Gene Symbol: NDRG2
  Gene Name: NDRG family member 2
  Uniprot ID: Q9UN36
  ENST ID: ENST00000397858
  CDS Start-End: 107-1222
cggccccccgcattccccgcccccacctccccgccttgttgtccaacttctcccggagcagccggagagcaggcgtcgggacgcagcaaagagaggagaggccaccatggcggagctgcaggaggtgcagatcacagaggagaagccactgttgccaggacagacgcctgaggcggccaaggaggctgagttagctgcccgaatcctcctggaccagggacagactcactctgtggagacaccatacggctctgtcactttcactgtctatggcacccccaaacccaaacgcccagcgatccttacctaccacgatgtgggactcaactataaatcttgcttccagccactgtttcagttcgaggacatgcaggaaatcattcagaactttgtgcgggttcatgtggatgcccctggaatggaagagggagcccctgtgttccctttgggatatcagtacccatctctggaccagcttgcagacatgatcccttgcgtcctgcagtacctaaatttctctacaataattggagttggtgttggagctggagcctacatcctggcgagatatgctcttaaccacccggacactgttgaaggtcttgtcctcatcaacattgatcccaatgccaagggttggatggattgggcagcccacaagctaacaggcctcacctcttccattccggagatgatccttggacatcttttcagccaggaagagctctctggaaattctgagttgatacaaaagtacagaaatatcattacacatgcacccaacctggataacattgaattgtactggaacagctacaacaaccgccgagacctgaactttgagcgtggaggtgatatcaccctcaggtgtcctgtgatgctggtggtaggagaccaagcacctcatgaagatgcagtggtggaatgtaactcaaaactggaccccacccagacctcgttcctcaagatggctgactccggaggtcagccccagctgactcagccaggcaagctgaccgaggccttcaagtacttcctgcaaggcatgggctacatggcctcatcctgcatgactcgcctgtcccggtctcgtacagcctctctgaccagtgcagcatccgttgatggcaaccggtcccgctctcgcaccctgtcccagagcagcgagtctggaactctttcttcggggcccccggggcacaccatggaggtctcctgttgaatggcccttgttgccctagagtgggacccagccctcacctcccccagagctaacctgggaggtgctgaaggggcattgggccaccgtaagcaagggaaaaagggcagatcatgcggggagatgaccttgatctttgattgctaccctaaccttgacctttaacccgtgattccccccagctcctggaagagatgtcctaatatctcttagggacccagacccctaaattctcctcctcccccattttgatgttaaggtggagagggcatatgcatcctctgtcctgatctaggtgtctatagctgaggggtaagaggttgttgtagttgtcctggtgcctccatcagactctccctacttgtcccatatttgcaaggggaggggatttggggctggggctccattcaccaaagctgaggtggcttctcattaaccctttaggactctgaagggtatggacctacgtgaatgtgtgtcagggggagacttgctggtgggttagtggtcctcaggatgtgatagaaacatccagtgtaaaaaggaagttggaatgggagttggcgggcagtgaacgagtgtggggaaggattggtgctggggcaacaggaaggggcctggggccgtttggctgcactaactttggtagctcagtgtgcatctagagtgggactggggagggagctaagcttgggctgggctgcttggggcttggcatagggtggaaagggctaccctggggctctgaccacactgtagtatgtgtggagggtgccctcccgtctcccacaacttctgctataacaataaactgtagaggaatctgagtaccgtt

SEQ ID NO: 158022 - DNA, 1500 bp, Homo sapiens
  Payload ID: 10955
  Gene Symbol: NDRG2
  Gene Name: NDRG family member 2
  Uniprot ID: Q9UN36
  ENST ID: ENST00000403829
  CDS Start-End: 22-1125
ctcaccgggttggggacagggatggaaaatggtggttccatgcaggccaccatggcggagctgcaggaggtgcagatcacagaggagaagccactgttgccaggacagacgcctgaggcggccaagactcactctgtggagacaccatacggctctgtcactttcactgtctatggcacccccaaacccaaacgcccagcgatccttacctaccacgatgtgggactcaactataaatcttgcttccagccactgtttcagttcgaggacatgcaggaaatcattcagaactttgtgcgggttcatgtggatgcccctggaatggaagagggagcccctgtgttccctttgggatatcagtacccatctctggaccagcttgcagacatgatcccttgcgtcctgcagtacctaaatttctctacaataattggagttggtgttggagctggagcctacatcctggcgagatatgctcttaaccacccggacactgttgaaggtcttgtcctcatcaacattgatcccaatgccaagggttggatggattgggcagcccacaagctaacaggcctcacctcttccattccggagatgatccttggacatcttttcagccaggaagagctctctggaaattctgagttgatacaaaagtacagaaatatcattacacatgcacccaacctggataacattgaattgtactggaacagctacaacaaccgccgagacctgaactttgagcgtggaggtgatatcaccctcaggtgtcctgtgatgctggtggtaggagaccaagcacctcatgaagatgcagtggtggaatgtaactcaaaactggaccccacccagacctcgttcctcaagatggctgactccggaggtcagccccagctgactcagccaggcaagctgaccgaggccttcaagtacttcctgcaaggcatgggctacatggcctcatcctgcatgactcgcctgtcccggtctcgtacagcctctctgaccagtgcagcatccgttgatggcaaccggtcccgctctcgcaccctgtcccagagcagcgagtctggaactctttcttcggggcccccggggcacaccatggaggtctcctgttgaatggcccttgttgccctagagtgggacccagccctcacctcccccagagctaacctgggaggtgctgaaggggcattgggccaccgtaagcaagggaaaaagggcagatcatgcggggagatgaccttgatctttgattgctaccctaaccttgacctttaacccgtgattccccccagctcctggaagagatgtcctaatatctcttagggacccagacccctaaattctcctcctcccccattttgatgttaaggtggagagggcatatgcatcctctgtcctgatctaggtgtctatagctgaggggtaagaggttgttgtagttgtcctggtgcctccatcagactctccctacttgtcccatatttgcaa

SEQ ID NO: 158023 - DNA, 545 bp, Homo sapiens
  Payload ID: 10955
  Gene Symbol: NDRG2
  Gene Name: NDRG family member 2
  ENST ID: ENST00000449431
  CDS Start-End: 1-545
actcactctgtggagacaccatacggctctgtcactttcactgtctatggcacccccaaacccaaacgcccagcgatccttacctaccacgatgtgggactcaactataaatcttgcttccagccactgtttcagttcgaggacatgcaggaaatcattcagaactttgtgcgggttcatgtggatgcccctggaatggaagagggagcccctgtgttccctttgggatatcagtacccatctctggaccagcttgcagacatgatcccttgcgtcctgcagtacctaaatttctctacaataattggagttggtgttggagctggagcctacatcctggcgagatatgctcttaaccacccggacactgttgaaggcctcacctcttccattccggagatgatccttggacatcttttcagccaggaagagctctctggaaattctgagttgatacaaaagtacagaaatatcattacacatgcacccaacctggataacattgaattgtactggaacagctacaacaaccgccgagacctgaa

SEQ ID NO: 158024 - DNA, 1919 bp, Homo sapiens
  Payload ID: 10955
  Gene Symbol: NDRG2
  Gene Name: NDRG family member 2
  ENST ID: ENST00000557353
  CDS Start-End: 40-453
aagtgaaggtggaagcggccgcggcggcagcaggccaccatggcggagctgcaggaggtgcagatcacagaggagaagccactgttgccaggacagacgcctgaggcggccaagactcactctgtggagacaccatacggctctgtcactttcactgtctatggcacccccaaacccaaacgcccagcgatccttacctaccacgatgtgggactcaactccactgtttcagttcgaggacatgcaggaaatcattcagaactttgtgcgggttcatgtggatgcccctggaatggaagagggagcccctgtgttccctttgggatatcagtacccatctctggaccagcttgcagacatgatcccttgcgtcctgcagtacctaaatttctctacaataattggagttggtgttggagctggagcctacatcctggcgagatatgctcttaaccacccggacactgttgaaggtcttgtcctcatcaacattgatcccaatgccaagggttggatggattgggcagcccacaagctaacaggcctcacctcttccattccggagatgatccttggacatcttttcagccaggaagagctctctggaaattctgagttgatacaaaagtacagaaatatcattacacatgcacccaacctggataacattgaattgtactggaacagctacaacaaccgccgagacctgaactttgagcgtggaggtgatatcaccctcaggtgtcctgtgatgctggtggtaggagaccaagcacctcatgaagatgcagtggtggaatgtaactcaaaactggaccccacccagacctcgttcctcaagatggctgactccggaggtcagccccagctgactcagccaggcaagctgaccgaggccttcaagtacttcctgcaaggcatgggctacatggcctcatcctgcatgactcgcctgtcccggtctcgtacagcctctctgaccagtgcagcatccgttgatggcaaccggtcccgctctcgcaccctgtcccagagcagcgagtctggaactctttcttcggggcccccggggcacaccatggaggtctcctgttgaatggcccttgttgccctagagtgggacccagccctcacctcccccagagctaacctgggaggtgctgaaggggcattgggccaccgtaagcaagggaaaaagggcagatcatgcggggagatgaccttgatctttgattgctaccctaaccttgacctttaacccgtgattccccccagctcctggaagagatgtcctaatatctcttagggacccagacccctaaattctcctcctcccccattttgatgttaaggtggagagggcatatgcatcctctgtcctgatctaggtgtctatagctgaggggtaagaggttgttgtagttgtcctggtgcctccatcagactctccctacttgtcccatatttgcaaggggaggggatttggggctggggctccattcaccaaagctgaggtggcttctcattaaccctttaggactctgaagggtatggacctacgtgaatgtgtgtcagggggagacttgctggtgggttagtggtcctcaggatgtgatagaaacatccagtgtaaaaaggaagttggaatgggagttggcgggcagtgaacgagtgtggggaaggattggtgctggggcaacaggaaggggcctggggccgtttggctgcactaactttggtagctcagtgtgcatctagagtgggactggggagggagctaagcttgggctgggctgcttggggcttggcatagggtggaaagggctaccctggggctctgaccacactgtagtatgtgtggagggtgccctcccgtctcccacaacttctgctataacaataaactgtagaggaatctg

SEQ ID NO: 158025 - DNA, 578 bp, Homo sapiens
  Payload ID: 10955
  Gene Symbol: NDRG2
  Gene Name: NDRG family member 2
  ENST ID: ENST00000554893
  CDS Start-End: 303-578
agcaggtagggggaggggcaggcgaggggccgtagggcctggaaggcgccagccgggccggcgggcggtgtgattgatccgcgtcccctggagctggaggctcgggggaaagggccagcacggagcgggcgctcggttgctgcgcacaaaggctgaggctccaagagctgcagggcgtgtttgggaccccagagtcagaaggagtgagaaccctgacccctaatcccactgcatccagccaataggagcccagtaagtgaccccaccccgcaggctgcaggctccttcctgtgcaggccaccatggcggagctgcaggaggtgcagatcacagaggagaagccactgttgccaggacagacgcctgaggcggccaagactcactctgtggagacaccatacggctctgtcactttcactgtctatggcacccccaaacccaaacgcccagcgatccttacctaccacgatgtgggactcaactataaatcttgcttccagccactgtttcagttcgaggacatgcaggaaatcattcagaactttgtgcgggttcatgtggatgcccctggaatggaa

SEQ ID NO: 158026 - DNA, 639 bp, Homo sapiens
  Payload ID: 10955
  Gene Symbol: NDRG2
  Gene Name: NDRG family member 2
  ENST ID: ENST00000553442
  CDS Start-End: 138-639
gtggggtgtcagtatcccggaccccagagtcagaaggagtgagaaccctgacccctaatcccactgcatccagccaataggagcccagtaagtgaccccaccccgcaggctgcaggctccttcctgtgcaggccaccatggcggagctgcaggaggtgcagatcacagaggagaagccactgttgccaggacagacgcctgaggcggccaagactcactctgtggagacaccatacggctctgtcactttcactgtctatggcacccccaaacccaaacgcccagcgatccttacctaccacgatgtgggactcaactataaatcttgcttccagccactgtttcagttcgaggacatgcaggaaatcattcagaactttgtgcgggttcatgtggatgcccctggaatggaagagggagcccctgtgttccctttgggatatcagtacccatctctggaccagcttgcagacatgatcccttgcgtcctgcagtacctaaatttctctacaataattggagttggtgttggagctggagcctacatcctggcgagatatgctcttaaccacccggacactgttgaaggtcttgtcctcatcaacattgatcccaatgccaagggttggatggattggg

SEQ ID NO: 158027 - DNA, 603 bp, Homo sapiens
  Payload ID: 10955
  Gene Symbol: NDRG2
  Gene Name: NDRG family member 2
  ENST ID: ENST00000556924
  CDS Start-End: 171-603
gttttggtgagccgagcagagcctggaagcgtccagccgcccgcccctcgccccccggccccagcacaaccctttcctgagcggcagtctgggcgggaccccagagtcagaaggagtgagaaccctgacccctaatcccactgcatccagccaataggagcccagccaccatggcggagctgcaggaggtgcagatcacagaggagaagccactgttgccaggacagacgcctgaggcggccaagactcactctgtggagacaccatacggctctgtcactttcactgtctatggcacccccaaacccaaacgcccagcgatccttacctaccacgatgtgggactcaactataaatcttgcttccagccactgtttcagttcgaggacatgcaggaaatcattcagaactttgtgcgggttcatgtggatgcccctggaatggaagagggagcccctgtgttccctttgggatatcagtacccatctctggaccagcttgcagacatgatcccttgcgtcctgcagtacctaaatttctctacaataattggagttggtgttggagctggagcctacatcctggcgagatatgctcttaacc

SEQ ID NO: 158028 - DNA, 609 bp, Homo sapiens
  Payload ID: 10955
  Gene Symbol: NDRG2
  Gene Name: NDRG family member 2
  ENST ID: ENST00000555142
  CDS Start-End: 150-609
agcgcccgtgggcgggctggggcgggccgggggcgggtctgcgggaagcccgagccggggcgggcccgagtcaaagaccccagagtcagaaggagtgagaaccctgacccctaatcccactgcatccagccaataggagcccagccaccatggcggagctgcaggaggtgcagatcacagaggagaagccactgttgccaggacagacgcctgaggcggccaagactcactctgtggagacaccatacggctctgtcactttcactgtctatggcacccccaaacccaaacgcccagcgatccttacctaccacgatgtgggactcaactataaatcttgcttccagccactgtttcagttcgaggacatgcaggaaatcattcagaactttgtgcgggttcatgtggatgcccctggaatggaagagggagcccctgtgttccctttgggatatcagtacccatctctggaccagcttgcagacatgatcccttgcgtcctgcagtacctaaatttctctacaataattggagttggtgttggagctggagcctacatcctggcgagatatgctcttaaccacccggacactgttgaaggtcttgtcc

SEQ ID NO: 158029 - DNA, 559 bp, Homo sapiens
  Payload ID: 10955
  Gene Symbol: NDRG2
  Gene Name: NDRG family member 2
  ENST ID: ENST00000557182
  CDS Start-End: 40-559
aagtgaaggtggaagcggccgcggcggcagcaggccaccatggcggagctgcaggaggtgcagatcacagaggagaagccactgttgccaggacagacgcctgaggcggccaagccactgtttcagttcgaggacatgcaggaaatcattcagaactttgtgcgggttcatgtggatgcccctggaatggaagagggagcccctgtgttccctttgggatatcagtacccatctctggaccagcttgcagacatgatcccttgcgtcctgcagtacctaaatttctctacaataattggagttggtgttggagctggagcctacatcctggcgagatatgctcttaaccacccggacactgttgaaggtcttgtcctcatcaacattgatcccaatgccaagggttggatggattgggcagcccacaagctaacaggcctcacctcttccattccggagatgatccttggacatcttttcagccaggaagagctctctggaaattctgagttgatacaaaagtacagaaatatcattacacatgcacccaacctggata

SEQ ID NO: 158030 - DNA, 848 bp, Homo sapiens
  Payload ID: 10955
  Gene Symbol: NDRG2
  Gene Name: NDRG family member 2
  ENST ID: ENST00000553867
  CDS Start-End: 93-848
gcggccgcggcggcagcagaccccagagtcagaaggagtgagaaccctgacccctaatcccactgcatccagccaataggagcccagccaccatggcggagctgcaggaggtgcagatcacagaggagaagccactgttgccaggacagacgcctgaggcggccaaggaggctgagttagctgcccgaatcctcctggaccagggacagactcactctgtggagacaccatacggctctgtcactttcactgtctatggcacccccaaacccaaacgcccagcgatccttacctaccacgatgtgggactcaactataaatcttgcttccagccactgtttcagttcgaggacatgcaggaaatcattcagaactttgtgcgggttcatgtggatgcccctggaatggaagagggagcccctgtgttccctttgggatatcagtacccatctctggaccagcttgcagacatgatcccttgcgtcctgcagtacctaaatttctctacaataattggagttggtgttggagctggagcctacatcctggcgagatatgctcttaaccacccggacactgttgaaggtcttgtcctcatcaacattgatcccaatgccaagggttggatggattgggcagcccacaagctaacaggcctcacctcttccattccggagatgatccttggacatcttttcagccaggaagagctctctggaaattctgagttgatacaaaagtacagaaatatcattacacatgcacccaacctggataacattgaattgtactggaacagctacaacaaccgccgagacctgaactttgagcgtggaggtgatatcacc

SEQ ID NO: 158031 - DNA, 580 bp, Homo sapiens
  Payload ID: 10955
  Gene Symbol: NDRG2
  Gene Name: NDRG family member 2
  ENST ID: ENST00000556561
  CDS Start-End: 227-580
gtcctacccatcccttcccgatggcgcttgccttcgcgggccgtcgggggagaacgggagaagattgtgggaccgctctcctctccctttctccactcgtgggacctacacggagactgagtagaggagagaagcgacggcaccaatctttgtaccccagagtcagaaggagtgagaaccctgacccctaatcccactgcatccagccaataggagcccagccaccatggcggagctgcaggaggtgcagatcacagaggagaagccactgttgccaggacagacgcctgaggcggccaaggaggctgagttagctgcccgaatcctcctggaccagggacagactcactctgtggagacaccatacggctctgtcactttcactgtctatggcacccccaaacccaaacgcccagcgatccttacctaccacgatgtgggactcaactataaatcttgcttccagccactgtttcagttcgaggacatgcaggaaatcattcagaactttgtgcgggttcatgtggatgcccctggaatggaagagggagcccctgtgttccctttgggatatcagtac

SEQ ID NO: 158032 - DNA, 527 bp, Homo sapiens
  Payload ID: 10955
  Gene Symbol: NDRG2
  Gene Name: NDRG family member 2
  ENST ID: ENST00000557633
  CDS Start-End: 1-420
cccaaacccaaacgcccagcgatccttacctaccacgatgtgggactcaactataaatcttgcttccagccactgtttcagttcgaggacatgcaggaaatcattcagaactttgtgcgggttcatgtggatgcccctggaatggaagagggagcccctgtgttccctttgggatatcagtacccatctctggaccagcttgcagacatgatcccttgcgtcctgcagtacctaaatttctctacaataattggagttggtgttggagctggagcctacatcctggcgagatatgctcttaaccacccggacactgttgaaggtcttgtcctcatcaacattgatcccaatgccaagggttggatggattgggcagcccacaagctaagcttgggctgggctgcttggggcttggcatagggtggaaagggctaccctggggctctgaccacactgtagtatgtgtggagggtgccctcccgtctcccacaacttctgctataacaataaactgtagaggaatctga

SEQ ID NO: 158033 - DNA, 635 bp, Homo sapiens
  Payload ID: 10955
  Gene Symbol: NDRG2
  Gene Name: NDRG family member 2
  ENST ID: ENST00000556457
  CDS Start-End: 213-635
cttaatctagttctctgtgttcgggcggggggagtcgaactcgtggggtgtcagtatcccgggttcgtctccccactaccggttcccaccactgagtctgggggcgaaggaaggagccagagtgcaattgcagatccagaccccagagtcagaaggagtgagaaccctgacccctaatcccactgcatccagccaataggagcccagccaccatggcggagctgcaggaggtgcagatcacagaggagaagccactgttgccaggacagacgcctgaggcggccaaggaggctgagttagctgcccgaatcctcctggaccagggacagactcactctgtggagacaccatacggctctgtcactttcactgtctatggcacccccaaacccaaacgcccagcgatccttacctaccacgatgtgggactcaactataaatcttgcttccagccactgtttcagttcgaggacatgcaggaaatcattcagaactttgtgcgggttcatgtggatgcccctggaatggaagagggagcccctgtgttccctttgggatatcagtacccatctctggaccagcttgcagacatgatcccttgcgtcctgcagtacctaaatttctctacaataatt

SEQ ID NO: 158034 - DNA, 553 bp, Homo sapiens
  Payload ID: 10955
  Gene Symbol: NDRG2
  Gene Name: NDRG family member 2
  ENST ID: ENST00000554379
  CDS Start-End: 72-440
agcccgagccggggcgggcccgagtcaaaggcaagtgaaggtggaagcggccgcggcggcagcaggccaccatggcggagctgcaggaggtgcagatcacagaggagaagccactgttgccaggacagacgcctgaggcggccaagactcactctgtggagacaccatacggctctgtcactttcactgtctatggcacccccaaacccaaacgcccagcgatccttacctaccacgatgtgggactcaactataaatcttgcttccagccactgtttcagttcgaggacatgcaggaaatcattcagaactttgtgcgggttcatgtggatgcccctggaatggaagagggagcccctgtgttccctttgggatatcagtacccatctctggaccagcttgcagacatgatcccttgcgtcctgcagtacctaaagtgagaggcctgggaacccctccaaaccagagttctctttccagcacaaggagacccttagaacttccagtttctctacaataattggagttggtgttggagctggagcctacatcc

SEQ ID NO: 158035 - DNA, 943 bp, Homo sapiens
  Payload ID: 10955
  Gene Symbol: NDRG2
  Gene Name: NDRG family member 2
  ENST ID: ENST00000553784
  CDS Start-End: 426-943
ttttggtaccctgtcctttagaatactcagtcactgagctacaagtttcactccctacctgagagtgtggggtggcccctaaatatagcccgagaaatctgagctacacttctgccccaccctggtattttggtccagggcagaggagggaggggtctggaggtgtggtgttgagggtggcagtggggatggtgagtatcaagagaagggctgtcctgattcctcttccaaagcttccaccgatcagcctggaaacggagctgggggcaggaaaggccctctgtgtgttctagagtagtcttcaacccctgggtccctctgttccctgcatcttcctgtgctgagagaggaagcctggtgtttgaggcgatgtggggatgtagagacaacttcccagtctcatttcctcatcctgccaggccaccatggcggagctgcaggaggtgcagatcacagaggagaagccactgttgccaggacagacgcctgaggcggccaaggaggctgagttagctgcccgaatcctcctggaccagggacagactcactctgtggagacaccatacggctctgtcactttcactgtctatggcacccccaaacccaaacgcccagcgatccttacctaccacgatgtgggactcaactataaatcttgcttccagccactgtttcagttcgaggacatgcaggaaatcattcagaactttgtgcgggttcatgtggatgcccctggaatggaagagggagcccctgtgttccctttgggatatcagtacccatctctggaccagcttgcagacatgatcccttgcgtcctgcagtacctaaatttctctacaataattggagttggtgttggagctggagcctacatcctggcgagatatgctcttaaccacccggacactgttgaaggtcttgtcctcatcaacattgatcc

SEQ ID NO: 158036 - DNA, 775 bp, Homo sapiens
  Payload ID: 10955
  Gene Symbol: NDRG2
  Gene Name: NDRG family member 2
  ENST ID: ENST00000555384
  CDS Start-End: 192-775
agcaggtagggggaggggcaggcgaggggccgtagggcctggaaggcgccagccgggccggcgggcggtgtgattgatccgcgtcccctggagctggaggctcgggggaaagggccagcacggagcgggcgctcggttgctgcgcacaaaggctgaggctccaagagctgcagggcgtgtttggggccaccatggcggagctgcaggaggtgcagatcacagaggagaagccactgttgccaggacagacgcctgaggcggccaaggaggctgagttagctgcccgaatcctcctggaccagggacagactcactctgtggagacaccatacggctctgtcactttcactgtctatggcacccccaaacccaaacgcccagcgatccttacctaccacgatgtgggactcaactataaatcttgcttccagccactgtttcagttcgaggacatgcaggaaatcattcagaactttgtgcgggttcatgtggatgcccctggaatggaagagggagcccctgtgttccctttgggatatcagtacccatctctggaccagcttgcagacatgatcccttgcgtcctgcagtacctaaatttctctacaataattggagttggtgttggagctggagcctacatcctggcgagatatgctcttaaccacccggacactgttgaaggtcttgtcctcatcaacattgatcccaatgccaagggttggatggattgggcagcccacaagctaacaggcctcacctcttccattccgga

SEQ ID NO: 158037 - DNA, 871 bp, Homo sapiens
  Payload ID: 10955
  Gene Symbol: NDRG2
  Gene Name: NDRG family member 2
  ENST ID: ENST00000555869
  CDS Start-End: 207-871
ctagttctctgtgttcgggcggggggagtcgaactcgtggggtgtcagtatcccgggttcgtctccccactaccggttcccaccactgagtctgggggcgaaggaaggagccagagtgcaattgcagatccagaccccagagtcagaaggagtgagaaccctgacccctaatcccactgcatccagccaataggagcccagccaccatggcggagctgcaggaggtgcagatcacagaggagaagccactgttgccaggacagacgcctgaggcggccaagactcactctgtggagacaccatacggctctgtcactttcactgtctatggcacccccaaacccaaacgcccagcgatccttacctaccacgatgtgggactcaactataaatcttgcttccagccactgtttcagttcgaggacatgcaggaaatcattcagaactttgtgcgggttcatgtggatgcccctggaatggaagagggagcccctgtgttccctttgggatatcagtacccatctctggaccagcttgcagacatgatcccttgcgtcctgcagtacctaaatttctctacaataattggagttggtgttggagctggagcctacatcctggcgagatatgctcttaaccacccggacactgttgaaggtcttgtcctcatcaacattgatcccaatgccaagggttggatggattgggcagcccacaagctaacaggcctcacctcttccattccggagatgatccttggacatcttttcagccaggaagagctctctggaaattctgagttgatacaaaagtacagaaatatcattacacatgcacccaacctggataacattgaattgtactggaacag

SEQ ID NO: 158038 - DNA, 632 bp, Homo sapiens
  Payload ID: 10955
  Gene Symbol: NDRG2
  Gene Name: NDRG family member 2
  ENST ID: ENST00000554561
  CDS Start-End: 273-632
cttgtagcctatattgattccggctcgagcctagagaggacgtgttctctggacttaggggtagacagacactggggagggttagtgacccgaggaggttgatgaccctgggagtctgggtcttggctgaggctttccgtccctgaaagaccccaggtctgtctcccatgtcattcacctcgttgctgtgttttctcagaccccagagtcagaaggagtgagaaccctgacccctaatcccactgcatccagccaataggagcccagccaccatggcggagctgcaggaggtgcagatcacagaggagaagccactgttgccaggacagacgcctgaggcggccaagactcactctgtggagacaccatacggctctgtcactttcactgtctatggcacccccaaacccaaacgcccagcgatccttacctaccacgatgtgggactcaactataaatcttgcttccagccactgtttcagttcgaggacatgcaggaaatcattcagaactttgtgcgggttcatgtggatgcccctggaatggaagagggagcccctgtgttccctttgggatatcagtacccatctctggaccagcttgcagacatgatcccttgcgtcctgcagtac

SEQ ID NO: 158039 - DNA, 565 bp, Homo sapiens
  Payload ID: 10955
  Gene Symbol: NDRG2
  Gene Name: NDRG family member 2
  ENST ID: ENST00000554398
  CDS Start-End: 118-565
accccagagtcagaaggagtgagaaccctgacccctaatcccactgcatccagccaataggagcccagtaagtgaccccaccccgcaggctgcaggctccttcctgtgcaggccaccatggcggagctgcaggaggtgcagatcacagaggagaagccactgttgccaggacagacgcctgaggcggccaaggaggctgagttagctgcccgaatcctcctggaccagggacagactcactctgtggagacaccatacggctctgtcactttcactgtctatggcacccccaaacccaaacgcccagcgatccttacctaccacgatgtgggactcaactataaatcttgcttccagccactgtttcagttcgaggacatgcaggaaatcattcagaactttgtgcgggttcatgtggatgcccctggaatggaagagggagcccctgtgttccctttgggatatcagtacccatctctggaccagcttgcagacatgatcccttgcgtcctgcagtacctaaatttctctacaataattggagttggtgttggagctggagcct

SEQ ID NO: 158040 - DNA, 1162 bp, Homo sapiens
  Payload ID: 10955
  Gene Symbol: NDRG2
  Gene Name: NDRG family member 2
  ENST ID: ENST00000555026
  CDS Start-End: 344-1162
gtaatctcagcagttttgggaggctgaggagagtagatcacctgagctcaggagtttgagatcagcttatatagatggggaaactcccacctccctaagctaagaggcgttctatcacagtgtgtattttcatcacgagcacacatttttatttacctttcctcttatgaactgtggacttcttacaagatctcattagcaatgtgggctttctcatgtccctgtggctccgtggatgttcccaagcttactggttttggagtcttgcacagcctccttaacgtgaagacaatgaggatgaagacttttatgatgagccacttccactaaacgaatagccaccatggcggagctgcaggaggtgcagatcacagaggagaagccactgttgccaggacagacgcctgaggcggccaagactcactctgtggagacaccatacggctctgtcactttcactgtctatggcacccccaaacccaaacgcccagcgatccttacctaccacgatgtgggactcaactataaatcttgcttccagccactgtttcagttcgaggacatgcaggaaatcattcagaactttgtgcgggttcatgtggatgcccctggaatggaagagggagcccctgtgttccctttgggatatcagtacccatctctggaccagcttgcagacatgatcccttgcgtcctgcagtacctaaatttctctacaataattggagttggtgttggagctggagcctacatcctggcgagatatgctcttaaccacccggacactgttgaaggtcttgtcctcatcaacattgatcccaatgccaagggttggatggattgggcagcccacaagctaacaggcctcacctcttccattccggagatgatccttggacatcttttcagccaggaagagctctctggaaattctgagttgatacaaaagtacagaaatatcattacacatgcacccaacctggataacattgaattgtactggaacagctacaacaaccgccgagacctgaactttgagcgtggaggtgatatcaccctcaggtgtcctgtgatgctggtggtaggagaccaagcacctcatgaagatgcagtggtggaatgtaactcaaaactggaccccacccagacctcgttcctcaag

SEQ ID NO: 158041 - DNA, 669 bp, Homo sapiens
  Payload ID: 10955
  Gene Symbol: NDRG2
  Gene Name: NDRG family member 2
  ENST ID: ENST00000554531
  CDS Start-End: 206-669
attctaactcacaccactgcttcaccactaccctagtctctctccccatacactataattgggagtcaggcccttgtctcgtcactacactaaccttcatcctttccgtgtctctctttgtcaatctctttctgtctttggtcatttgttggtctgtctttacttgcctctctttgtctgtttgtctctccatctgggacgccacatggtcatgtgtttctgtgtgaatccgtgtgtgtctctccaggaggctgagttagctgcccgaatcctcctggaccagggacagactcactctgtggagacaccatacggctctgtcactttcactgtctatggcacccccaaacccaaacgcccagcgatccttacctaccacgatgtgggactcaactataaatcttgcttccagccactgtttcagttcgaggacatgcaggaaatcattcagaactttgtgcgggttcatgtggatgcccctggaatggaagagggagcccctgtgttccctttgggatatcagtacccatctctggaccagcttgcagacatgatcccttgcgtcctgcagtacctaaatttctctacaataattggagttggtgttggagctggagcctacatcctggcgagatatgctcttaaccacccggacactgttgaaggtct

SEQ ID NO: 158042 - DNA, 587 bp, Homo sapiens
  Payload ID: 10955
  Gene Symbol: NDRG2
  Gene Name: NDRG family member 2
  ENST ID: ENST00000554472
  CDS Start-End: 144-587
atattgattccggctcgagcctagagaggacgtgttctctggacttaggggtagacagacactggggaggaccccagagtcagaaggagtgagaaccctgacccctaatcccactgcatccagccaataggagcccagccaccatggcggagctgcaggaggtgcagatcacagaggagaagccactgttgccaggacagacgcctgaggcggccaaggaggctgagttagctgcccgaatcctcctggaccagggacagactcactctgtggagacaccatacggctctgtcactttcactgtctatggcacccccaaacccaaacgcccagcgatccttacctaccacgatgtgggactcaactataaatcttgcttccagccactgtttcagttcgaggacatgcaggaaatcattcagaactttgtgcgggttcatgtggatgcccctggaatggaagagggagcccctgtgttccctttgggatatcagtacccatctctggaccagcttgcagacatgatcccttgcgtcctgcagtacctaaatttctctacaataattggagttggtgttggagctgga

SEQ ID NO: 158043 - DNA, 823 bp, Homo sapiens
  Payload ID: 10955
  Gene Symbol: NDRG2
  Gene Name: NDRG family member 2
  ENST ID: ENST00000555695
  CDS Start-End: 38-448
aatcccactgcatccagccaataggagcccagccaccatggcggagctgcaggaggtgcagatcacagaggagaagccactgttgccaggacagacgcctgaggcggccaaggaggctgagttagctgcccgaatcctcctggaccagggacagactcactctgtggagacaccatacggctctgtcactttcactgtctatggcacccccaaacccaaacgcccagcgatccttacctaccacgatgtgggactcaactataaatcttgcttccagccactgtttcagttcgaggacatgcaggaaatcattcagaactttgtgcgggttcatgtggatgcccctggaatggaagagggagcccctgtgttccctttgggatatcagtacccatctctggaccagcttgcagacatgatcccttgcgtcctgcagtacctaaagtgagaggcctgggaacccctccaaaccagagttctctttccagcacaaggagacccttagaacttccagtttctctacaataattggagttggtgttggagctggagcctacatcctggcgagatatgctcttaaccacccggacactgttgaaggtcttgtcctcatcaacattgatcccaatgccaagggttggatggattgggcagcccacaagctaacaggcctcacctcttccattccggagatgatccttggacatcttttcagccaggaagagctctctggaaattctgagttgatacaaaagtacagaaatatcattacacatgcacccaacctggataacattgaattgtactggaacagctacaacaa

SEQ ID NO: 158044 - DNA, 579 bp, Homo sapiens
  Payload ID: 10955
  Gene Symbol: NDRG2
  Gene Name: NDRG family member 2
  ENST ID: ENST00000557616
  CDS Start-End: 127-495
ggcgggcccgagtcaaaggcaagtgaaggtggaagcggccgcggcggcagcagaccccagagtcagaaggagtgagaaccctgacccctaatcccactgcatccagccaataggagcccagccaccatggcggagctgcaggaggtgcagatcacagaggagaagccactgttgccaggacagacgcctgaggcggccaagactcactctgtggagacaccatacggctctgtcactttcactgtctatggcacccccaaacccaaacgcccagcgatccttacctaccacgatgtgggactcaactataaatcttgcttccagccactgtttcagttcgaggacatgcaggaaatcattcagaactttgtgcgggttcatgtggatgcccctggaatggaagagggagcccctgtgttccctttgggatatcagtacccatctctggaccagcttgcagacatgatcccttgcgtcctgcagtacctaaagtgagaggcctgggaacccctccaaaccagagttctctttccagcacaaggagacccttagaacttccagtttctctacaataattgg

SEQ ID NO: 158045 - DNA, 593 bp, Homo sapiens
  Payload ID: 10955
  Gene Symbol: NDRG2
  Gene Name: NDRG family member 2
  ENST ID: ENST00000557264
  CDS Start-End: 144-593
atattgattccggctcgagcctagagaggacgtgttctctggacttaggggtagacagacactggggaggaccccagagtcagaaggagtgagaaccctgacccctaatcccactgcatccagccaataggagcccagccaccatggcggagctgcaggaggtgcagatcacagaggagaagccactgttgccaggacagacgcctgaggcggccaagactcactctgtggagacaccatacggctctgtcactttcactgtctatggcacccccaaacccaaacgcccagcgatccttacctaccacgatgtgggactcaactataaatcttgcttccagccactgtttcagttcgaggacatgcaggaaatcattcagaactttgtgcgggttcatgtggatgcccctggaatggaagagggagcccctgtgttccctttgggatatcagtacccatctctggaccagcttgcagacatgatcccttgcgtcctgcagtacctaaatttctctacaataattggagttggtgttggagctggagcctacatcctggcgagatatgctcttaaccacccggacactgttgaa

SEQ ID NO: 158046 - DNA, 561 bp, Homo sapiens
  Payload ID: 10955
  Gene Symbol: NDRG2
  Gene Name: NDRG family member 2
  ENST ID: ENST00000554483
  CDS Start-End: 161-561
aagtgaaggtggaagcggccgcggcggcagcagaccccagagtcagaaggagtgagaaccctgacccctaatcccactgcatccagccaataggagcccagtaagtgaccccaccccgcaggctgcaggctccttcctgtgcaggtctgtccaggccaccatggcggagctgcaggaggtgcagatcacagaggagaagccactgttgccaggacagacgcctgaggcggccaagactcactctgtggagacaccatacggctctgtcactttcactgtctatggcacccccaaacccaaacgcccagcgatccttacctaccacgatgtgggactcaactataaatcttgcttccagccactgtttcagttcgaggacatgcaggaaatcattcagaactttgtgcgggttcatgtggatgcccctggaatggaagagggagcccctgtgttccctttgggatatcagtacccatctctggaccagcttgcagacatgatcccttgcgtcctgcagtacctaaatttctctacaataattggagttggtgttggagctgg

SEQ ID NO: 158047 - DNA, 531 bp, Homo sapiens
  Payload ID: 10955
  Gene Symbol: NDRG2
  Gene Name: NDRG family member 2
  ENST ID: ENST00000553563
  CDS Start-End: 208-531
attcctcttccaaagcttccaccgatcagcctggaaacggagctgggggcaggaaaggccctctgtgtgttctagagtagtcttcaacccctgggtccctctgttccctgcatcttcctgtgctgagagaggaagcctggtgtttgaggcgatgtggggatgtagagacaacttcccagtctcatttcctcatcctgccaggccaccatggcggagctgcaggaggtgcagatcacagaggagaagccactgttgccaggacagacgcctgaggcggccaagactcactctgtggagacaccatacggctctgtcactttcactgtctatggcacccccaaacccaaacgcccagcgatccttacctaccacgatgtgggactcaactccactgtttcagttcgaggacatgcaggaaatcattcagaactttgtgcgggttcatgtggatgcccctggaatggaagagggagcccctgtgttccctttgggatatcagtacccatctctggaccagcttgcagacatgat

SEQ ID NO: 158048 - DNA, 2880 bp, Homo sapiens
  Payload ID: 10955
  Gene Symbol: NDRG2
  Gene Name: NDRG family member 2
  Uniprot ID: Q9UN36
  ENST ID: ENST00000556147
  CDS Start-End: 942-2057
gtgattgatccgcgtcccctggagctggaggctcgggggaaagggccagcacggagcgggcgctcggttgctgcgcacaaaggctgaggctccaagagctgcagggcgtgtttggggtgcgcgcgaggttgtgtgcaaggtccggggcgcttggcaccggccacgcaagggtgtcagtctccacgcggacgggctgcgtagggactcgtagggacgggttccgggtgctgggcccggccggtctcctctgtcctacccatcccttcccgatggcgcttgccttcgcgggccgtcgggggagaacgggagaagattgtgggaccgctctcctctccctttctccactcgtgggacctacacggagactgagtagaggagagaagcgacggcaccaatctttgtgtttgtttttaaattgtggagggaaacagccatgctctgctaccctcctcttactggagagctgtcaaaaattttggggatcccctattcccccgcgtttagtccccctgcagatagaaaattgaggccaaatgtagtaactaactggggcaaggtcacactgggagtggcagagccgggattcgaatccggaggttctgacagggccaccctcttacctccacatcagcacttccttctctcctccgcgcagcctgaactgatgcccttgtagcctatattgattccggctcgagcctagagaggacgtgttctctggacttaggggtagacagacactggggagggttagtgacccgaggaggttgatgaccctgggagtctgggtcttggctgaggctttccgtccctgaaagaccccaggtctgtctcccatgtcattcacctcgttgctgtgttttctcagaccccagagtcagaaggagtgagaaccctgacccctaatcccactgcatccagccaataggagcccagccaccatggcggagctgcaggaggtgcagatcacagaggagaagccactgttgccaggacagacgcctgaggcggccaaggaggctgagttagctgcccgaatcctcctggaccagggacagactcactctgtggagacaccatacggctctgtcactttcactgtctatggcacccccaaacccaaacgcccagcgatccttacctaccacgatgtgggactcaactataaatcttgcttccagccactgtttcagttcgaggacatgcaggaaatcattcagaactttgtgcgggttcatgtggatgcccctggaatggaagagggagcccctgtgttccctttgggatatcagtacccatctctggaccagcttgcagacatgatcccttgcgtcctgcagtacctaaatttctctacaataattggagttggtgttggagctggagcctacatcctggcgagatatgctcttaaccacccggacactgttgaaggtcttgtcctcatcaacattgatcccaatgccaagggttggatggattgggcagcccacaagctaacaggcctcacctcttccattccggagatgatccttggacatcttttcagccaggaagagctctctggaaattctgagttgatacaaaagtacagaaatatcattacacatgcacccaacctggataacattgaattgtactggaacagctacaacaaccgccgagacctgaactttgagcgtggaggtgatatcaccctcaggtgtcctgtgatgctggtggtaggagaccaagcacctcatgaagatgcagtggtggaatgtaactcaaaactggaccccacccagacctcgttcctcaagatggctgactccggaggtcagccccagctgactcagccaggcaagctgaccgaggccttcaagtacttcctgcaaggcatgggctacatggcctcatcctgcatgactcgcctgtcccggtctcgtacagcctctctgaccagtgcagcatccgttgatggcaaccggtcccgctctcgcaccctgtcccagagcagcgagtctggaactctttcttcggggcccccggggcacaccatggaggtctcctgttgaatggcccttgttgccctagagtgggacccagccctcacctcccccagagctaacctgggaggtgctgaaggggcattgggccaccgtaagcaagggaaaaagggcagatcatgcggggagatgaccttgatctttgattgctaccctaaccttgacctttaacccgtgattccccccagctcctggaagagatgtcctaatatctcttagggacccagacccctaaattctcctcctcccccattttgatgttaaggtggagagggcatatgcatcctctgtcctgatctaggtgtctatagctgaggggtaagaggttgttgtagttgtcctggtgcctccatcagactctccctacttgtcccatatttgcaaggggaggggatttggggctggggctccattcaccaaagctgaggtggcttctcattaaccctttaggactctgaagggtatggacctacgtgaatgtgtgtcagggggagacttgctggtgggttagtggtcctcaggatgtgatagaaacatccagtgtaaaaaggaagttggaatgggagttggcgggcagtgaacgagtgtggggaaggattggtgctggggcaacaggaaggggcctggggccgtttggctgcactaactttggtagctcagtgtgcatctagagtgggactggggagggagctaagcttgggctgggctgcttggggcttggcatagggtggaaagggctaccctggggctctgaccacactgtagtatgtgtggagggtgccctcccgtctcccacaacttctgctataacaataaactgtagaggaatctg

SEQ ID NO: 158049 - DNA, 671 bp, Homo sapiens
  Payload ID: 10955
  Gene Symbol: NDRG2
  Gene Name: NDRG family member 2
  ENST ID: ENST00000556420
  CDS Start-End: 192-671
agcaggtagggggaggggcaggcgaggggccgtagggcctggaaggcgccagccgggccggcgggcggtgtgattgatccgcgtcccctggagctggaggctcgggggaaagggccagcacggagcgggcgctcggttgctgcgcacaaaggctgaggctccaagagctgcagggcgtgtttggggccaccatggcggagctgcaggaggtgcagatcacagaggagaagccactgttgccaggacagacgcctgaggcggccaagactcactctgtggagacaccatacggctctgtcactttcactgtctatggcacccccaaacccaaacgcccagcgatccttacctaccacgatgtgggactcaactataaatcttgcttccagccactgtttcagttcgaggacatgcaggaaatcattcagaactttgtgcgggttcatgtggatgcccctggaatggaagagggagcccctgtgttccctttgggatatcagtacccatctctggaccagcttgcagacatgatcccttgcgtcctgcagtacctaaatttctctacaataattggagttggtgttggagctggagcctacatcctggcgagatatgctcttaaccacccggacactgttgaaggtcttgtcctcatcaacattgatcccaat

SEQ ID NO: 158050 - DNA, 1051 bp, Homo sapiens
  Payload ID: 10955
  Gene Symbol: NDRG2
  Gene Name: NDRG family member 2
  ENST ID: ENST00000556008
  CDS Start-End: 150-1051
aagtgaaggtggaagcggccgcggcggcagcaggtctgtctcccatgtcattcacctcgttgctgtgttttctcagaccccagagtcagaaggagtgagaaccctgacccctaatcccactgcatccagccaataggagcccagccaccatggcggagctgcaggaggtgcagatcacagaggagaagccactgttgccaggacagacgcctgaggcggccaagactcactctgtggagacaccatacggctctgtcactttcactgtctatggcacccccaaacccaaacgcccagcgatccttacctaccacgatgtgggactcaactataaatcttgcttccagccactgtttcagttcgaggacatgcaggaaatcattcagaactttgtgcgggttcatgtggatgcccctggaatggaagagggagcccctgtgttccctttgggatatcagtacccatctctggaccagcttgcagacatgatcccttgcgtcctgcagtacctaaatttctctacaataattggagttggtgttggagctggagcctacatcctggcgagatatgctcttaaccacccggacactgttgaaggtcttgtcctcatcaacattgatcccaatgccaagggttggatggattgggcagcccacaagctaacaggcctcacctcttccattccggagatgatccttggacatcttttcagccaggaagagctctctggaaattctgagttgatacaaaagtacagaaatatcattacacatgcacccaacctggataacattgaattgtactggaacagctacaacaaccgccgagacctgaactttgagcgtggaggtgatatcaccctcaggtgtcctgtgatgctggtggtaggagaccaagcacctcatgaagatgcagtggtggaatgtaactcaaaactggaccccacccagacctcgttcctcaagatggctgactccggaggtcagccccagctgactcagccaggcaagctgaccgaggccttcaagtacttcctgcaaggcatggg

SEQ ID NO: 158051 - DNA, 583 bp, Homo sapiens
  Payload ID: 10955
  Gene Symbol: NDRG2
  Gene Name: NDRG family member 2
  ENST ID: ENST00000556688
  CDS Start-End: 162-583
gagtcaaaggcaagtgaaggtggaagcggccgcggcggcagcagaccccagagtcagaaggagtgagaaccctgacccctaatcccactgcatccagccaataggagcccagtaagtgaccccaccccgcaggctgcaggctccttcctgtgcaggccaccatggcggagctgcaggaggtgcagatcacagaggagaagccactgttgccaggacagacgcctgaggcggccaaggaggctgagttagctgcccgaatcctcctggaccagggacagactcactctgtggagacaccatacggctctgtcactttcactgtctatggcacccccaaacccaaacgcccagcgatccttacctaccacgatgtgggactcaactataaatcttgcttccagccactgtttcagttcgaggacatgcaggaaatcattcagaactttgtgcgggttcatgtggatgcccctggaatggaagagggagcccctgtgttccctttgggatatcagtacccatctctggaccagcttgcagacatgatcccttgcgtcctgcagtacctaaatttctctacaataat

SEQ ID NO: 158052 - DNA, 1980 bp, Homo sapiens
  Payload ID: 10955
  Gene Symbol: NDRG2
  Gene Name: NDRG family member 2
  Uniprot ID: Q9UN36
  ENST ID: ENST00000554143
  CDS Start-End: 84-1157
gggtctgcgggaagcccgagccggggcgggcccgagtcaaaggcaagtgaaggtggaagcggccgcggcggcagcaggccaccatggcggagctgcaggaggtgcagatcacagaggagaagccactgttgccaggacagacgcctgaggcggccaagactcactctgtggagacaccatacggctctgtcactttcactgtctatggcacccccaaacccaaacgcccagcgatccttacctaccacgatgtgggactcaactataaatcttgcttccagccactgtttcagttcgaggacatgcaggaaatcattcagaactttgtgcgggttcatgtggatgcccctggaatggaagagggagcccctgtgttccctttgggatatcagtacccatctctggaccagcttgcagacatgatcccttgcgtcctgcagtacctaaatttctctacaataattggagttggtgttggagctggagcctacatcctggcgagatatgctcttaaccacccggacactgttgaaggtcttgtcctcatcaacattgatcccaatgccaagggttggatggattgggcagcccacaagctaacaggcctcacctcttccattccggagatgatccttggacatcttttcagccaggaagagctctctggaaattctgagttgatacaaaagtacagaaatatcattacacatgcacccaacctggataacattgaattgtactggaacagctacaacaaccgccgagacctgaactttgagcgtggaggtgatatcaccctcaggtgtcctgtgatgctggtggtaggagaccaagcacctcatgaagatgcagtggtggaatgtaactcaaaactggaccccacccagacctcgttcctcaagatggctgactccggaggtcagccccagctgactcagccaggcaagctgaccgaggccttcaagtacttcctgcaaggcatgggctacatggcctcatcctgcatgactcgcctgtcccggtctcgtacagcctctctgaccagtgcagcatccgttgatggcaaccggtcccgctctcgcaccctgtcccagagcagcgagtctggaactctttcttcggggcccccggggcacaccatggaggtctcctgttgaatggcccttgttgccctagagtgggacccagccctcacctcccccagagctaacctgggaggtgctgaaggggcattgggccaccgtaagcaagggaaaaagggcagatcatgcggggagatgaccttgatctttgattgctaccctaaccttgacctttaacccgtgattccccccagctcctggaagagatgtcctaatatctcttagggacccagacccctaaattctcctcctcccccattttgatgttaaggtggagagggcatatgcatcctctgtcctgatctaggtgtctatagctgaggggtaagaggttgttgtagttgtcctggtgcctccatcagactctccctacttgtcccatatttgcaaggggaggggatttggggctggggctccattcaccaaagctgaggtggcttctcattaaccctttaggactctgaagggtatggacctacgtgaatgtgtgtcagggggagacttgctggtgggttagtggtcctcaggatgtgatagaaacatccagtgtaaaaaggaagttggaatgggagttggcgggcagtgaacgagtgtggggaaggattggtgctggggcaacaggaaggggcctggggccgtttggctgcactaactttggtagctcagtgtgcatctagagtgggactggggagggagctaagcttgggctgggctgcttggggcttggcatagggtggaaagggctaccctggggctctgaccacactgtagtatgtgtggagggtgccctcccgtctcccacaacttctgctataacaataaactgtagaggaatctg

SEQ ID NO: 158053 - DNA, 2216 bp, Homo sapiens
  Payload ID: 10955
  Gene Symbol: NDRG2
  Gene Name: NDRG family member 2
  Uniprot ID: Q9UN36
  ENST ID: ENST00000555158
  CDS Start-End: 319-1392
agggggaggggcaggcgaggggccgtagggcctggaaggcgccagccgggccggcgggcggtgtgattgatccgcgtcccctggagctggaggctcgggggaaagggccagcacggagcgggcgctcggttgctgcgcacaaaggctgaggctccaagagctgcagggcgtgtttggggtgcgcgcgaggttgtgtgcaagaccccagagtcagaaggagtgagaaccctgacccctaatcccactgcatccagccaataggagcccagtaagtgaccccaccccgcaggctgcaggctccttcctgtgcaggccaccatggcggagctgcaggaggtgcagatcacagaggagaagccactgttgccaggacagacgcctgaggcggccaagactcactctgtggagacaccatacggctctgtcactttcactgtctatggcacccccaaacccaaacgcccagcgatccttacctaccacgatgtgggactcaactataaatcttgcttccagccactgtttcagttcgaggacatgcaggaaatcattcagaactttgtgcgggttcatgtggatgcccctggaatggaagagggagcccctgtgttccctttgggatatcagtacccatctctggaccagcttgcagacatgatcccttgcgtcctgcagtacctaaatttctctacaataattggagttggtgttggagctggagcctacatcctggcgagatatgctcttaaccacccggacactgttgaaggtcttgtcctcatcaacattgatcccaatgccaagggttggatggattgggcagcccacaagctaacaggcctcacctcttccattccggagatgatccttggacatcttttcagccaggaagagctctctggaaattctgagttgatacaaaagtacagaaatatcattacacatgcacccaacctggataacattgaattgtactggaacagctacaacaaccgccgagacctgaactttgagcgtggaggtgatatcaccctcaggtgtcctgtgatgctggtggtaggagaccaagcacctcatgaagatgcagtggtggaatgtaactcaaaactggaccccacccagacctcgttcctcaagatggctgactccggaggtcagccccagctgactcagccaggcaagctgaccgaggccttcaagtacttcctgcaaggcatgggctacatggcctcatcctgcatgactcgcctgtcccggtctcgtacagcctctctgaccagtgcagcatccgttgatggcaaccggtcccgctctcgcaccctgtcccagagcagcgagtctggaactctttcttcggggcccccggggcacaccatggaggtctcctgttgaatggcccttgttgccctagagtgggacccagccctcacctcccccagagctaacctgggaggtgctgaaggggcattgggccaccgtaagcaagggaaaaagggcagatcatgcggggagatgaccttgatctttgattgctaccctaaccttgacctttaacccgtgattccccccagctcctggaagagatgtcctaatatctcttagggacccagacccctaaattctcctcctcccccattttgatgttaaggtggagagggcatatgcatcctctgtcctgatctaggtgtctatagctgaggggtaagaggttgttgtagttgtcctggtgcctccatcagactctccctacttgtcccatatttgcaaggggaggggatttggggctggggctccattcaccaaagctgaggtggcttctcattaaccctttaggactctgaagggtatggacctacgtgaatgtgtgtcagggggagacttgctggtgggttagtggtcctcaggatgtgatagaaacatccagtgtaaaaaggaagttggaatgggagttggcgggcagtgaacgagtgtggggaaggattggtgctggggcaacaggaaggggcctggggccgtttggctgcactaactttggtagctcagtgtgcatctagagtgggactggggagggagctaagcttgggctgggctgcttggggcttggcatagggtggaaagggctaccctggggctctgaccacactgtagtatgtgtggagggtgccctcccgtctcccacaacttctgctataacaataaactgtagaggaatctga

SEQ ID NO: 158054 - DNA, 560 bp, Homo sapiens
  Payload ID: 10955
  Gene Symbol: NDRG2
  Gene Name: NDRG family member 2
  ENST ID: ENST00000555767
  CDS Start-End: 210-443
aatctagttctctgtgttcgggcggggggagtcgaactcgtggggtgtcagtatcccgggttcgtctccccactaccggttcccaccactgagtctgggggcgaaggaaggagccagagtgcaattgcagatccagaccccagagtcagaaggagtgagaaccctgacccctaatcccactgcatccagccaataggagcccagccaccatggcggagctgcaggaggtgcagatcacagaggagaagccactgttgccaggacagacgcctgaggcggccaagataaatcttgcttccagccactgtttcagttcgaggacatgcaggaaatcattcagaactttgtgcgggttcatgtggatgcccctggaatggaagagggagcccctgtgttccctttgggatatcagtacccatctctggaccagcttgcagacatgatcccttgcgtcctgcagtacctaaatttctctacaataattggagttggtgttggagctggagcctacatcctggcgagatatgctcttaaccacccggacactgttgaaggtcttg

SEQ ID NO: 158055 - DNA, 978 bp, Homo sapiens
  Payload ID: 10955
  Gene Symbol: NDRG2
  Gene Name: NDRG family member 2
  ENST ID: ENST00000553593
  CDS Start-End: 1-863
aaacagtgtgttggttggctggtggatgggtgtttgtttttaagacactagctctccagcagaaagctggggatagacttcaggtatctaccctgactacccgtgccaacctttggcttcttgggcccttctttttcgcgtcctccaaagaaagtttctctacaataattggagttggtgttggagctggagcctacatcctggcgagatatgctcttaaccacccggacactgttgaaggtcttgtcctcatcaacattgatcccaatgccaagggttggatggattgggcagcccacaagctaacaggcctcacctcttccattccggagatgatccttggacatcttttcagccaggaagagctctctggaaattctgagttgatacaaaagtacagaaatatcattacacatgcacccaacctggataacattgaattgtactggaacagctacaacaaccgccgagacctgaactttgagcgtggaggtgatatcaccctcaggtgtcctgtgatgctggtggtaggagaccaagcacctcatgaagatgcagtggtggaatgtaactcaaaactggaccccacccagacctcgttcctcaagatggctgactccggaggtcagccccagctgactcagccaggcaagctgaccgaggccttcaagtacttcctgcaaggcatgggctacatggcctcatcctgcatgactcgcctgtcccggtctcgtacagcctctctgaccagtgcagcatccgttgatggcaaccggtcccgctctcgcaccctgtcccagagcagcgagtctggaactctttcttcggggcccccggggcacaccatggaggtctcctgttgaatggcccttgttgccctagagtgggacccagccctcacctcccccagagctaacctgggaggtgctgaaggggcattgggccaccgtaagcaagggaaaaagggcagatcatgcg

SEQ ID NO: 158056 - DNA, 583 bp, Homo sapiens
  Payload ID: 10955
  Gene Symbol: NDRG2
  Gene Name: NDRG family member 2
  ENST ID: ENST00000554419
  CDS Start-End: 197-583
cccacctccccgccttgttgtccaacttctcccggagcagccggagagcaggcgtcgggacgcagcaaagagaggagagaccccagagtcagaaggagtgagaaccctgacccctaatcccactgcatccagccaataggagcccagtaagtgaccccaccccgcaggctgcaggctccttcctgtgcaggccaccatggcggagctgcaggaggtgcagatcacagaggagaagccactgttgccaggacagacgcctgaggcggccaaggaggctgagttagctgcccgaatcctcctggaccagggacagactcactctgtggagacaccatacggctctgtcactttcactgtctatggcacccccaaacccaaacgcccagcgatccttacctaccacgatgtgggactcaactataaatcttgcttccagccactgtttcagttcgaggacatgcaggaaatcattcagaactttgtgcgggttcatgtggatgcccctggaatggaagagggagcccctgtgttccctttgggatatcagtacccatctctggaccagcttgcagacatgatccct

SEQ ID NO: 158057 - DNA, 2146 bp, Homo sapiens
  Payload ID: 10955
  Gene Symbol: NDRG2
  Gene Name: NDRG family member 2
  ENST ID: ENST00000554104
  CDS Start-End: 468-1322
ctcttccccagtagaaggatggcctctgcttggccctctcttctctctttgctttctttccttctattctagtcctttcccttccctatctctcccctctccttccttcccctcctcttctctctctaatcttcattattctttcttatcctcaaactcatcttccggtatcatgttttcctcaattcttgctgatcctgtttttaattctttgttcccttttccctcttgcccacccactcccagctccctgaccttggtgttgctccttttctggcctcgtctcctctgagcctagctcttggtgccctgttttcctgcagactcactctgtggagacaccatacggctctgtcactttcactgtctatggcacccccaaacccaaacgcccagcgatccttacctaccacgatgtgggactcaactataaatcttgcttccagccactgtttcagttcgaggacatgcaggaaatcattcagaactttgtgcgggttcatgtggatgcccctggaatggaagagggagcccctgtgttccctttgggatatcagtacccatctctggaccagcttgcagacatgatcccttgcgtcctgcagtacctaaatttctctacaataattggagttggtgttggagctggagcctacatcctggcgagatatgctcttaaccacccggacactgttgaaggtcttgtcctcatcaacattgatcccaatgccaagggttggatggattgggcagcccacaagctaacaggcctcacctcttccattccggagatgatccttggacatcttttcagccaggaagagctctctggaaattctgagttgatacaaaagtacagaaatatcattacacatgcacccaacctggataacattgaattgtactggaacagctacaacaaccgccgagacctgaactttgagcgtggaggtgatatcaccctcaggtgtcctgtgatgctggtggtaggagaccaagcacctcatgaagatgcagtggtggaatgtaactcaaaactggaccccacccagacctcgttcctcaagatggctgactccggaggtcagccccagctgactcagccaggcaagctgaccgaggccttcaagtacttcctgcaaggcatgggctacatggcctcatcctgcatgactcgcctgtcccggtctcgtacagcctctctgaccagtgcagcatccgttgatggcaaccggtcccgctctcgcaccctgtcccagagcagcgagtctggaactctttcttcggggcccccggggcacaccatggaggtctcctgttgaatggcccttgttgccctagagtgggacccagccctcacctcccccagagctaacctgggaggtgctgaaggggcattgggccaccgtaagcaagggaaaaagggcagatcatgcggggagatgaccttgatctttgattgctaccctaaccttgacctttaacccgtgattccccccagctcctggaagagatgtcctaatatctcttagggacccagacccctaaattctcctcctcccccattttgatgttaaggtggagagggcatatgcatcctctgtcctgatctaggtgtctatagctgaggggtaagaggttgttgtagttgtcctggtgcctccatcagactctccctacttgtcccatatttgcaaggggaggggatttggggctggggctccattcaccaaagctgaggtggcttctcattaaccctttaggactctgaagggtatggacctacgtgaatgtgtgtcagggggagacttgctggtgggttagtggtcctcaggatgtgatagaaacatccagtgtaaaaaggaagttggaatgggagttggcgggcagtgaacgagtgtggggaaggattggtgctggggcaacaggaaggggcctggggccgtttggctgcactaactttggtagctcagtgtgcatctagagtgggactggggagggagctaagcttgggctgggctgcttggggcttggcatagggtggaaagggctaccctggggctctgaccacactgtagtatgtgtggagggtgccctcccgtctcccacaacttctgctataacaataaactgtagaggaatctga

SEQ ID NO: 158058 - DNA, 578 bp, Homo sapiens
  Payload ID: 10955
  Gene Symbol: NDRG2
  Gene Name: NDRG family member 2
  ENST ID: ENST00000555657
  CDS Start-End: 196-578
aggcgaggggccgtagggcctggaaggcgccagccgggccggcgggcggtgtgattgatccgcgtcccctggagctggaggctcgggggaaagggccagcacggagcgggcgctcggttgctgcgcacaaaggctgaggctccaagagctgcagggcgtgtttggggtgcgcgcgaggttgtgtgcaaggccaccatggcggagctgcaggaggtgcagatcacagaggagaagccactgttgccaggacagacgcctgaggcggccaagactcactctgtggagacaccatacggctctgtcactttcactgtctatggcacccccaaacccaaacgcccagcgatccttacctaccacgatgtgggactcaactataaatcttgcttccagccactgtttcagttcgaggacatgcaggaaatcattcagaactttgtgcgggttcatgtggatgcccctggaatggaagagggagcccctgtgttccctttgggatatcagtacccatctctggaccagcttgcagacatgatcccttgcgtcctgcagtacctaaatttctctacaataattgg

SEQ ID NO: 158059 - DNA, 609 bp, Homo sapiens
  Payload ID: 10955
  Gene Symbol: NDRG2
  Gene Name: NDRG family member 2
  ENST ID: ENST00000556329
  CDS Start-End: 184-609
aagcccgagccggggcgggcccgagtcaaaggcaagtgaaggtggaagcggccgcggcggcagcagaccccagagtcagaaggagtgagaaccctgacccctaatcccactgcatccagccaataggagcccagtaagtgaccccaccccgcaggctgcaggctccttcctgtgcaggccaccatggcggagctgcaggaggtgcagatcacagaggagaagccactgttgccaggacagacgcctgaggcggccaagactcactctgtggagacaccatacggctctgtcactttcactgtctatggcacccccaaacccaaacgcccagcgatccttacctaccacgatgtgggactcaactataaatcttgcttccagccactgtttcagttcgaggacatgcaggaaatcattcagaactttgtgcgggttcatgtggatgcccctggaatggaagagggagcccctgtgttccctttgggatatcagtacccatctctggaccagcttgcagacatgatcccttgcgtcctgcagtacctaaatttctctacaataattggagttggtgttggagctggagcctacatcctggcgagatatgct

SEQ ID NO: 158060 - DNA, 554 bp, Homo sapiens
  Payload ID: 10955
  Gene Symbol: NDRG2
  Gene Name: NDRG family member 2
  ENST ID: ENST00000554415
  CDS Start-End: 296-554
agcaaagagaggagaggtaccaggactctgggcacgagggagtcggaactcctgcgccctcgacgttcccccgtgccccctttcggcgccagcacacctgcccctgccagccggcgagacccccgcctcctcagcggcggtcccgcccacctcctcctttcttaatctagttctctgtgttcgggcggggggagtcgaactcgtggggtgtcagtatcccggaccccagagtcagaaggagtgagaaccctgacccctaatcccactgcatccagccaataggagcccagccaccatggcggagctgcaggaggtgcagatcacagaggagaagccactgttgccaggacagacgcctgaggcggccaaggaggctgagttagctgcccgaatcctcctggaccagggacagactcactctgtggagacaccatacggctctgtcactttcactgtctatggcacccccaaacccaaacgcccagcgatccttacctaccacgatgtgggactcaactataaatcttgcttccagccactgtttcagttcgagg

SEQ ID NO: 158061 - DNA, 595 bp, Homo sapiens
  Payload ID: 10955
  Gene Symbol: NDRG2
  Gene Name: NDRG family member 2
  ENST ID: ENST00000554094
  CDS Start-End: 73-595
aatgttgaacttgcggagtttattcagagttgggaggaagggtcttgggaggaagggaggcattgggccaccatggcggagctgcaggaggtgcagatcacagaggagaagccactgttgccaggacagacgcctgaggcggccaagactcactctgtggagacaccatacggctctgtcactttcactgtctatggcacccccaaacccaaacgcccagcgatccttacctaccacgatgtgggactcaactataaatcttgcttccagccactgtttcagttcgaggacatgcaggaaatcattcagaactttgtgcgggttcatgtggatgcccctggaatggaagagggagcccctgtgttccctttgggatatcagtacccatctctggaccagcttgcagacatgatcccttgcgtcctgcagtacctaaatttctctacaataattggagttggtgttggagctggagcctacatcctggcgagatatgctcttaaccacccggacactgttgaaggtcttgtcctcatcaacattgatcccaatgccaagggttggatggattgggcagcccacaagctaacaggcc

SEQ ID NO: 158062 - DNA, 573 bp, Homo sapiens
  Payload ID: 10955
  Gene Symbol: NDRG2
  Gene Name: NDRG family member 2
  ENST ID: ENST00000554489
  CDS Start-End: 249-573
agggcctggaaggcgccagccgggccggcgggcggtgtgattgatccgcgtcccctggagctggaggctcgggggaaagggccagcacggagcgggcgctcggttgctgcgcacaaaggctgaggctccaagagctgcagggcgtgtttggggtgcgcgcgaggttgtgtgcaagaccccagagtcagaaggagtgagaaccctgacccctaatcccactgcatccagccaataggagcccagccaccatggcggagctgcaggaggtgcagatcacagaggagaagccactgttgccaggacagacgcctgaggcggccaagactcactctgtggagacaccatacggctctgtcactttcactgtctatggcacccccaaacccaaacgcccagcgatccttacctaccacgatgtgggactcaactataaatcttgcttccagccactgtttcagttcgaggacatgcaggaaatcattcagaactttgtgcgggttcatgtggatgcccctggaatggaagagggagcccctgtgttccctttgggatatcagtacccatctctggacc

SEQ ID NO: 158063 - DNA, 2162 bp, Homo sapiens
  Payload ID: 10955
  Gene Symbol: NDRG2
  Gene Name: NDRG family member 2
  Uniprot ID: Q9UN36
  ENST ID: ENST00000553503
  CDS Start-End: 265-1338
ggcggcagcaggtagggggaggggcaggcgaggggccgtagggcctggaaggcgccagccgggccggcgggcggtgtgattgatccgcgtcccctggagctggaggctcgggggaaagggccagcacggagcgggcgctcggttgctgcgcacaaaggctgaggctccaagagctgcagggcgtgtttgggaccccagagtcagaaggagtgagaaccctgacccctaatcccactgcatccagccaataggagcccagccaccatggcggagctgcaggaggtgcagatcacagaggagaagccactgttgccaggacagacgcctgaggcggccaagactcactctgtggagacaccatacggctctgtcactttcactgtctatggcacccccaaacccaaacgcccagcgatccttacctaccacgatgtgggactcaactataaatcttgcttccagccactgtttcagttcgaggacatgcaggaaatcattcagaactttgtgcgggttcatgtggatgcccctggaatggaagagggagcccctgtgttccctttgggatatcagtacccatctctggaccagcttgcagacatgatcccttgcgtcctgcagtacctaaatttctctacaataattggagttggtgttggagctggagcctacatcctggcgagatatgctcttaaccacccggacactgttgaaggtcttgtcctcatcaacattgatcccaatgccaagggttggatggattgggcagcccacaagctaacaggcctcacctcttccattccggagatgatccttggacatcttttcagccaggaagagctctctggaaattctgagttgatacaaaagtacagaaatatcattacacatgcacccaacctggataacattgaattgtactggaacagctacaacaaccgccgagacctgaactttgagcgtggaggtgatatcaccctcaggtgtcctgtgatgctggtggtaggagaccaagcacctcatgaagatgcagtggtggaatgtaactcaaaactggaccccacccagacctcgttcctcaagatggctgactccggaggtcagccccagctgactcagccaggcaagctgaccgaggccttcaagtacttcctgcaaggcatgggctacatggcctcatcctgcatgactcgcctgtcccggtctcgtacagcctctctgaccagtgcagcatccgttgatggcaaccggtcccgctctcgcaccctgtcccagagcagcgagtctggaactctttcttcggggcccccggggcacaccatggaggtctcctgttgaatggcccttgttgccctagagtgggacccagccctcacctcccccagagctaacctgggaggtgctgaaggggcattgggccaccgtaagcaagggaaaaagggcagatcatgcggggagatgaccttgatctttgattgctaccctaaccttgacctttaacccgtgattccccccagctcctggaagagatgtcctaatatctcttagggacccagacccctaaattctcctcctcccccattttgatgttaaggtggagagggcatatgcatcctctgtcctgatctaggtgtctatagctgaggggtaagaggttgttgtagttgtcctggtgcctccatcagactctccctacttgtcccatatttgcaaggggaggggatttggggctggggctccattcaccaaagctgaggtggcttctcattaaccctttaggactctgaagggtatggacctacgtgaatgtgtgtcagggggagacttgctggtgggttagtggtcctcaggatgtgatagaaacatccagtgtaaaaaggaagttggaatgggagttggcgggcagtgaacgagtgtggggaaggattggtgctggggcaacaggaaggggcctggggccgtttggctgcactaactttggtagctcagtgtgcatctagagtgggactggggagggagctaagcttgggctgggctgcttggggcttggcatagggtggaaagggctaccctggggctctgaccacactgtagtatgtgtggagggtgccctcccgtctcccacaacttctgctataacaataaactgtagaggaatctga

SEQ ID NO: 158064 - DNA, 851 bp, Homo sapiens
  Payload ID: 10955
  Gene Symbol: NDRG2
  Gene Name: NDRG family member 2
  ENST ID: ENST00000557169
  CDS Start-End: 178-851
ctggaaacggagctgggggcaggaaaggccctctgtgtgttctagagtagtcttcaacccctgggtccctctgttccctgcatcttcctgtgctgagagaggaagcctggtgtttgaggcgatgtggggatgtagagacaacttcccagtctcatttcctcatcctgccaggccaccatggcggagctgcaggaggtgcagatcacagaggagaagccactgttgccaggacagacgcctgaggcggccaagactcactctgtggagacaccatacggctctgtcactttcactgtctatggcacccccaaacccaaacgcccagcgatccttacctaccacgatgtgggactcaactataaatcttgcttccagccactgtttcagttcgaggacatgcaggaaatcattcagaactttgtgcgggttcatgtggatgcccctggaatggaagagggagcccctgtgttccctttgggatatcagtacccatctctggaccagcttgcagacatgatcccttgcgtcctgcagtacctaaatttctctacaataattggagttggtgttggagctggagcctacatcctggcgagatatgctcttaaccacccggacactgttgaaggtcttgtcctcatcaacattgatcccaatgccaagggttggatggattgggcagcccacaagctaacaggcctcacctcttccattccggagatgatccttggacatcttttcagccaggaagagctctctggaaattctgagttgatacaaaagtacagaaatatcattacacatgcacccaacctggataacattgaattgtactggaacagctacaacaa

SEQ ID NO: 158065 - DNA, 571 bp, Homo sapiens
  Payload ID: 10955
  Gene Symbol: NDRG2
  Gene Name: NDRG family member 2
  ENST ID: ENST00000557274
  CDS Start-End: 191-571
gaggggcaggcgaggggccgtagggcctggaaggcgccagccgggccggcgggcggtgtgattgatccgcgtcccctggagctggaggctcgggggaaagggccagcacggagcgggcgctcggttgctgcgcacaaaggctgaggctccaagagctgcagggcgtgtttggggtgcgcgcgaggccaccatggcggagctgcaggaggtgcagatcacagaggagaagccactgttgccaggacagacgcctgaggcggccaagactcactctgtggagacaccatacggctctgtcactttcactgtctatggcacccccaaacccaaacgcccagcgatccttacctaccacgatgtgggactcaactataaatcttgcttccagccactgtttcagttcgaggacatgcaggaaatcattcagaactttgtgcgggttcatgtggatgcccctggaatggaagagggagcccctgtgttccctttgggatatcagtacccatctctggaccagcttgcagacatgatcccttgcgtcctgcagtacctaaatttctctacaataatt

SEQ ID NO: 158066 - DNA, 1012 bp, Homo sapiens
  Payload ID: 10955
  Gene Symbol: NDRG2
  Gene Name: NDRG family member 2
  ENST ID: ENST00000556974
  CDS Start-End: 194-1012
acctccccgccttgttgtccaacttctcccggagcagccggagagcaggcgtcgggacgcagcaaagagaggagagaccccagagtcagaaggagtgagaaccctgacccctaatcccactgcatccagccaataggagcccagtaagtgaccccaccccgcaggctgcaggctccttcctgtgcaggccaccatggcggagctgcaggaggtgcagatcacagaggagaagccactgttgccaggacagacgcctgaggcggccaagactcactctgtggagacaccatacggctctgtcactttcactgtctatggcacccccaaacccaaacgcccagcgatccttacctaccacgatgtgggactcaactataaatcttgcttccagccactgtttcagttcgaggacatgcaggaaatcattcagaactttgtgcgggttcatgtggatgcccctggaatggaagagggagcccctgtgttccctttgggatatcagtacccatctctggaccagcttgcagacatgatcccttgcgtcctgcagtacctaaatttctctacaataattggagttggtgttggagctggagcctacatcctggcgagatatgctcttaaccacccggacactgttgaaggtcttgtcctcatcaacattgatcccaatgccaagggttggatggattgggcagcccacaagctaacaggcctcacctcttccattccggagatgatccttggacatcttttcagccaggaagagctctctggaaattctgagttgatacaaaagtacagaaatatcattacacatgcacccaacctggataacattgaattgtactggaacagctacaacaaccgccgagacctgaactttgagcgtggaggtgatatcaccctcaggtgtcctgtgatgctggtggtaggagaccaagcacctcatgaagatgcagtggtggaatgtaactcaaaactggaccccacccagacctcgttcctcaag

SEQ ID NO: 158067 - DNA, 772 bp, Homo sapiens
  Payload ID: 10955
  Gene Symbol: NDRG2
  Gene Name: NDRG family member 2
  ENST ID: ENST00000556366
  CDS Start-End: 118-772
gaaaggaagggtgagttctgactgggggacacgagtccctgtctgattctattgttgaggtgatgtgggttctctttagataaatcttgcttccagccactgtttcagttcgaggacatgcaggaaatcattcagaactttgtgcgggttcatgtggatgcccctggaatggaagagggagcccctgtgttccctttgggatatcagtacccatctctggaccagcttgcagacatgatcccttgcgtcctgcagtacctaaatttctctacaataattggagttggtgttggagctggagcctacatcctggcgagatatgctcttaaccacccggacactgttgaaggtcttgtcctcatcaacattgatcccaatgccaagggttggatggattgggcagcccacaagctaacaggcctcacctcttccattccggagatgatccttggacatcttttcagccaggaagagctctctggaaattctgagttgatacaaaagtacagaaatatcattacacatgcacccaacctggataacattgaattgtactggaacagctacaacaaccgccgagacctgaactttgagcgtggaggtgatatcaccctcaggtgtcctgtgatgctggtggtaggagaccaagcacctcatgaagatgcagtggtggaatgtaactcaaaactggaccccacccagacctcgttcctcaagatggctgactccggaggtcagccccagctgactcagccaggcaagctgaccgagg

SEQ ID NO: 158068 - DNA, 571 bp, Homo sapiens
  Payload ID: 10955
  Gene Symbol: NDRG2
  Gene Name: NDRG family member 2
  ENST ID: ENST00000554833
  CDS Start-End: 275-571
agggggaggggcaggcgaggggccgtagggcctggaaggcgccagccgggccggcgggcggtgtgattgatccgcgtcccctggagctggaggctcgggggaaagggccagcacggagcgggcgctcggttgctgcgcacaaaggctgaggctccaagagctgcagggcgtgtttggggtgcgcgcgaggttgtgtgcaagaccccagagtcagaaggagtgagaaccctgacccctaatcccactgcatccagccaataggagcccagccaccatggcggagctgcaggaggtgcagatcacagaggagaagccactgttgccaggacagacgcctgaggcggccaaggaggctgagttagctgcccgaatcctcctggaccagggacagactcactctgtggagacaccatacggctctgtcactttcactgtctatggcacccccaaacccaaacgcccagcgatccttacctaccacgatgtgggactcaactataaatcttgcttccagccactgtttcagttcgaggacatgcaggaaatcattcagaactttgtgcgggttcat

SEQ ID NO: 158069 - DNA, 924 bp, Homo sapiens
  Payload ID: 10955
  Gene Symbol: NDRG2
  Gene Name: NDRG family member 2
  ENST ID: ENST00000555733
  CDS Start-End: 268-924
cgcggcggcagcaggtagggggaggggcaggcgaggggccgtagggcctggaaggcgccagccgggccggcgggcggtgtgattgatccgcgtcccctggagctggaggctcgggggaaagggccagcacggagcgggcgctcggttgctgcgcacaaaggctgaggctccaagagctgcagggcgtgtttgggaccccagagtcagaaggagtgagaaccctgacccctaatcccactgcatccagccaataggagcccagccaccatggcggagctgcaggaggtgcagatcacagaggagaagccactgttgccaggacagacgcctgaggcggccaaggaggctgagttagctgcccgaatcctcctggaccagggacagactcactctgtggagacaccatacggctctgtcactttcactgtctatggcacccccaaacccaaacgcccagcgatccttacctaccacgatgtgggactcaactataaatcttgcttccagccactgtttcagttcgaggacatgcaggaaatcattcagaactttgtgcgggttcatgtggatgcccctggaatggaagagggagcccctgtgttccctttgggatatcagtacccatctctggaccagcttgcagacatgatcccttgcgtcctgcagtacctaaatttctctacaataattggagttggtgttggagctggagcctacatcctggcgagatatgctcttaaccacccggacactgttgaaggtcttgtcctcatcaacattgatcccaatgccaagggttggatggattgggcagcccacaagctaacaggcctcacctcttccattccggagatgatccttggacatcttttcagccaggaagagctctctggaaattctgagttgatacaaaagtacagaaat

SEQ ID NO: 158070 - DNA, 633 bp, Homo sapiens
  Payload ID: 10955
  Gene Symbol: NDRG2
  Gene Name: NDRG family member 2
  ENST ID: ENST00000557676
  CDS Start-End: 186-633
tagcgcccgtgggcgggctggggcgggccgggggcgggtctgcgggaagcccgagccggggcgggcccgagtcaaaggcaagtgaaggtggaagcggccgcggcggcagcagaccccagagtcagaaggagtgagaaccctgacccctaatcccactgcatccagccaataggagcccagccaccatggcggagctgcaggaggtgcagatcacagaggagaagccactgttgccaggacagacgcctgaggcggccaagactcactctgtggagacaccatacggctctgtcactttcactgtctatggcacccccaaacccaaacgcccagcgatccttacctaccacgatgtgggactcaactataaatcttgcttccagccactgtttcagttcgaggacatgcaggaaatcattcagaactttgtgcgggttcatgtggatgcccctggaatggaagagggagcccctgtgttccctttgggatatcagtacccatctctggaccagcttgcagacatgatcccttgcgtcctgcagtacctaaatttctctacaataattggagttggtgttggagctggagcctacatcctggcgagatatgctcttaaccacccggacactgttg

SEQ ID NO: 158071 - DNA, 583 bp, Homo sapiens
  Payload ID: 10955
  Gene Symbol: NDRG2
  Gene Name: NDRG family member 2
  ENST ID: ENST00000557149
  CDS Start-End: 124-583
atattgattccggctcgagcctagagaggacgtgttctctggacttagggaccccagagtcagaaggagtgagaaccctgacccctaatcccactgcatccagccaataggagcccagccaccatggcggagctgcaggaggtgcagatcacagaggagaagccactgttgccaggacagacgcctgaggcggccaagactcactctgtggagacaccatacggctctgtcactttcactgtctatggcacccccaaacccaaacgcccagcgatccttacctaccacgatgtgggactcaactataaatcttgcttccagccactgtttcagttcgaggacatgcaggaaatcattcagaactttgtgcgggttcatgtggatgcccctggaatggaagagggagcccctgtgttccctttgggatatcagtacccatctctggaccagcttgcagacatgatcccttgcgtcctgcagtacctaaatttctctacaataattggagttggtgttggagctggagcctacatcctggcgagatatgctcttaaccacccggacactgttgaaggtcttgtcc

SEQ ID NO: 158072 - DNA, 672 bp, Homo sapiens
  Payload ID: 10955
  Gene Symbol: NDRG2
  Gene Name: NDRG family member 2
  ENST ID: ENST00000635386
  CDS Start-End: 1-672
ataaatcttgcttccagccactgtttcagttcgaggacatgcaggaaatcattcagaactttgtgcgggttcatgtggatgcccctggaatggaagagggagcccctgtgttccctttgggatatcagtacccatctctggaccagcttgcagacatgatcccttgcgtcctgcagtacctaaatttctctacaataattggagttggtgttggagctggagcctacatcctggcgagatatgctcttaaccacccggacactgttgaaggtcttgtcctcatcaacattgatcccaatgccaagggttggatggattgggcagcccacaagctaacaggcctcacctcttccattccggagatgatccttggacatcttttcagccaggaagagctctctggaaattctgagttgatacaaaagtacagaaatatcattacacatgcacccaacctggataacattgaattgtactggaacagctacaacaaccgccgagacctgaactttgagcgtggaggtgatatcaccctcaggtgtcctgtgatgctggtggtaggagaccaagcacctcatgaagatgcagtgacctcgttcctcaagatggctgactccggaggtcagccccagctgactcagccaggcaagctgaccgaggccttcaagtact

SEQ ID NO: 158073 - DNA, 2964 bp, Homo sapiens
  Payload ID: 10956
  Gene Symbol: NDRG3
  Gene Name: NDRG family member 3
  Uniprot ID: Q9UGV2
  ENST ID: ENST00000349004
  CDS Start-End: 83-1210
gctgctgcactgacggcgggtgcccgcgcctcagagttactgatttattcttgagattcctctactctcgttatctgacctcatggatgaacttcaggatgttcagctcacagagatcaaaccacttctaaatgataagaatggtacaagaaacttccaggactttgactgtcaggaacatgatatagaaacaactcatggtgtggtccacgtcactataagaggcttacccaaaggaaacagaccagttatactaacatatcatgacattggcctcaaccataaatcctgtttcaatgcattctttaactttgaggatatgcaagagatcacccagcactttgctgtctgtcatgtggatgccccaggccagcaggaaggtgcaccctctttcccaacagggtatcagtaccccacaatggatgagctggctgaaatgctgcctcctgttcttacccacctaagcctgaaaagcatcattggaattggagttggagctggagcttacatcctcagcagatttgcactcaaccatccagagcttgtggaaggccttgtgctcattaatgttgacccttgcgctaaaggctggattgactgggcagcttccaaactctctggcctgacaaccaatgttgtggacattattttggctcatcactttgggcaggaagagttacaggccaacctggacctgatccaaacctacagaatgcatattgcccaagacatcaaccaagacaacctgcagctcttcttgaattcctacaatggacgcagagacctggagatcgaaagacccatactgggccaaaatgataacaaatcaaaaacattaaagtgttctactttactggtggtaggggacaattcgcctgcagttgaggctgtggtcgaatgcaattcccgcctgaaccctataaatacaactttgctaaagatggcggactgtgggggactgccccaggtagttcagcctgggaagctcaccgaggccttcaagtactttttgcagggaatgggctacataccatctgccagcatgactcggctcgcccgatcacgaacccactcaacctcgagtagcctcggctctggagaaagtcccttcagccggtctgtcaccagcaatcagtcagatggaactcaagaatcctgtgagtcccctgatgtcctggacagacaccagaccatggaggtgtcctgctaagcagatgctcctcccctggaccattgcaagtccatccttcaaatgaccactccataatataacatttcatccagtaaactggcctctactatctttaactcatgcatggccactgaacctctctctagtagcctggatttatcattctctctgcctgcccacccccttttttgtatagcccaagaaccacttccatgccatactgtaacattccaacatctttagctgatcagatctctccatatcctctcttgccagctttttcccgtgctcccccaactatgtatcagataagattctttgatcccgactctgtgtgtgcgagcacgcgtgtctgtgtttgtgtgtgcatagttctgtggttttagacacgctttcttgtagtgcttctgcaaaaaacaaaaaagggacttattttgcattctcaatggtgtttttaagggaattaggcagaacagatttctaggttgggtaggccactgcattctcttttgtttgcaaattggtcaacaaaatttgcaaagtgatttcaggagagagcagctttgaggaatgtggaaaatcataattgccgtctggaccattgattgattgtgaccagtagcagaagggtgcctgttacatagagaggctccttctgtccaaatgaatttctgtatactcttctataaataaaagggaggaatatattctgctggaagcccatgaaccatcgctgaggttctgatacaacatagagttttttccaaggagtgaatgtggtttaattactggactctcttagcacaggaaggtggaaacaaaatgccaggcctctgctctgaagagcaaaactgctgtcgctgcagtatctgataccagacatccacatatccacaagaagtgcctcttaggtctgtgacagagagtgtgtctccattcctcagttcccagaaaggggagaggtttggcctaaaaagcatgtagatgggggagaaatgggtggggggagaggaacagccattaacacagtatcatgtttaacaagtatagccttgatttcagtagatgtaatggaagccaaattaaattgatacagaacccatttctcagagtctttttttttttttgagacagagtctcgctgttacccaggctggagtgcaatggcgcaaacttggctcactgcaacctctgccccctgggttcaagcgattctcctgcctcagcctcccgagtagctgagactacaggcacctgccaccatacccagctaagttatgtatttttagtagagatggagtttcaccatgttggccaggctggtctcaaactcctgacctcaggtgatccacctgcctcagcctcccaaagtgctgggattacaggcatgagtcattgctcccagccattagaaagattgttaatcctatgaactcccttttgtaggagagaaagggccaatctgtaggggtagccctgtccaggtaaagttgttttcagcctcatgtctactgttaggtgagggagtcacagccagacagagagtattgctggagggtgagagaattgtggagaccaactaccacatagcaagagcccagctcttgggagcattgagatgtaagctcagggttacacagttccaaatcttgggaaggggcttttcagacagactgtttgctttctgctgagataaggaatgcatcactctgccagagtatgactttttacagattattaaataaagctgcatatgtctcattgttacctga

SEQ ID NO: 158074 - DNA, 2917 bp, Homo sapiens
  Payload ID: 10956
  Gene Symbol: NDRG3
  Gene Name: NDRG family member 3
  Uniprot ID: Q9UGV2
  ENST ID: ENST00000359675
  CDS Start-End: 72-1163
gacggcgggtgcccgcgcctcagagttactgatttattcttgagattcctctactctcgttatctgacctcatggatgaacttcaggatgttcagctcacagagatcaaaccacttctaaatgataaggaacatgatatagaaacaactcatggtgtggtccacgtcactataagaggcttacccaaaggaaacagaccagttatactaacatatcatgacattggcctcaaccataaatcctgtttcaatgcattctttaactttgaggatatgcaagagatcacccagcactttgctgtctgtcatgtggatgccccaggccagcaggaaggtgcaccctctttcccaacagggtatcagtaccccacaatggatgagctggctgaaatgctgcctcctgttcttacccacctaagcctgaaaagcatcattggaattggagttggagctggagcttacatcctcagcagatttgcactcaaccatccagagcttgtggaaggccttgtgctcattaatgttgacccttgcgctaaaggctggattgactgggcagcttccaaactctctggcctgacaaccaatgttgtggacattattttggctcatcactttgggcaggaagagttacaggccaacctggacctgatccaaacctacagaatgcatattgcccaagacatcaaccaagacaacctgcagctcttcttgaattcctacaatggacgcagagacctggagatcgaaagacccatactgggccaaaatgataacaaatcaaaaacattaaagtgttctactttactggtggtaggggacaattcgcctgcagttgaggctgtggtcgaatgcaattcccgcctgaaccctataaatacaactttgctaaagatggcggactgtgggggactgccccaggtagttcagcctgggaagctcaccgaggccttcaagtactttttgcagggaatgggctacataccatctgccagcatgactcggctcgcccgatcacgaacccactcaacctcgagtagcctcggctctggagaaagtcccttcagccggtctgtcaccagcaatcagtcagatggaactcaagaatcctgtgagtcccctgatgtcctggacagacaccagaccatggaggtgtcctgctaagcagatgctcctcccctggaccattgcaagtccatccttcaaatgaccactccataatataacatttcatccagtaaactggcctctactatctttaactcatgcatggccactgaacctctctctagtagcctggatttatcattctctctgcctgcccacccccttttttgtatagcccaagaaccacttccatgccatactgtaacattccaacatctttagctgatcagatctctccatatcctctcttgccagctttttcccgtgctcccccaactatgtatcagataagattctttgatcccgactctgtgtgtgcgagcacgcgtgtctgtgtttgtgtgtgcatagttctgtggttttagacacgctttcttgtagtgcttctgcaaaaaacaaaaaagggacttattttgcattctcaatggtgtttttaagggaattaggcagaacagatttctaggttgggtaggccactgcattctcttttgtttgcaaattggtcaacaaaatttgcaaagtgatttcaggagagagcagctttgaggaatgtggaaaatcataattgccgtctggaccattgattgattgtgaccagtagcagaagggtgcctgttacatagagaggctccttctgtccaaatgaatttctgtatactcttctataaataaaagggaggaatatattctgctggaagcccatgaaccatcgctgaggttctgatacaacatagagttttttccaaggagtgaatgtggtttaattactggactctcttagcacaggaaggtggaaacaaaatgccaggcctctgctctgaagagcaaaactgctgtcgctgcagtatctgataccagacatccacatatccacaagaagtgcctcttaggtctgtgacagagagtgtgtctccattcctcagttcccagaaaggggagaggtttggcctaaaaagcatgtagatgggggagaaatgggtggggggagaggaacagccattaacacagtatcatgtttaacaagtatagccttgatttcagtagatgtaatggaagccaaattaaattgatacagaacccatttctcagagtctttttttttttttgagacagagtctcgctgttacccaggctggagtgcaatggcgcaaacttggctcactgcaacctctgccccctgggttcaagcgattctcctgcctcagcctcccgagtagctgagactacaggcacctgccaccatacccagctaagttatgtatttttagtagagatggagtttcaccatgttggccaggctggtctcaaactcctgacctcaggtgatccacctgcctcagcctcccaaagtgctgggattacaggcatgagtcattgctcccagccattagaaagattgttaatcctatgaactcccttttgtaggagagaaagggccaatctgtaggggtagccctgtccaggtaaagttgttttcagcctcatgtctactgttaggtgagggagtcacagccagacagagagtattgctggagggtgagagaattgtggagaccaactaccacatagcaagagcccagctcttgggagcattgagatgtaagctcagggttacacagttccaaatcttgggaaggggcttttcagacagactgtttgctttctgctgagataaggaatgcatcactctgccagagtatgactttttacagattattaaataaagctgcatatgtctcattgttacctga

SEQ ID NO: 158075 - DNA, 2098 bp, Homo sapiens
  Payload ID: 10956
  Gene Symbol: NDRG3
  Gene Name: NDRG family member 3
  ENST ID: ENST00000373773
  CDS Start-End: 111-953
tcagagttactgatttattcttgagattcctctactctcgttatctgacctcatggatgaacttcaggatgttcagctcacagagatcaaaccacttctaaatgataagaatggtacaagaaacttccaggactttgactgtcaggtatcagtaccccacaatggatgagctggctgaaatgctgcctcctgttcttacccacctaagcctgaaaagcatcattggaattggagttggagctggagcttacatcctcagcagatttgcactcaaccatccagagcttgtggaaggccttgtgctcattaatgttgacccttgcgctaaaggctggattgactgggcagcttccaaactctctggcctgacaaccaatgttgtggacattattttggctcatcactttgggcaggaagagttacaggccaacctggacctgatccaaacctacagaatgcatattgcccaagacatcaaccaagacaacctgcagctcttcttgaattcctacaatggacgcagagacctggagatcgaaagacccatactgggccaaaatgataacaaatcaaaaacattaaagtgttctactttactggtggtaggggacaattcgcctgcagttgaggctgtggtcgaatgcaattcccgcctgaaccctataaatacaactttgctaaagatggcggactgtgggggactgccccaggtagttcagcctgggaagctcaccgaggccttcaagtactttttgcagggaatgggctacataccatctgccagcatgactcggctcgcccgatcacgaacccactcaacctcgagtagcctcggctctggagaaagtcccttcagccggtctgtcaccagcaatcagtcagatggaactcaagaatcctgtgagtcccctgatgtcctggacagacaccagaccatggaggtgtcctgctaagcagatgctcctcccctggaccattgcaagtccatccttcaaatgaccactccataatataacatttcatccagtaaactggcctctactatctttaactcatgcatggccactgaacctctctctagtagcctggatttatcattctctctgcctgcccacccccttttttgtatagcccaagaaccacttccatgccatactgtaacattccaacatctttagctgatcagatctctccatatcctctcttgccagctttttcccgtgctcccccaactatgtatcagataagattctttgatcccgactctgtgtgtgcgagcacgcgtgtctgtgtttgtgtgtgcatagttctgtggttttagacacgctttcttgtagtgcttctgcaaaaaacaaaaaagggacttattttgcattctcaatggtgtttttaagggaattaggcagaacagatttctaggttgggtaggccactgcattctcttttgtttgcaaattggtcaacaaaatttgcaaagtgatttcaggagagagcagctttgaggaatgtggaaaatcataattgccgtctggaccattgattgattgtgaccagtagcagaagggtgcctgttacatagagaggctccttctgtccaaatgaatttctgtatactcttctataaataaaagggaggaatatattctgctggaagcccatgaaccatcgctgaggttctgatacaacatagagttttttccaaggagtgaatgtggtttaattactggactctcttagcacaggaaggtggaaacaaaatgccaggcctctgctctgaagagcaaaactgctgtcgctgcagtatctgataccagacatccacatatccacaagaagtgcctcttaggtctgtgacagagagtgtgtctccattcctcagttcccagaaaggggagaggtttggcctaaaaagcatgtagatgggggagaaatgggtggggggagaggaacagccattaacacagtatcatgtttaacaagtatagccttgatttcagtagatgtaatggaagccaaattaaattgatacagaacccatttctcagagtctttttttttttttgagacagagtctcgctgttacccaggctggagtgca

SEQ ID NO: 158076 - DNA, 2978 bp, Homo sapiens
  Payload ID: 10956
  Gene Symbol: NDRG3
  Gene Name: NDRG family member 3
  ENST ID: ENST00000373803
  CDS Start-End: 58-1224
gcgcctcagagttactgatttattcttgagattcctctactctcgttatctgacctcatggatgaacttcaggatgttcagctcacagagatcaaaccacttctaaatgataagaatggtacaagaaacttccaggactttgactgtcaggaacatgatatagaaacaactcatggtgtggtccacgtcactataagaggcttacccaaaggaaacagaccagttatactaacatatcatgacattggcctcaaccataaatcctgtttcaatgcattctttaactttgaggatatgcaagagatcacccagcactttgctgtctgtcatgtggatgccccaggccagcaggaaggtgcaccctctttcccaacagggtatcagtaccccacaatggatgagctggctgaaatgctgcctcctgttcttacccacctaagcctgaaaagcatcattggaattggagttggagctggagcttacatcctcagcagatttgcactcaaccatccagagcttgtggaaggccttgtgctcattaatgttgacccttgcgctaaaggctggattgactgggcagcttccaaactctctggcctgacaaccaatgttgtggacattattttggctcatcactttgggcaggaagagttacaggccaacctggacctgatccaaacctacagaatgcatattgcccaagacatcaaccaagacaacctgcagctcttcttgaattcctacaatggacgcagagacctggagatcgaaagacccatactgggccaaaatgataacaaatcaaaaacattaaagtgttctactttactggtggtaggggacaattcgcctgcagttgaggctgtggtcgaatgcaattcccgcctgaaccctataaatacaactttgctaaagatggcggactgtgggggactgccccaggtagttcagcctgggaagctcaccgaggccttcaagtactttttgcagggaatgggctacatcccgtatgtgcagctcagtcacctgagcaccgagtcagtaccatctgccagcatgactcggctcgcccgatcacgaacccactcaacctcgagtagcctcggctctggagaaagtcccttcagccggtctgtcaccagcaatcagtcagatggaactcaagaatcctgtgagtcccctgatgtcctggacagacaccagaccatggaggtgtcctgctaagcagatgctcctcccctggaccattgcaagtccatccttcaaatgaccactccataatataacatttcatccagtaaactggcctctactatctttaactcatgcatggccactgaacctctctctagtagcctggatttatcattctctctgcctgcccacccccttttttgtatagcccaagaaccacttccatgccatactgtaacattccaacatctttagctgatcagatctctccatatcctctcttgccagctttttcccgtgctcccccaactatgtatcagataagattctttgatcccgactctgtgtgtgcgagcacgcgtgtctgtgtttgtgtgtgcatagttctgtggttttagacacgctttcttgtagtgcttctgcaaaaaacaaaaaagggacttattttgcattctcaatggtgtttttaagggaattaggcagaacagatttctaggttgggtaggccactgcattctcttttgtttgcaaattggtcaacaaaatttgcaaagtgatttcaggagagagcagctttgaggaatgtggaaaatcataattgccgtctggaccattgattgattgtgaccagtagcagaagggtgcctgttacatagagaggctccttctgtccaaatgaatttctgtatactcttctataaataaaagggaggaatatattctgctggaagcccatgaaccatcgctgaggttctgatacaacatagagttttttccaaggagtgaatgtggtttaattactggactctcttagcacaggaaggtggaaacaaaatgccaggcctctgctctgaagagcaaaactgctgtcgctgcagtatctgataccagacatccacatatccacaagaagtgcctcttaggtctgtgacagagagtgtgtctccattcctcagttcccagaaaggggagaggtttggcctaaaaagcatgtagatgggggagaaatgggtggggggagaggaacagccattaacacagtatcatgtttaacaagtatagccttgatttcagtagatgtaatggaagccaaattaaattgatacagaacccatttctcagagtctttttttttttttgagacagagtctcgctgttacccaggctggagtgcaatggcgcaaacttggctcactgcaacctctgccccctgggttcaagcgattctcctgcctcagcctcccgagtagctgagactacaggcacctgccaccatacccagctaagttatgtatttttagtagagatggagtttcaccatgttggccaggctggtctcaaactcctgacctcaggtgatccacctgcctcagcctcccaaagtgctgggattacaggcatgagtcattgctcccagccattagaaagattgttaatcctatgaactcccttttgtaggagagaaagggccaatctgtaggggtagccctgtccaggtaaagttgttttcagcctcatgtctactgttaggtgagggagtcacagccagacagagagtattgctggagggtgagagaattgtggagaccaactaccacatagcaagagcccagctcttgggagcattgagatgtaagctcagggttacacagttccaaatcttgggaaggggcttttcagacagactgtttgctttctgctgagataaggaatgcatcactctgccagagtatgactttttacagattattaaataaagctgcatatgtctcattgttacctga

SEQ ID NO: 158077 - DNA, 736 bp, Homo sapiens
  Payload ID: 10956
  Gene Symbol: NDRG3
  Gene Name: NDRG family member 3
  ENST ID: ENST00000422536
  CDS Start-End: 176-736
attgtgtagtcacactctagaatgctggggtgggagatgagataactggatagagagcctgtaaaacagatgataattgactaagacaaaaaggtagcaacagcacgttactccctgcagtggcctgacaactgaatcagctccttagccagggtctctgcacattcatcttcagatggagtttttttcaagctgttcattcacaaggtcacgaaaaatatgcatgccaatcaccatggaggaacatgatatagaaacaactcatggtgtggtccacgtcactataagaggcttacccaaaggaaacagaccagttatactaacatatcatgacattggcctcaaccataaatcctgtttcaatgcattctttaactttgaggatatgcaagagatcacccagcactttgctgtctgtcatgtggatgccccaggccagcaggaaggtgcaccctctttcccaacagggtatcagtaccccacaatggatgagctggctgaaatgctgcctcctgttcttacccacctaagcctgaaaagcatcattggaattggagttggagctggagcttacatcctcagcagatttgcactcaaccatccagagcttgtggaaggccttgtgctcattaatgttgacccttgcgctaaaggctggattgactgggcagcttccaaactctctggcctgacaaccaatgttgtggacattattttggctcatcactttgggcag

SEQ ID NO: 158078 - DNA, 3324 bp, Homo sapiens
  Payload ID: 10957
  Gene Symbol: NDRG4
  Gene Name: NDRG family member 4
  Uniprot ID: Q9ULP0
  ENST ID: ENST00000258187
  CDS Start-End: 157-1272
ccccagcccggcctccgcccctgcagccgcgggcacgcggaggggctcctggctgcccgcacctgcacccgcgcgtcggcggcgccgaagccccgctccccgcctgcgcgtctgtctcgtccgcatctccgcggcctcctgctccacgacgtgaccatggccgggctgcaggagctgcgattccctgaggagaagccgctgctccggggccaggacgccaccgagctggagagctccgatgccttcctcttggctgcagacacagactggaaggaacatgacatcgagacaccctacggccttctgcatgtagtgatccggggctcccccaaggggaaccgcccagccatcctcacctaccatgatgtgggcctcaaccacaaactatgcttcaacaccttcttcaacttcgaggacatgcaggagatcaccaagcactttgtggtgtgtcacgtggatgcccctggacaacaggtgggggcgtcgcagtttcctcaggggtaccagttcccctccatggagcagctggctgccatgctccccagcgtggtgcagcatttcgggttcaagtatgtgattggcatcggagtgggcgccggagcctatgtgctggccaagtttgcactcatcttccccgacctggtggaggggctggtgctggtgaacatcgaccccaatggcaaaggctggatagactgggctgccaccaagctctccggcctaactagcactttacccgacacggtgctctcccacctcttcagccaggaggagctggtgaacaacacagagttggtgcagagctaccggcagcagattgggaacgtggtgaaccaggccaacctgcagctcttctggaacatgtacaacagccgcagagacctggacattaaccggcctggaacggtgcccaatgccaagacgctccgctgccccgtgatgctggtggttggggataatgcacccgctgaggacggggtggtggagtgcaactccaaactggacccgaccactacgaccttcctgaagatggcagactctggagggctgccccaggtcacacagccagggaagctgactgaagccttcaaatacttcctgcaaggcatgggctacatgccctcagccagcatgacccgcctggcacgctcccgcactgcatccctcaccagtgccagctcggtggatggcagccgcccacaggcctgcacccactcagagagcagcgaggggctgggccaggtcaaccacaccatggaggtgtcctgttgaagcccttgatcccgctgacgacgcccacgtcgaggccccaccgccatccttgcgccggctcatgttccctttagtttatttttgtgagggcaaaggggaggaaatggggttctgtttgaaaaaaatgaggggatcttagatgctgcagcagaacagtctccaggtgttttaaggggctcagtcctcctcatcccatctcactctccgtggtaacttagccaacttgacccctctcatcccactcccggcggcccaggcacagaagggcagggccatagggagggagattcgctacggatccaggccattcctgggtgagcccttgggcaggcatgtttggagatgagagaggcttcgagagggtgggtgctgggccacaggggtgcggggccagctcaggcactggcgtgggagccctgggagaccccttcccccaccctccaccaagcacacctgtttctgtctcatagcacatgtgacaatcatctggacaacagccacaagggggcgctcggaccaggcagccactttcctggtgctctctgggcccagctggtgctgtagggccacgcaggcaggggcgtcaaggggtttctctgcccaaggaagacagaacatggagaaccgtcagggcaggaaccccacagactgtcccttccagcccacactctgccacctcctggccctgtcccaattctgagccaaggcctccccgaggcagaagttgcctggtcctctgtccccacagtgacctgactgggggtgagggagaaggaggagagagcccatgtgtggtgtgtgtgcccctgagaacttcgtggtgactgcctttgggagcccgcaggtggccagaggcaggggtagctgagttcctggagaccccttttttgcccccaggttccccagagggcaacgccatcagtagcagtgtggtgtttcaggcagagctctggccaggctgtgccagtgtgtcccggacgcatcactaaggaagagagagtttatttagtcaactggcccaaggcagcgaggcttctacagtcccacaccccatagccgcctgggctggggcttactgggggctgaaggttctggacatgaacaagggtcaggtagaagagaaaggcttcccctacaccccagcctcctgctgtcccctgaagcccaggactgcgttgtatgctttccatccactcaccttaccccatagcatcttgcggcccagaaaccagagccatttgtctcagaccctaaatcaataatcacaaaccccaaaacgggagagagcagtgaaaacatgcagggctgtggacgggggaagggttgtggcgggtgttctgaggctgagaggacacctatatgcgtatttcctctacacacatcaccccccttctataatcttaagccatgactagcctggtggcgtgttagtttctgcccagttctaccccctcatgtgcttcttctgaatactgaatgtgactgtttgaaagctggtagaattcatccctcttactgtagataacactgcaaatcttggaattttgttttttgctgtttccagatgtatctataaatatctatacattatatgtgtgtgtgtgtgtgtgtgtgtgtgtgtacatcgggtcctcccatgtgtggtgttcttctggaggttgtctctttggtcaaggtgaacttttaatgtttattattttcttctccgcacaaagtaaagagcctaattttgtgtattctggtggctgctgtcatgagatgataaaatgtaaaacaaaactctagtcaacgtagaaagagttaactgtgctgaaaaactaataaagaacctaagaagaattccagtgtggtgatgccatgcccatcatgggaggcttttggagaaacagaatgtttgggcaggggctgctggtgctgcttgggttttgggttgagggtgctaggagaggatggtctccacccatctttctatttccagtacacgtcacattattttaccggtgagatgagaatgtcacaaacattaaaagccttatgtgctcatttctgctt

SEQ ID NO: 158079 - DNA, 1375 bp, Homo sapiens
  Payload ID: 10957
  Gene Symbol: NDRG4
  Gene Name: NDRG family member 4
  Uniprot ID: Q9ULP0
  ENST ID: ENST00000356752
  CDS Start-End: 107-1216
acagagccgaccatctcccactcgagctgcccccgccctctggacccgagtgactcaggcctttgtttgtccttcctggtagaggcgggttccctccctcggcaagatgccggagtgctgggatggggtgggggaaggcaacgctggagccgtgaagctggcagggctaggggaccccaggtggagcccagggcacctcctctcgccggggcatcaggaacatgacatcgagacaccctacggccttctgcatgtagtgatccggggctcccccaaggggaaccgcccagccatcctcacctaccatgatgtgggcctcaaccacaaactatgcttcaacaccttcttcaacttcgaggacatgcaggagatcaccaagcactttgtggtgtgtcacgtggatgcccctggacaacaggtgggggcgtcgcagtttcctcaggggtaccagttcccctccatggagcagctggctgccatgctccccagcgtggtgcagcatttcgggttcaagtatgtgattggcatcggagtgggcgccggagcctatgtgctggccaagtttgcactcatcttccccgacctggtggaggggctggtgctggtgaacatcgaccccaatggcaaaggctggatagactgggctgccaccaagctctccggcctaactagcactttacccgacacggtgctctcccacctcttcagccaggaggagctggtgaacaacacagagttggtgcagagctaccggcagcagattgggaacgtggtgaaccaggccaacctgcagctcttctggaacatgtacaacagccgcagagacctggacattaaccggcctggaacggtgcccaatgccaagacgctccgctgccccgtgatgctggtggttggggataatgcacccgctgaggacggggtggtggagtgcaactccaaactggacccgaccactacgaccttcctgaagatggcagactctggagggctgccccaggtcacacagccagggaagctgactgaagccttcaaatacttcctgcaaggcatgggctacatgccctcagccagcatgacccgcctggcacgctcccgcactgcatccctcaccagtgccagctcggtggatggcagccgcccacaggcctgcacccactcagagagcagcgaggggctgggccaggtcaaccacaccatggaggtgtcctgttgaagcccttgatcccgctgacgacgcccacgtcgaggccccaccgccatccttgcgccggctcatgttccctttagtttatttttgtgagggcaaaggggaggaaatggggttctgtttgaaaaaaatgaggggatcttagatgctgcagcagaacagtct

SEQ ID NO: 158080 - DNA, 3431 bp, Homo sapiens
  Payload ID: 10957
  Gene Symbol: NDRG4
  Gene Name: NDRG family member 4
  Uniprot ID: Q9ULP0
  ENST ID: ENST00000394279
  CDS Start-End: 274-1389
gacccgcgccatggacctcttatttctgcgccctgtgacaatctgagccgtctttctctgggggagaagtttcttgctgggagtggaggcgacgccaagtggcctgggaagtgggaagccagattggaccctactgactggggaccctcagccttggggctcctctggagaagtgatcagttgccctgctggaaactcacatccagggggcagtggctggagagcaagagcgaacggtcaggaagaggaggcctcctgctccacgacgtgaccatggccgggctgcaggagctgcgattccctgaggagaagccgctgctccggggccaggacgccaccgagctggagagctccgatgccttcctcttggctgcagacacagactggaaggaacatgacatcgagacaccctacggccttctgcatgtagtgatccggggctcccccaaggggaaccgcccagccatcctcacctaccatgatgtgggcctcaaccacaaactatgcttcaacaccttcttcaacttcgaggacatgcaggagatcaccaagcactttgtggtgtgtcacgtggatgcccctggacaacaggtgggggcgtcgcagtttcctcaggggtaccagttcccctccatggagcagctggctgccatgctccccagcgtggtgcagcatttcgggttcaagtatgtgattggcatcggagtgggcgccggagcctatgtgctggccaagtttgcactcatcttccccgacctggtggaggggctggtgctggtgaacatcgaccccaatggcaaaggctggatagactgggctgccaccaagctctccggcctaactagcactttacccgacacggtgctctcccacctcttcagccaggaggagctggtgaacaacacagagttggtgcagagctaccggcagcagattgggaacgtggtgaaccaggccaacctgcagctcttctggaacatgtacaacagccgcagagacctggacattaaccggcctggaacggtgcccaatgccaagacgctccgctgccccgtgatgctggtggttggggataatgcacccgctgaggacggggtggtggagtgcaactccaaactggacccgaccactacgaccttcctgaagatggcagactctggagggctgccccaggtcacacagccagggaagctgactgaagccttcaaatacttcctgcaaggcatgggctacatgccctcagccagcatgacccgcctggcacgctcccgcactgcatccctcaccagtgccagctcggtggatggcagccgcccacaggcctgcacccactcagagagcagcgaggggctgggccaggtcaaccacaccatggaggtgtcctgttgaagcccttgatcccgctgacgacgcccacgtcgaggccccaccgccatccttgcgccggctcatgttccctttagtttatttttgtgagggcaaaggggaggaaatggggttctgtttgaaaaaaatgaggggatcttagatgctgcagcagaacagtctccaggtgttttaaggggctcagtcctcctcatcccatctcactctccgtggtaacttagccaacttgacccctctcatcccactcccggcggcccaggcacagaagggcagggccatagggagggagattcgctacggatccaggccattcctgggtgagcccttgggcaggcatgtttggagatgagagaggcttcgagagggtgggtgctgggccacaggggtgcggggccagctcaggcactggcgtgggagccctgggagaccccttcccccaccctccaccaagcacacctgtttctgtctcatagcacatgtgacaatcatctggacaacagccacaagggggcgctcggaccaggcagccactttcctggtgctctctgggcccagctggtgctgtagggccacgcaggcaggggcgtcaaggggtttctctgcccaaggaagacagaacatggagaaccgtcagggcaggaaccccacagactgtcccttccagcccacactctgccacctcctggccctgtcccaattctgagccaaggcctccccgaggcagaagttgcctggtcctctgtccccacagtgacctgactgggggtgagggagaaggaggagagagcccatgtgtggtgtgtgtgcccctgagaacttcgtggtgactgcctttgggagcccgcaggtggccagaggcaggggtagctgagttcctggagaccccttttttgcccccaggttccccagagggcaacgccatcagtagcagtgtggtgtttcaggcagagctctggccaggctgtgccagtgtgtcccggacgcatcactaaggaagagagagtttatttagtcaactggcccaaggcagcgaggcttctacagtcccacaccccatagccgcctgggctggggcttactgggggctgaaggttctggacatgaacaagggtcaggtagaagagaaaggcttcccctacaccccagcctcctgctgtcccctgaagcccaggactgcgttgtatgctttccatccactcaccttaccccatagcatcttgcggcccagaaaccagagccatttgtctcagaccctaaatcaataatcacaaaccccaaaacgggagagagcagtgaaaacatgcagggctgtggacgggggaagggttgtggcgggtgttctgaggctgagaggacacctatatgcgtatttcctctacacacatcaccccccttctataatcttaagccatgactagcctggtggcgtgttagtttctgcccagttctaccccctcatgtgcttcttctgaatactgaatgtgactgtttgaaagctggtagaattcatccctcttactgtagataacactgcaaatcttggaattttgttttttgctgtttccagatgtatctataaatatctatacattatatgtgtgtgtgtgtgtgtgtgtgtgtgtgtacatcgggtcctcccatgtgtggtgttcttctggaggttgtctctttggtcaaggtgaacttttaatgtttattattttcttctccgcacaaagtaaagagcctaattttgtgtattctggtggctgctgtcatgagatgataaaatgtaaaacaaaactctagtcaacgtagaaagagttaactgtgctgaaaaactaataaagaacctaagaagaattccagtgtggtgatgccatgcccatcatgggaggcttttggagaaacagaatgtttgggcaggggctgctggtgctgcttgggttttgggttgagggtgctaggagaggatggtctccacccatctttctatttccagtacacgtcacattattttaccggtgagatgagaatgtcacaaacattaaaagccttatgtgctc

SEQ ID NO: 158081 - DNA, 3626 bp, Homo sapiens
  Payload ID: 10957
  Gene Symbol: NDRG4
  Gene Name: NDRG family member 4
  Uniprot ID: Q9ULP0
  ENST ID: ENST00000394282
  CDS Start-End: 408-1583
ggccgcgctggggacccccagccgccgtccgcgaccccccaccgcgacgcccggaggcggcggggtctctttgttcgggcggcgggcacgggggaccacctcccacggtgtcaccgcacccaccccgcgcccttcctccgcctcctggagttcaccgggaccaggtggcggcgggtgcctttttgggggtgcgcggccatgcaattggtggatttttttaaaccgttttggaggggggagcgcggcgttgggggcgggagagcgctcctggctgtgagctgctcctgccgcttcgctccgcgctctcctgccgctccgctccgggtctcccgcgctcctctccccggctcggccgagcgcgctgccccgacgccgccacccagagccgggccgcgccgggcgccgagatgaaggtgctgggacaccggctggagctgctcacaggcctcctgctccacgacgtgaccatggccgggctgcaggagctgcgattccctgaggagaagccgctgctccggggccaggacgccaccgagctggagagctccgatgccttcctcttggctgcagacacagactggaaggaacatgacatcgagacaccctacggccttctgcatgtagtgatccggggctcccccaaggggaaccgcccagccatcctcacctaccatgatgtgggcctcaaccacaaactatgcttcaacaccttcttcaacttcgaggacatgcaggagatcaccaagcactttgtggtgtgtcacgtggatgcccctggacaacaggtgggggcgtcgcagtttcctcaggggtaccagttcccctccatggagcagctggctgccatgctccccagcgtggtgcagcatttcgggttcaagtatgtgattggcatcggagtgggcgccggagcctatgtgctggccaagtttgcactcatcttccccgacctggtggaggggctggtgctggtgaacatcgaccccaatggcaaaggctggatagactgggctgccaccaagctctccggcctaactagcactttacccgacacggtgctctcccacctcttcagccaggaggagctggtgaacaacacagagttggtgcagagctaccggcagcagattgggaacgtggtgaaccaggccaacctgcagctcttctggaacatgtacaacagccgcagagacctggacattaaccggcctggaacggtgcccaatgccaagacgctccgctgccccgtgatgctggtggttggggataatgcacccgctgaggacggggtggtggagtgcaactccaaactggacccgaccactacgaccttcctgaagatggcagactctggagggctgccccaggtcacacagccagggaagctgactgaagccttcaaatacttcctgcaaggcatgggctacatgccctcagccagcatgacccgcctggcacgctcccgcactgcatccctcaccagtgccagctcggtggatggcagccgcccacaggcctgcacccactcagagagcagcgaggggctgggccaggtcaaccacaccatggaggtgtcctgttgaagcccttgatcccgctgacgacgcccacgtcgaggccccaccgccatccttgcgccggctcatgttccctttagtttatttttgtgagggcaaaggggaggaaatggggttctgtttgaaaaaaatgaggggatcttagatgctgcagcagaacagtctccaggtgttttaaggggctcagtcctcctcatcccatctcactctccgtggtaacttagccaacttgacccctctcatcccactcccggcggcccaggcacagaagggcagggccatagggagggagattcgctacggatccaggccattcctgggtgagcccttgggcaggcatgtttggagatgagagaggcttcgagagggtgggtgctgggccacaggggtgcggggccagctcaggcactggcgtgggagccctgggagaccccttcccccaccctccaccaagcacacctgtttctgtctcatagcacatgtgacaatcatctggacaacagccacaagggggcgctcggaccaggcagccactttcctggtgctctctgggcccagctggtgctgtagggccacgcaggcaggggcgtcaaggggtttctctgcccaaggaagacagaacatggagaaccgtcagggcaggaaccccacagactgtcccttccagcccacactctgccacctcctggccctgtcccaattctgagccaaggcctccccgaggcagaagttgcctggtcctctgtccccacagtgacctgactgggggtgagggagaaggaggagagagcccatgtgtggtgtgtgtgcccctgagaacttcgtggtgactgcctttgggagcccgcaggtggccagaggcaggggtagctgagttcctggagaccccttttttgcccccaggttccccagagggcaacgccatcagtagcagtgtggtgtttcaggcagagctctggccaggctgtgccagtgtgtcccggacgcatcactaaggaagagagagtttatttagtcaactggcccaaggcagcgaggcttctacagtcccacaccccatagccgcctgggctggggcttactgggggctgaaggttctggacatgaacaagggtcaggtagaagagaaaggcttcccctacaccccagcctcctgctgtcccctgaagcccaggactgcgttgtatgctttccatccactcaccttaccccatagcatcttgcggcccagaaaccagagccatttgtctcagaccctaaatcaataatcacaaaccccaaaacgggagagagcagtgaaaacatgcagggctgtggacgggggaagggttgtggcgggtgttctgaggctgagaggacacctatatgcgtatttcctctacacacatcaccccccttctataatcttaagccatgactagcctggtggcgtgttagtttctgcccagttctaccccctcatgtgcttcttctgaatactgaatgtgactgtttgaaagctggtagaattcatccctcttactgtagataacactgcaaatcttggaattttgttttttgctgtttccagatgtatctataaatatctatacattatatgtgtgtgtgtgtgtgtgtgtgtgtgtgtacatcgggtcctcccatgtgtggtgttcttctggaggttgtctctttggtcaaggtgaacttttaatgtttattattttcttctccgcacaaagtaaagagcctaattttgtgtattctggtggctgctgtcatgagatgataaaatgtaaaacaaaactctagtcaacgtagaaagagttaactgtgctgaaaaactaataaagaacctaagaagaattccagtgtggtgatgccatgcccatcatgggaggcttttggagaaacagaatgtttgggcaggggctgctggtgctgcttgggttttgggttgagggtgctaggagaggatggtctccacccatctttctatttccagtacacgtcacattattttaccggtgagatgagaatgtcacaaacattaaaagccttatgtgctca

SEQ ID NO: 158082 - DNA, 705 bp, Homo sapiens
  Payload ID: 10957
  Gene Symbol: NDRG4
  Gene Name: NDRG family member 4
  ENST ID: ENST00000564126
  CDS Start-End: 109-705
ctggctgcccgcacctgcacccgcgcgtcggcggcgccgaagccccgctccccgcctgcgcgtctgtctcgtccgcatctccgcggcctcctgctccacgacgtgaccatggccgggctgcaggagctgcgattccctgaggagaagccgctgctccggggccaggacgccaccgagctggagagctccgatgccttcctcttggctgcagacacagactggaagaggagccaagagcggaggctgcccagagtgtccagcacggtctctccccttcaggaacatgacatcgagacaccctacggccttctgcatgtagtgatccggggctcccccaaggggaaccgcccagccatcctcacctaccatgatgtgggcctcaaccacaaactatgcttcaacaccttcttcaacttcgaggacatgcaggagatcaccaagcactttgtggtgtgtcacgtggatgcccctggacaacaggtgggggcgtcgcagtttcctcaggggtaccagttcccctccatggagcagctggctgccatgctccccagcgtggtgcagcatttcgggttcaagtatgtgattggcatcggagtgggcgccggagcctatgtgctggccaagtttgcactcatcttccccgacctggtggaggggctggtgctggtgaacatcgaccccaatggcaaaggctggatagactgg

SEQ ID NO: 158083 - DNA, 461 bp, Homo sapiens
  Payload ID: 10957
  Gene Symbol: NDRG4
  Gene Name: NDRG family member 4
  ENST ID: ENST00000569408
  CDS Start-End: 1-244
ggccaacctgcagctcttctggaacatgtacaacaggcctgcacccactcagagagcagcgaggggctgggccaggtcaaccacaccatggaggtgtcctgttgaagcccttgatcccgctgacgacgcccacgtcgaggccccaccgccatccttgcgccggctcatgttccctttagtttatttttgtgagggcaaaggggaggaaatggggttctgtttgaaaaaaatgaggggatcttagatgctgcagcagaacagtctccaggtgttttaaggggctcagtcctcctcatcccatctcactctccgtggtaacttagccaacttgacccctctcatcccactcccggcggcccaggcacagaagggcagggccatagggagggagattcgctacggatccaggccattcctgggtgagcccttgggcaggcatgtttggagatgagagaggcttc

SEQ ID NO: 158084 - DNA, 558 bp, Homo sapiens
  Payload ID: 10957
  Gene Symbol: NDRG4
  Gene Name: NDRG family member 4
  ENST ID: ENST00000567063
  CDS Start-End: 307-558
tcctgccgcttcgctccgcgctctcctgccgctccgctccgggtctcccgcgctcctctccccggctcggccgagcgcgctgccccgacgccgccacccagagccgggccgcgccgggcgccgagatgaaggtgctgggacaccggctggagctgctcacaggaacatgacatcgagacaccctacggccttctgcatgtagtgatccggggctcccccaaggggaaccgcccagccatcctcacctaccatgatgtgggcctcaaccacaaactatgcttcaacaccttcttcaacttcgaggacatgcaggagatcaccaagcactttgtggtgtgtcacgtggatgcccctggacaacaggtgggggcgtcgcagtttcctcaggggtaccagttcccctccatggagcagctggctgccatgctccccagcgtggtgcagcatttcgggttcaagtatgtgattggcatcggagtgggcgccggagcctatgtgctggccaagtttgcactcatcttccccgacctggtggaggggctggtgctggtgaacatc

SEQ ID NO: 158085 - DNA, 599 bp, Homo sapiens
  Payload ID: 10957
  Gene Symbol: NDRG4
  Gene Name: NDRG family member 4
  ENST ID: ENST00000568464
  CDS Start-End: 107-298
acagagccgaccatctcccactcgagctgcccccgccctctggacccgagtgactcaggcctttgtttgtccttcctggtagaggcgggttccctccctcggcaagatgccggagtgctgggatggggtgggggaaggcaacgctggagccgtgaagctggcagggctaggggaccccaggtggagcccagggcacctcctctcgccggggcatcagccccaccctccagagctgagagaactcacaggtggctgtgaaagggctgcctggtcaggagctccctcgggtggaacctgatctcctgtgaacatgcagccttcagtgcaccgccctggcccctgagactggcacctggcagggcctgccctccctactctgggattgaccttgggaacatgacatcgagacaccctacggccttctgcatgtagtgatccggggctcccccaaggggaaccgcccagccatcctcacctaccatgatgtgggcctcaaccacaaactatgcttcaacaccttcttcaacttcgaggacatgcaggagatcaccaagcactttgtggtgtgtcacgtggatgcccctggacaacaggtgggg

SEQ ID NO: 158086 - DNA, 3265 bp, Homo sapiens
  Payload ID: 10957
  Gene Symbol: NDRG4
  Gene Name: NDRG family member 4
  Uniprot ID: Q9ULP0
  ENST ID: ENST00000566192
  CDS Start-End: 203-1222
gtaagcgagtggctgctcagaaaccctgcggggaggaggggctagctaggctgggccaggatccctgtataaatggcccaggagctgtgccccatcacagagccgaccatctcccactcgagctgcccccgccctctggacccgagtgactcaggcctttgtttgtccttcctggtagaggcgggttccctccctcggcaagatgccggagtgctgggatggggaacatgacatcgagacaccctacggccttctgcatgtagtgatccggggctcccccaaggggaaccgcccagccatcctcacctaccatgatgtgggcctcaaccacaaactatgcttcaacaccttcttcaacttcgaggacatgcaggagatcaccaagcactttgtggtgtgtcacgtggatgcccctggacaacaggtgggggcgtcgcagtttcctcaggggtaccagttcccctccatggagcagctggctgccatgctccccagcgtggtgcagcatttcgggttcaagtatgtgattggcatcggagtgggcgccggagcctatgtgctggccaagtttgcactcatcttccccgacctggtggaggggctggtgctggtgaacatcgaccccaatggcaaaggctggatagactgggctgccaccaagctctccggcctaactagcactttacccgacacggtgctctcccacctcttcagccaggaggagctggtgaacaacacagagttggtgcagagctaccggcagcagattgggaacgtggtgaaccaggccaacctgcagctcttctggaacatgtacaacagccgcagagacctggacattaaccggcctggaacggtgcccaatgccaagacgctccgctgccccgtgatgctggtggttggggataatgcacccgctgaggacggggtggtggagtgcaactccaaactggacccgaccactacgaccttcctgaagatggcagactctggagggctgccccaggtcacacagccagggaagctgactgaagccttcaaatacttcctgcaaggcatgggctacatgccctcagccagcatgacccgcctggcacgctcccgcactgcatccctcaccagtgccagctcggtggatggcagccgcccacaggcctgcacccactcagagagcagcgaggggctgggccaggtcaaccacaccatggaggtgtcctgttgaagcccttgatcccgctgacgacgcccacgtcgaggccccaccgccatccttgcgccggctcatgttccctttagtttatttttgtgagggcaaaggggaggaaatggggttctgtttgaaaaaaatgaggggatcttagatgctgcagcagaacagtctccaggtgttttaaggggctcagtcctcctcatcccatctcactctccgtggtaacttagccaacttgacccctctcatcccactcccggcggcccaggcacagaagggcagggccatagggagggagattcgctacggatccaggccattcctgggtgagcccttgggcaggcatgtttggagatgagagaggcttcgagagggtgggtgctgggccacaggggtgcggggccagctcaggcactggcgtgggagccctgggagaccccttcccccaccctccaccaagcacacctgtttctgtctcatagcacatgtgacaatcatctggacaacagccacaagggggcgctcggaccaggcagccactttcctggtgctctctgggcccagctggtgctgtagggccacgcaggcaggggcgtcaaggggtttctctgcccaaggaagacagaacatggagaaccgtcagggcaggaaccccacagactgtcccttccagcccacactctgccacctcctggccctgtcccaattctgagccaaggcctccccgaggcagaagttgcctggtcctctgtccccacagtgacctgactgggggtgagggagaaggaggagagagcccatgtgtggtgtgtgtgcccctgagaacttcgtggtgactgcctttgggagcccgcaggtggccagaggcaggggtagctgagttcctggagaccccttttttgcccccaggttccccagagggcaacgccatcagtagcagtgtggtgtttcaggcagagctctggccaggctgtgccagtgtgtcccggacgcatcactaaggaagagagagtttatttagtcaactggcccaaggcagcgaggcttctacagtcccacaccccatagccgcctgggctggggcttactgggggctgaaggttctggacatgaacaagggtcaggtagaagagaaaggcttcccctacaccccagcctcctgctgtcccctgaagcccaggactgcgttgtatgctttccatccactcaccttaccccatagcatcttgcggcccagaaaccagagccatttgtctcagaccctaaatcaataatcacaaaccccaaaacgggagagagcagtgaaaacatgcagggctgtggacgggggaagggttgtggcgggtgttctgaggctgagaggacacctatatgcgtatttcctctacacacatcaccccccttctataatcttaagccatgactagcctggtggcgtgttagtttctgcccagttctaccccctcatgtgcttcttctgaatactgaatgtgactgtttgaaagctggtagaattcatccctcttactgtagataacactgcaaatcttggaattttgttttttgctgtttccagatgtatctataaatatctatacattatatgtgtgtgtgtgtgtgtgtgtgtgtgtgtacatcgggtcctcccatgtgtggtgttcttctggaggttgtctctttggtcaaggtgaacttttaatgtttattattttcttctccgcacaaagtaaagagcctaattttgtgtattctggtggctgctgtcatgagatgataaaatgtaaaacaaaactctagtcaacgtagaaagagttaactgtgctgaaaaactaataaagaacctaagaagaattccagtgtggtgatgccatgcccatcatgggaggcttttggagaaacagaatgtttgggcaggggctgctggtgctgcttgggttttgggttgagggtgctaggagaggatggtctccacccatctttctatttccagtacacgtcacattattttaccggtgagatgagaatgtcacaaacattaaaagccttatgtgctca

SEQ ID NO: 158087 - DNA, 590 bp, Homo sapiens
  Payload ID: 10957
  Gene Symbol: NDRG4
  Gene Name: NDRG family member 4
  ENST ID: ENST00000567667
  CDS Start-End: 143-590
acctgcacccgcgcgtcggcggcgccgaagccccgctccccgcctgcgcgtctgtctcgtccgcatctccgcggatctcaaaatagaggattcccaaatcatggcttcatgattctcaggcctcctgctccacgacgtgaccatggccgggctgcaggagctgcgattccctgaggagaagccgctgctccggggccaggacgccaccgagctggagagctccgatgccttcctcttggctgcagacacagactggaaggaacatgacatcgagacaccctacggccttctgcatgtagtgatccggggctcccccaaggggaaccgcccagccatcctcacctaccatgatgtgggcctcaaccacaaactatgcttcaacaccttcttcaacttcgaggacatgcaggagatcaccaagcactttgtggtgtgtcacgtggatgcccctggacaacaggtgggggcgtcgcagtttcctcaggggtaccagttcccctccatggagcagctggctgccatgctccccagcgtggtgcagcatttcgggttcaagtatgtgattggcatcggagtgggcgccggagcct

SEQ ID NO: 158088 - DNA, 533 bp, Homo sapiens
  Payload ID: 10957
  Gene Symbol: NDRG4
  Gene Name: NDRG family member 4
  ENST ID: ENST00000565304
  CDS Start-End: 99-533
gcacctgcacccgcgcgtcggcggcgccgaagccccgctccccgcctgcgcgtctgtctcgtccgcatctccgcggcctcctgctccacgacgtgaccatggccgggctgcaggagctgcgattccctgaggagaagccgctgctccggggccaggacgccaccgagctggaacatgacatcgagacaccctacggccttctgcatgtagtgatccggggctcccccaaggggaaccgcccagccatcctcacctaccatgatgtgggcctcaaccacaaactatgcttcaacaccttcttcaacttcgaggacatgcaggagatcaccaagcactttgtggtgtgtcacgtggatgcccctggacaacaggtgggggcgtcgcagtttcctcaggggtaccagttcccctccatggagcagctggctgccatgctccccagcgtggtgcagcatttcgggttcaagtatgtgattggcatcggagtgggcgccggagcctatgtgctggccaagtttgcagtgagtctcccc

SEQ ID NO: 158089 - DNA, 556 bp, Homo sapiens
  Payload ID: 10957
  Gene Symbol: NDRG4
  Gene Name: NDRG family member 4
  ENST ID: ENST00000568999
  CDS Start-End: 89-556
ttttcaggccatcagatttccgtactccctggagtgggacttcatctgggaccaaaggagggctggcctcctgctccacgacgtgaccatggccgggctgcaggagctgcgattccctgaggagaagccgctgctccggggccaggacgccaccgagctggagagctccgatgccttcctcttggctgcagacacagactggaaggaacatgacatcgagacaccctacggccttctgcatgtagtgatccggggctcccccaaggggaaccgcccagccatcctcacctaccatgatgtgggcctcaaccacaaactatgcttcaacaccttcttcaacttcgaggacatgcaggagatcaccaagcactttgtggtgtgtcacgtggatgcccctggacaacaggtgggggcgtcgcagtttcctcaggggtaccagttcccctccatggagcagctggctgccatgctccccagcgtggtgcagcatttcgggttcaagtatgtgattggcatcggagtgggcgccggagcctatgtgctggccaagtttgca

SEQ ID NO: 158090 - DNA, 545 bp, Homo sapiens
  Payload ID: 10957
  Gene Symbol: NDRG4
  Gene Name: NDRG family member 4
  ENST ID: ENST00000566041
  CDS Start-End: 429-545
gcttcgctccgcgctctcctgccgctccgctccgggtctcccgcgctcctctccccggctcggccgagcgcgctgccccgacgccgccacccagagccgggccgcgccgggcgccgagatgaaggtgctgggacaccggctggagctgctcacaggacccgcgccatggacctcttatttctgcgccctgtgacaatctgagccgtctttctctgggggagaagtttcttgctgggagtggaggcgacgccaagtggcctgggaagtgggaagccagattggaccctactgactggggaccctcagccttggggctcctctggagaagtgatcagttgccctgctggaaactcacatccagggggcagtggctggagagcaagagcgaacggtcaggaagaggaggcctcctgctccacgacgtgaccatggccgggctgcaggagctgcgattccctgaggagaagccgctgctccggggccaggacgccaccgagctggagagctccgatgccttcctcttggctgcagacacagactggaag

SEQ ID NO: 158091 - DNA, 573 bp, Homo sapiens
  Payload ID: 10957
  Gene Symbol: NDRG4
  Gene Name: NDRG family member 4
  ENST ID: ENST00000561738
  CDS Start-End: 1-573
tgtagtgatccggggctcccccaaggggaaccgcccagccatcctcacctaccatgatgtgggcctcaaccacaaactatgcttcaacaccttcttcaacttcgaggacatgcaggagatcaccaagcactttgtggtgtgtcacgtggatgcccctggacaacaggtgggggcgtcgcagtttcctcaggggtaccagttcccctccatggagcagctggctgccatgctccccagcgtggtgcagcatttcgggttcaagtatgtgattggcatcggagtgggcgccggagcctatgtgctggccaagtttgcactcatcttccccgacctggtggaggggctggtgctggtgaacatcgaccccaatggcaaaggctggatagactgggctgccaccaagctctccggcctaactagcactttacccgacacggtgctctcccacctcttcagccaggagctggtgaacaacacagagttggtgcagagctaccggcagcagattgggaacgtggtgaaccaggccaacctgcagctcttctggaacatgtacaacagccgcagagacct

SEQ ID NO: 158092 - DNA, 590 bp, Homo sapiens
  Payload ID: 10957
  Gene Symbol: NDRG4
  Gene Name: NDRG family member 4
  ENST ID: ENST00000569404
  CDS Start-End: 118-590
gaggggctcctggctgcccgcacctgcacccgcgcgtcggcggcgccgaagccccgctccccgcctgcgcgtctgtctcgtccgcatctccgcggcctcctgctccacgacgtgaccatggccgggctgcaggagctgcgattccctgaggagaagccgctgctccggggccaggacgccaccgagctggagagctccgatgccttcctcttggctgcagacacagactggaaggtgggggaaggcaacgctggagccgtgaagctggcagggctaggggaccccaggtggagcccagggcacctcctctcgccggggcatcaggaacatgacatcgagacaccctacggccttctgcatgtagtgatccggggctcccccaaggggaaccgcccagccatcctcacctaccatgatgtgggcctcaaccacaaactatgcttcaacaccttcttcaacttcgaggacatgcaggagatcaccaagcactttgtggtgtgtcacgtggatgcccctggacaacaggtgggggcgtcgcagtttcctcaggggtaccagttcccctccatggagcagctggctgccatgct

SEQ ID NO: 158093 - DNA, 550 bp, Homo sapiens
  Payload ID: 10957
  Gene Symbol: NDRG4
  Gene Name: NDRG family member 4
  ENST ID: ENST00000564207
  CDS Start-End: 90-550
acagggggcctggaggggcgggcagggcctcgcagcgcacccagcacagtccgcgcggcggagcgggcctcctgctccacgacgtgaccatggccgggctgcaggagctgcgattccctgaggagaagccgctgctccggggccaggacgccaccgagctggagagctccgatgccttcctcttggctgcagacacagactggaaggaacatgacatcgagacaccctacggccttctgcatgtagtgatccggggctcccccaaggggaaccgcccagccatcctcacctaccatgatgtgggcctcaaccacaaactatgcttcaacaccttcttcaacttcgaggacatgcaggagatcaccaagcactttgtggtgtgtcacgtggatgcccctggacaacaggtgggggcgtcgcagtttcctcaggggtaccagttcccctccatggagcagctggctgccatgctccccagcgtggtgcagcatttcgggttcaagtatgtgattggcatcggagtgggcgccggagcctatgtgctggccaa

SEQ ID NO: 158094 - DNA, 610 bp, Homo sapiens
  Payload ID: 10957
  Gene Symbol: NDRG4
  Gene Name: NDRG family member 4
  ENST ID: ENST00000567454
  CDS Start-End: 150-610
agagcgctcctggctgtgagctgctcctgccgcttcgctccgcgctctcctgccgctccgctccgggtctcccgcgctcctctccccggctcggccgagcgcgctgccccgacgccgccacccagagccgggccgcgccgggcgccgagatgaaggtgctgggacaccggctggagctgctcacaggcctcctgctccacgacgtgaccatggccgggctgcaggagctgcgattccctgaggagaagccgctgctccggggccaggacgccaccgagctggagagctccgatgccttcctcttggctgcagacacagactggaagaggagccaagagcggaggctgcccagagtgtccagcacggtctctccccttcaggaacatgacatcgagacaccctacggccttctgcatgtagtgatccggggctcccccaaggggaaccgcccagccatcctcacctaccatgatgtgggcctcaaccacaaactatgcttcaacaccttcttcaacttcgaggacatgcaggagatcaccaagcactttgtggtgtgtcacgtggatgcccctggacaacaggtgggggcgtcgcagtttcctcaggggta

SEQ ID NO: 158095 - DNA, 566 bp, Homo sapiens
  Payload ID: 10957
  Gene Symbol: NDRG4
  Gene Name: NDRG family member 4
  ENST ID: ENST00000565430
  CDS Start-End: 232-566
tcctgccgcttcgctccgcgctctcctgccgctccgctccgggtctcccgcgctcctctccccggctcggccgagcgcgctgccccgacgccgccacccagagccgggccgcgccgggcgccgagatgaaggtgctgggacaccggctggagctgctcacaggatctcaaaatagaggattcccaaatcatggcttcatgattctcaggcctcctgctccacgacgtgaccatggccgggctgcaggagctgcgattccctgaggagaagccgctgctccggggccaggacgccaccgagctggagagctccgatgccttcctcttggctgcagacacagactggaaggaacatgacatcgagacaccctacggccttctgcatgtagtgatccggggctcccccaaggggaaccgcccagccatcctcacctaccatgatgtgggcctcaaccacaaactatgcttcaacaccttcttcaacttcgaggacatgcaggagatcaccaagcactttgtggtgtgtcacgtggatgcccctggacaacaggtgggggcgtcgcagtt

SEQ ID NO: 158096 - DNA, 583 bp, Homo sapiens
  Payload ID: 10957
  Gene Symbol: NDRG4
  Gene Name: NDRG family member 4
  ENST ID: ENST00000569026
  CDS Start-End: 1-464
tgcagctcatcttccccgacctggtggaggggctggtgctggtgaacatcgaccccaatggcaaaggctggatagactgggctgccaccaagctctccggcctaactagcactttacccgacacggtgctctcccacctcttcagccaggaggagctggtgaacaacacagagttggtgcagagctaccggcagcagattgggaacgtggtgaaccaggccaacctgcagctcttctggaacatgtacaacagccgcagagacctggacattaaccggcctggaacggtgcccaatgccaagacgctccgctgccccgtgatgctggtggttggggataatgcacccgctgaggacggggtggtggagtgcaactccaaactggacccgaccactacgaccttcctgaagatggcagactctggagggctgccccaggtcacacagtgccctcagccagcatgacccgcctggcacgctcccgcactgcatccctcaccagtgccagctcggtggatggcagccgcccacaggcctgcacccactcagagagcagcgaggggctgggccaggtcaaccacacc

SEQ ID NO: 158097 - DNA, 610 bp, Homo sapiens
  Payload ID: 10957
  Gene Symbol: NDRG4
  Gene Name: NDRG family member 4
  ENST ID: ENST00000562764
  CDS Start-End: 191-313
aaacccacgcgggcacgcccccgcggcgcaccgcccccagcccggcctccgcccctgcagccgcgggcacgcggaggggctcctggctgcccgcacctgcacccgcgcgtcggcggcgccgaagccccgctccccgcctgcgcgtctgtctcgtccgcatctccgcggcctcctgctccacgacgtgaccatggccgggctgcaggagctgcgattccctgaggagaagccgctgctccggggccaggacgccaccgagctggagagctccgatgccttcctcttggctgcagacacagactggaaggcctaacaggtaccaggctgcgtcacctcattccccagaggagccaagagcggaggctgcccagagtgtccagcacggtctctccccttcaggaacatgacatcgagacaccctacggccttctgcatgtagtgatccggggctcccccaaggggaaccgcccagccatcctcacctaccatgatgtgggcctcaaccacaaactatgcttcaacaccttcttcaacttcgaggacatgcaggagatcaccaagcactttgtggtgtgtcacgtggatgcccctggacaacaggtgggggcgt

SEQ ID NO: 158098 - DNA, 563 bp, Homo sapiens
  Payload ID: 10957
  Gene Symbol: NDRG4
  Gene Name: NDRG family member 4
  ENST ID: ENST00000562930
  CDS Start-End: 107-223
acagagccgaccatctcccactcgagctgcccccgccctctggacccgagtgactcaggcctttgtttgtccttcctggtagaggcgggttccctccctcggcaagatgccggagtgctgggatggggtgggggaaggcaacgctggagccgtgaagctggcagggctaggggaccccaggtggagcccagggcacctcctctcgccggggcatcaggcctaacaggtaccaggctgcgtcacctcattccccagaggagccaagagcggaggctgcccagagtgtccagcacggtctctccccttcaggaacatgacatcgagacaccctacggccttctgcatgtagtgatccggggctcccccaaggggaaccgcccagccatcctcacctaccatgatgtgggcctcaaccacaaactatgcttcaacaccttcttcaacttcgaggacatgcaggagatcaccaagcactttgtggtgtgtcacgtggatgcccctggacaacaggtgggggcgtcgcagtttcctcaggggtaccagttcccctccatggagcagct

SEQ ID NO: 158099 - DNA, 558 bp, Homo sapiens
  Payload ID: 10957
  Gene Symbol: NDRG4
  Gene Name: NDRG family member 4
  ENST ID: ENST00000563978
  CDS Start-End: 308-558
acagagccgaccatctcccactcgagctgcccccgccctctggacccgagtgactcaggcctttgtttgtccttcctggtagaggcgggttccctccctcggcaagatgccggagtgctgggatggggcctaacaggtaccaggctgcgtcacctcattccccagaggagccaagagcggaggctgcccagagtgtccagcacggtctctccccttcaggaacatgacatcgagacaccctacggccttctgcatgtagtgatccggggctcccccaaggggaaccgcccagccatcctcacctaccatgatgtgggcctcaaccgacatgcaggagatcaccaagcactttgtggtgtgtcacgtggatgcccctggacaacaggtgggggcgtcgcagtttcctcaggggtaccagttcccctccatggagcagctggctgccatgctccccagcgtggtgcagcatttcgggttcaagtatgtgattggcatcggagtgggcgccggagcctatgtgctggccaagtttgcactcatcttccccgacctggtgga

SEQ ID NO: 158100 - DNA, 697 bp, Homo sapiens
  Payload ID: 10957
  Gene Symbol: NDRG4
  Gene Name: NDRG family member 4
  ENST ID: ENST00000564486
  CDS Start-End: 179-697
agagcaagagcgaacggtcaggaagaggaggtgggaaagggagcagggacgggggggaggattcgaggagtgacttctgtgttctccccggtgtggagagacccagacaggaggaaaggaaagcaacccggtttcctccagctctgggacttataggtgctccatccgtgtatgtcagatgagcacagattccagcctcctgctccacgacgtgaccatggccgggctgcaggagctgcgattccctgaggagaagccgctgctccggggccaggacgccaccgagctggagagctccgatgccttcctcttggctgcagacacagactggaaggaacatgacatcgagacaccctacggccttctgcatgtagtgatccggggctcccccaaggggaaccgcccagccatcctcacctaccatgatgtgggcctcaaccacaaactatgcttcaacaccttcttcaacttcgaggacatgcaggagatcaccaagcactttgtggtgtgtcacgtggatgcccctggacaacaggtgggggcgtcgcagtttcctcaggggtaccagttcccctccatggagcagctggctgccatgctccccagcgtggtgcagcatttcgggttcaagtatgtgattggcatcggagtgggcgccggagcctatgtgctggccaagtttgcagtgagtctcccc

SEQ ID NO: 158101 - DNA, 2931 bp, Homo sapiens
  Payload ID: 10957
  Gene Symbol: NDRG4
  Gene Name: NDRG family member 4
  ENST ID: ENST00000562999
  CDS Start-End: 107-1090
acagagccgaccatctcccactcgagctgcccccgccctctggacccgagtgactcaggcctttgtttgtccttcctggtagaggcgggttccctccctcggcaagatgccggagtgctgggatggggaacatgacatcgagacaccctacggccttctgcatgtagtgatccggggctcccccaaggggaaccgcccagccatcctcacctaccatgatgtgggcctcaaccacaaactatgcttcaacaccttcttcaacttcgaggacatgcaggagatcaccaagcactttgtggtgtgtcacgtggatgcccctggacaacaggtgggggcgtcgcagtttcctcaggggtaccagttcccctccatggagcagctggctgccatgctccccagcgtggtgcagcatttcgggttcaagtatgtgattggcatcggagtgggcgccggagcctatgtgctggccaagtttgcactcatcttccccgacctggtggaggggctggtgctggtgaacatcgaccccaatggcaaaggctggatagactgggctgccaccaagctctccggcctaactagcactttacccgacacggtgctctcccacctcttcagccaggaggagctggtgaacaacacagagttggtgcagagctaccggcagcagattgggaacgtggtgaaccaggccaacctgcagctcttctggaacatgtacaacagccgcagagacctggacattaaccggcctggaacggtgcccaatgccaagacgctccgctgccccgtgatgctggtggttggggataatgcacccgctgaggacggggtggtggagtgcaactccaaactggacccgaccactacgaccttcctgaagccagggaagctgactgaagccttcaaatacttcctgcaaggcatgggctacatgccctcagccagcatgacccgcctggcacgctcccgcactgcatccctcaccagtgccagctcggtggatggcagccgcccacaggcctgcacccactcagagagcagcgaggggctgggccaggtcaaccacaccatggaggtgtcctgttgaagcccttgatcccgctgacgacgcccacgtcgaggccccaccgccatccttgcgccggctcatgttccctttagtttatttttgtgagggcaaaggggaggaaatggggttctgtttgaaaaaaatgaggggatcttagatgctgcagcagaacagtctccaggtgttttaaggggctcagtcctcctcatcccatctcactctccgtggtaacttagccaacttgacccctctcatcccactcccggcggcccaggcacagaagggcagggccatagggagggagattcgctacggatccaggccattcctgggtgagcccttgggcaggcatgtttggagatgagagaggcttcgagagggtgggtgctgggccacaggggtgcggggccagctcaggcactggcgtgggagccctgggagaccccttcccccaccctccaccaagcacacctgtttctgtctcatagcacatgtgacaatcatctggacaacagccacaagggggcgctcggaccaggcagccactttcctggtgctctctgggcccagctggtgctgtagggccacgcaggcaggggcgtcaaggggtttctctgcccaaggaagacagaacatggagaaccgtcagggcaggaaccccacagactgtcccttccagcccacactctgccacctcctggccctgtcccaattctgagccaaggcctccccgaggcagaagttgcctggtcctctgtccccacagtgacctgactgggggtgagggagaaggaggagagagcccatgtgtggtgtgtgtgcccctgagaacttcgtggtgactgcctttgggagcccgcaggtggccagaggcaggggtagctgagttcctggagaccccttttttgcccccaggttccccagagggcaacgccatcagtagcagtgtggtgtttcaggcagagctctggccaggctgtgccagtgtgtcccggacgcatcactaaggaagagagagtttatttagtcaactggcccaaggcagcgaggcttctacagtcccacaccccatagccgcctgggctggggcttactgggggctgaaggttctggacatgaacaagggtcaggtagaagagaaaggcttcccctacaccccagcctcctgctgtcccctgaagcccaggactgcgttgtatgctttccatccactcaccttaccccatagcatcttgcggcccagaaaccagagccatttgtctcagaccctaaatcaataatcacaaaccccaaaacgggagagagcagtgaaaacatgcagggctgtggacgggggaagggttgtggcgggtgttctgaggctgagaggacacctatatgcgtatttcctctacacacatcaccccccttctataatcttaagccatgactagcctggtggcgtgttagtttctgcccagttctaccccctcatgtgcttcttctgaatactgaatgtgactgtttgaaagctggtagaattcatccctcttactgtagataacactgcaaatcttggaattttgttttttgctgtttccagatgtatctataaatatctatacattatatgtgtgtgtgtgtgtgtgtgtgtgtgtgtacatcgggtcctcccatgtgtggtgttcttctggaggttgtctctttggtcaaggtgaacttttaatgtttattattttcttctccgcacaaagtaaagagcctaattttgtgtattctggtggctgctgtcatgagatgataaaatgtaaaacaaaactctagtcaacgtagaaagagttaactgtgctgaaaaactaataaagaacctaagaagaatt

SEQ ID NO: 158102 - DNA, 585 bp, Homo sapiens
  Payload ID: 10957
  Gene Symbol: NDRG4
  Gene Name: NDRG family member 4
  ENST ID: ENST00000561724
  CDS Start-End: 134-585
aaagcccttaccagctgcagagtattcactctgtgcttggcctatgtggacggagcagaggagcagttgtcagagatgacccagaggtcccttgcaacccacaacctaaggcctcctgctccacgacgtgaccatggccgggctgcaggagctgcgattccctgaggagaagccgctgctccggggccaggacgccaccgagctggagagctccgatgccttcctcttggctgcagacacagactggaaggaacatgacatcgagacaccctacggccttctgcatgtagtgatccggggctcccccaaggggaaccgcccagccatcctcacctaccatgatgtgggcctcaaccacaaactatgcttcaacaccttcttcaacttcgaggacatgcaggagatcaccaagcactttgtggtgtgtcacgtggatgcccctggacaacaggtgggggcgtcgcagtttcctcaggggtaccagttcccctccatggagcagctggctgccatgctccccagcgtggtgcagcatttcgggttcaagtatgtgattggcatcggagtgggcgccggagcctatgt

SEQ ID NO: 158103 - DNA, 1281 bp, Homo sapiens
  Payload ID: 10957
  Gene Symbol: NDRG4
  Gene Name: NDRG family member 4
  Uniprot ID: Q9ULP0
  ENST ID: ENST00000568640
  CDS Start-End: 143-1216
atccctgtataaatggcccaggagctgtgccccatcacagagccgaccatctcccactcgagctgcccccgccctctggacccgagtgactcaggcctttgtttgtccttcctggtagaggcgggttccctccctcggcaagatgccggagtgctgggatgggaggagccaagagcggaggctgcccagagtgtccagcacggtctctccccttcaggaacatgacatcgagacaccctacggccttctgcatgtagtgatccggggctcccccaaggggaaccgcccagccatcctcacctaccatgatgtgggcctcaaccacaaactatgcttcaacaccttcttcaacttcgaggacatgcaggagatcaccaagcactttgtggtgtgtcacgtggatgcccctggacaacaggtgggggcgtcgcagtttcctcaggggtaccagttcccctccatggagcagctggctgccatgctccccagcgtggtgcagcatttcgggttcaagtatgtgattggcatcggagtgggcgccggagcctatgtgctggccaagtttgcactcatcttccccgacctggtggaggggctggtgctggtgaacatcgaccccaatggcaaaggctggatagactgggctgccaccaagctctccggcctaactagcactttacccgacacggtgctctcccacctcttcagccaggaggagctggtgaacaacacagagttggtgcagagctaccggcagcagattgggaacgtggtgaaccaggccaacctgcagctcttctggaacatgtacaacagccgcagagacctggacattaaccggcctggaacggtgcccaatgccaagacgctccgctgccccgtgatgctggtggttggggataatgcacccgctgaggacggggtggtggagtgcaactccaaactggacccgaccactacgaccttcctgaagatggcagactctggagggctgccccaggtcacacagccagggaagctgactgaagccttcaaatacttcctgcaaggcatgggctacatgccctcagccagcatgacccgcctggcacgctcccgcactgcatccctcaccagtgccagctcggtggatggcagccgcccacaggcctgcacccactcagagagcagcgaggggctgggccaggtcaaccacaccatggaggtgtcctgttgaagcccttgatcccgctgacgacgcccacgtcgaggccccaccgccatccttgcgccggctcatgt

SEQ ID NO: 158104 - DNA, 747 bp, Homo sapiens
  Payload ID: 10957
  Gene Symbol: NDRG4
  Gene Name: NDRG family member 4
  ENST ID: ENST00000565434
  CDS Start-End: 322-747
aatcagtgtcgcttgtcccctaagaaaggacccgtgggcttctggcaggacccgcgccatggacctcttatttctgcgccctgtgacaatctgagccgtctttctctgggggagaagtttcttgctgggagtggaggcgacgccaagtggcctgggaagtgggaagccagattggaccctactgactggggaccctcagccttggggctcctctggagaagtgatcagttgccctgctggaaactcacatccagggggcagtggctggagagcaagagcgaacggtcaggaagaggaggcctcctgctccacgacgtgaccatggccgggctgcaggagctgcgattccctgaggagaagccgctgctccggggccaggacgccaccgagctggagagctccgatgccttcctcttggctgcagacacagactggaaggaacatgacatcgagacaccctacggccttctgcatgtagtgatccggggctcccccaaggggaaccgcccagccatcctcacctaccatgatgtgggcctcaaccacaaactatgcttcaacaccttcttcaacttcgaggacatgcaggagatcaccaagcactttgtggtgtgtcacgtggatgcccctggacaacaggtgggggcgtcgcagtttcctcaggggtaccagttcccctccatggagcagctggctgccatgctccccagcgtggtgcagcatttcgggttcaagtatgtgattggc

SEQ ID NO: 158105 - DNA, 574 bp, Homo sapiens
  Payload ID: 10957
  Gene Symbol: NDRG4
  Gene Name: NDRG family member 4
  ENST ID: ENST00000566061
  CDS Start-End: 114-311
gctccgcgctctcctgccgctccgctccgggtctcccgcgctcctctccccggctcggccgagcgcgctgccccgacgccgccacccagagccgggccgcgccgggcgccgagatgaaggtgctgggacaccggctggagctgctcacaggcctcctgctccacgacgtgaccatggccgggctgcaggagctgcgattccctgaggagaagccgctgctccggggccaggacgccaccgagctggagagctccgatgccttcctcttggctgcagacacagactggaagccgcagagacctggacattaaccggcctggaacggtgcccaatgccaagacgctccgctgccccgtgatgctggtggttggggataatgcacccgctgaggacggggtggtggagtgcaactccaaactggacccgaccactacgaccttcctgaagatggcagactctggagggctgccccaggtcacacagccagggaagctgactgaagccttcaaatacttcctgcaaggcatgggctacatgccctcagccagcatgacccgcctggcacgctcccgca

SEQ ID NO: 158106 - DNA, 581 bp, Homo sapiens
  Payload ID: 10957
  Gene Symbol: NDRG4
  Gene Name: NDRG family member 4
  ENST ID: ENST00000566618
  CDS Start-End: 255-581
agagtgcaccgcgctgtggcccttgtggggctgcccttgcgcagcgctccaagggacggggatgtttggcttcgatcaggctgaactgagtcctgagctctccgcagagggaacatgacatcgagacaccctacggccttctgcatgtagtgatccggggctcccccaaggggaaccgcccagccatcctcacctaccatgatgtgggcctcaaccacaaactatgcttcaacaccttcttcaacttcgaggacatgcaggagatcaccaagcactttgtggtgtgtcacgtggatgcccctggacaacaggtgggggcgtcgcagtttcctcaggggtaccagttcccctccatggagcagctggctgccatgctccccagcgtggtgcagcatttcgggttcaagtatgtgattggcatcggagtgggcgccggagcctatgtgctggccaagtttgcactcatcttccccgacctggtggaggggctggtgctggtgaacatcgaccccaatggcaaaggctggatagactgggctgccaccaagctctccggcctaactagcactttacccgacacg

SEQ ID NO: 158107 - DNA, 575 bp, Homo sapiens
  Payload ID: 10957
  Gene Symbol: NDRG4
  Gene Name: NDRG family member 4
  ENST ID: ENST00000562731
  CDS Start-End: 470-575
agagccgaccatctcccactcgagctgcccccgccctctggacccgagtgactcaggcctttgtttgtccttcctggtagaggcgggttccctccctcggcaagatgccggagtgctgggatggggaggcgcattgcagttcttttgcagccccaccctccagagctgagagaactcacaggtggctgtgaaagggctgcctggtcaggagctccctcgggtggaacctgatctcctgtgaacatgcagccttcagtgcaccgccctggcccctgagactggcacctggcagggcctgccctccctactctgggattgaccttgggaacatgacatcgagacaccctacggccttctgcatgtagtgatccggggctcccccaaggggaaccgcccagccatcctcacctaccatgatgtgggcctcaaccacaaactatgcttcaacaccttcttcaacttcgaggacatgcaggagatcaccaagcactttgtggtgtgtcacgtggatgcccctggacaacaggtgggggcgtcgcagtttcctcaggggtaccagttcccctccatggagc

SEQ ID NO: 158108 - DNA, 1312 bp, Homo sapiens
  Payload ID: 10957
  Gene Symbol: NDRG4
  Gene Name: NDRG family member 4
  ENST ID: ENST00000569923
  CDS Start-End: 364-1218
acagagccgaccatctcccactcgagctgcccccgccctctggacccgagtgactcaggcctttgtttgtccttcctggtagaggcgggttccctccctcggcaagatgccggagtgctgggatggggcctaacaggtaccaggctgcgtcacctcattccccagaggagccaagagcggaggctgcccagagtgtccagcacggtctctccccttcaggaacatgacatcgagacaccctacggccttctgcatgtagtgatccggggctcccccaaggggaaccgcccagccatcctcacctaccatgatgtgggcctcaaccacaaactatgcttcaacaccttcttcaacttcgaggacatgcaggagatcaccaagcactttgtggtgtgtcacgtggatgcccctggacaacaggtgggggcgtcgcagtttcctcaggggtaccagttcccctccatggagcagctggctgccatgctccccagcgtggtgcagcatttcgggttcaagtatgtgattggcatcggagtgggcgccggagcctatgtgctggccaagtttgcactcatcttccccgacctggtggaggggctggtgctggtgaacatcgaccccaatggcaaaggctggatagactgggctgccaccaagctctccggcctaactagcactttacccgacacggtgctctcccacctcttcagccaggaggagctggtgaacaacacagagttggtgcagagctaccggcagcagattgggaacgtggtgaaccaggccaacctgcagctcttctggaacatgtacaacagccgcagagacctggacattaaccggcctggaacggtgcccaatgccaagacgctccgctgccccgtgatgctggtggttggggataatgcacccgctgaggacggggtggtggagtgcaactccaaactggacccgaccactacgaccttcctgaagatggcagactctggagggctgccccaggtcacacagccagggaagctgactgaagccttcaaatacttcctgcaaggcatgggctacatgccctcagccagcatgacccgcctggcacgctcccgcactgcatccctcaccagtgccagctcggtggatggcagccgcccacaggcctgcacccactcagagagcagcgaggggctgggccaggtcaaccacaccatggaggtgtcctgttgaagcccttgatcccgctgacgacgcccacgtcgaggccccaccgccatccttgcgccggctcatgttccctttagtttatttttgtgagggcaaa

SEQ ID NO: 158109 - DNA, 590 bp, Homo sapiens
  Payload ID: 10957
  Gene Symbol: NDRG4
  Gene Name: NDRG family member 4
  ENST ID: ENST00000565088
  CDS Start-End: 160-590
agctaggctgggccaggatccctgtataaatggcccaggagctgtgccccatcacagagccgaccatctcccactcgagctgcccccgccctctggacccgagtgactcaggcctttgtttgtccttcctggtagaggcgggttccctccctcggcaagatgccggagtgctgggatggggtgggggaaggcaacgctggagccgtgaagctggcagggctaggggaccccaggtggagcccagggcacctcctctcgccggggcatcaggaacatgacatcgagacaccctacggccttctgcatgtagtgatccggggctcccccaaggggaaccgcccagccatcctcacctaccatgatgtgggcctcaaccacaaactatgcttcaacaccttcttcaacttcgaggacatgcaggagatcaccaagcactttgtggtgtgtcacgtggatgcccctggacaacaggtgggggcgtcgcagtttcctcaggggtaccagttcccctccatggagcagctggctgccatgctccccagcgtggtgcagcatttcgggttcaagtatgtgattggcatcggagtggg

SEQ ID NO: 158110 - DNA, 618 bp, Homo sapiens
  Payload ID: 10957
  Gene Symbol: NDRG4
  Gene Name: NDRG family member 4
  ENST ID: ENST00000569539
  CDS Start-End: 233-618
ctcctggctgcccgcacctgcacccgcgcgtcggcggcgccgaagccccgctccccgcctgcgcgtctgtctcgtccgcatctccgcggaacatgacatcgagacaccctacggccttctgcatgtagtgatccggggctcccccaaggggaaccgcccagccatcctcacctaccatgatgtgggcctcaaccacaaactatgcttcaacaccttcttcaacttcgaggacatgcaggagatcaccaagcactttgtggtgtgtcacgtggatgcccctggacaacaggtgggggcgtcgcagtttcctcaggggtaccagttcccctccatggagcagctggctgccatgctccccagcgtggtgcagcatttcgggttcaagtatgtgattggcatcggagtgggcgccggagcctatgtgctggccaagtttgcactcatcttccccgacctggtggaggggctggtgctggtgaacatcgaccccaatggcaaaggctggatagactgggctgccaccaagctctccggcctaactagcactttacccgacacggtgctctcccacctcttcagccaggaggagctggtgaacaacacagagttggtgcagag

SEQ ID NO: 158111 - DNA, 579 bp, Homo sapiens
  Payload ID: 10957
  Gene Symbol: NDRG4
  Gene Name: NDRG family member 4
  ENST ID: ENST00000564867
  CDS Start-End: 150-287
agagcgctcctggctgtgagctgctcctgccgcttcgctccgcgctctcctgccgctccgctccgggtctcccgcgctcctctccccggctcggccgagcgcgctgccccgacgccgccacccagagccgggccgcgccgggcgccgagatgaaggtgctgggacaccggctggagctgctcacaggatctcaaaatagaggattcccaaatcatggcttcatgattctcaggcctcctgctccacgacgtgaccatggccgggctgcaggagctgcgattccctgaggagaagccgctgctccggggccaggacgccaccgagctggagagctccgatgccttcctcttggctgcagacacagactggaaggaacatgacatcgagacaccctacggccttctgcatgtagtgatccggggctcccccaaggggaaccgcccagccatcctcacctaccatgatgtgggcctcaaccacaaactatgcttcaacaccttcttcaacttcgaggacatgcaggagatcaccaagcactttgtggtgtgtcacgtggatgcccctggacaacaggtgggg

SEQ ID NO: 158112 - DNA, 3207 bp, Homo sapiens
  Payload ID: 10957
  Gene Symbol: NDRG4
  Gene Name: NDRG family member 4
  Uniprot ID: Q9ULP0
  ENST ID: ENST00000570248
  CDS Start-End: 107-1165
acagagccgaccatctcccactcgagctgcccccgccctctggacccgagtgactcaggcctttgtttgtccttcctggtagaggcgggttccctccctcggcaagatgccggagtgctgggatggggaacatgacatcgagacaccctacggccttctgcatgtagtgatccggggctcccccaaggggaaccgcccagccatcctcacctaccatgatgtgggcctcaaccacaaactatgcttcaacaccttcttcaacttcgaggacatgcaggagatcaccaagcactttgtggtgtgtcacgtggatgcccctggacaacaggtgggggcgtcgcagtttcctcaggggtaccagttcccctccatggagcagctggctgccatgctccccagcgtggtgcagcatttcgggttcaagtatgtgattggcatcggagtgggcgccggagcctatgtgctggccaagtttgcactcatcttccccgacctggtggaggggctggtgctggtgaacatcgaccccaatggcaaaggctggatagactgggctgccaccaagctctccggcctaactagcactttacccgacacggtgctctcccacctcttcagccaggaggagctggtgaacaacacagagttggtgcagagctaccggcagcagattgggaacgtggtgaaccaggccaacctgcagctcttctggaacatgtacaacagccgcagagacctggacattaaccggcctggaacggtgcccaatgccaagacgctccgctgccccgtgatgctggtggttggggataatgcacccgctgaggacggggtggtggagtgcaactccaaactggacccgaccactacgaccttcctgaagatggcagactctggagggctgccccaggtcacacagccagggaagctgactgaagccttcaaatacttcctgcaaggcatgggctacattgcgtacttgaaggaccgaaggctgagtggaggagcagtgccctcagccagcatgacccgcctggcacgctcccgcactgcatccctcaccagtgccagctcggtggatggcagccgcccacaggcctgcacccactcagagagcagcgaggggctgggccaggtcaaccacaccatggaggtgtcctgttgaagcccttgatcccgctgacgacgcccacgtcgaggccccaccgccatccttgcgccggctcatgttccctttagtttatttttgtgagggcaaaggggaggaaatggggttctgtttgaaaaaaatgaggggatcttagatgctgcagcagaacagtctccaggtgttttaaggggctcagtcctcctcatcccatctcactctccgtggtaacttagccaacttgacccctctcatcccactcccggcggcccaggcacagaagggcagggccatagggagggagattcgctacggatccaggccattcctgggtgagcccttgggcaggcatgtttggagatgagagaggcttcgagagggtgggtgctgggccacaggggtgcggggccagctcaggcactggcgtgggagccctgggagaccccttcccccaccctccaccaagcacacctgtttctgtctcatagcacatgtgacaatcatctggacaacagccacaagggggcgctcggaccaggcagccactttcctggtgctctctgggcccagctggtgctgtagggccacgcaggcaggggcgtcaaggggtttctctgcccaaggaagacagaacatggagaaccgtcagggcaggaaccccacagactgtcccttccagcccacactctgccacctcctggccctgtcccaattctgagccaaggcctccccgaggcagaagttgcctggtcctctgtccccacagtgacctgactgggggtgagggagaaggaggagagagcccatgtgtggtgtgtgtgcccctgagaacttcgtggtgactgcctttgggagcccgcaggtggccagaggcaggggtagctgagttcctggagaccccttttttgcccccaggttccccagagggcaacgccatcagtagcagtgtggtgtttcaggcagagctctggccaggctgtgccagtgtgtcccggacgcatcactaaggaagagagagtttatttagtcaactggcccaaggcagcgaggcttctacagtcccacaccccatagccgcctgggctggggcttactgggggctgaaggttctggacatgaacaagggtcaggtagaagagaaaggcttcccctacaccccagcctcctgctgtcccctgaagcccaggactgcgttgtatgctttccatccactcaccttaccccatagcatcttgcggcccagaaaccagagccatttgtctcagaccctaaatcaataatcacaaaccccaaaacgggagagagcagtgaaaacatgcagggctgtggacgggggaagggttgtggcgggtgttctgaggctgagaggacacctatatgcgtatttcctctacacacatcaccccccttctataatcttaagccatgactagcctggtggcgtgttagtttctgcccagttctaccccctcatgtgcttcttctgaatactgaatgtgactgtttgaaagctggtagaattcatccctcttactgtagataacactgcaaatcttggaattttgttttttgctgtttccagatgtatctataaatatctatacattatatgtgtgtgtgtgtgtgtgtgtgtgtgtgtacatcgggtcctcccatgtgtggtgttcttctggaggttgtctctttggtcaaggtgaacttttaatgtttattattttcttctccgcacaaagtaaagagcctaattttgtgtattctggtggctgctgtcatgagatgataaaatgtaaaacaaaactctagtcaacgtagaaagagttaactgtgctgaaaaactaataaagaacctaagaagaattccagtgtggtgatgccatgcccatcatgggaggcttttggagaaacagaatgtttgggcaggggctgctggtgctgcttgggttttgggttgagggtgctaggagaggatggtctccacccatctttctatttccagtacacgtcacattattttaccggtgagatgagaatgtcacaaacattaaaagccttatgtgctc

SEQ ID NO: 158113 - DNA, 549 bp, Homo sapiens
  Payload ID: 10957
  Gene Symbol: NDRG4
  Gene Name: NDRG family member 4
  ENST ID: ENST00000566656
  CDS Start-End: 356-549
aatgggagtgctcggccctgagggttgggggcctcagagtgcaccgcgctgtggcccttgtggggctgcccttgcgcagcgctccaagggacggggatgtttggcttcgatcaggctgaactgagtcctgagctctccgcagagggtgagagaaggcgttagggaggttcgcagcagggttcagcgaaggtcactggacttcgtaggacaggaacatgacatcgagacaccctacggccttctgcatgtagtgatccggggctcccccaaggggaaccgcccagccatcctcacctaccatgatgtgggcctcaaccacaaactatgcttcaacaccttcttcaacttcgaggacatgcaggagatcaccaagcactttgtggtgtgtcacgtggatgcccctggacaacaggtgggggcgtcgcagtttcctcaggggtaccagttcccctccatggagcagctggctgccatgctccccagcgtggtgcagcatttcgggttcaagtatgtgattggcatcggagtgggcgccggagcctatgtgct

SEQ ID NO: 158114 - DNA, 564 bp, Homo sapiens
  Payload ID: 10957
  Gene Symbol: NDRG4
  Gene Name: NDRG family member 4
  ENST ID: ENST00000568424
  CDS Start-End: 508-564
gagccgaccatctcccactcgagctgcccccgccctctggacccgagtgactcaggcctttgtttgtccttcctggtagaggcgggttccctccctcggcaagatgccggagtgctgggatgggcaggaggcgcattgcagttcttttgcagccccaccctccagagctgagagaactcacaggtggctgtgaaagggctgcctggtcaggagctccctcgggtggaacctgatctcctgtgaacatgcagccttcagtgcaccgccctggcccctgagactggcacctggcagggcctgccctccctactctgggattgaccttgggcctaacaggtaccaggctgcgtcacctcattccccagaggagccaagagcggaggctgcccagagtgtccagcacggtctctccccttcaggaacatgacatcgagacaccctacggccttctgcatgtagtgatccggggctcccccaaggggaaccgcccagccatcctcacctaccatgatgtgggcctcaaccacaaactatgcttcaacaccttcttcaacttcgaggaca

SEQ ID NO: 158115 - DNA, 587 bp, Homo sapiens
  Payload ID: 10957
  Gene Symbol: NDRG4
  Gene Name: NDRG family member 4
  ENST ID: ENST00000561779
  CDS Start-End: 128-587
gctcctgccgcttcgctccgcgctctcctgccgctccgctccgggtctcccgcgctcctctccccggctcggccgagcgcgctgccccgacgccgccacccagagccgggccgcgccgggcgccgagatgaaggtgctgggacaccggctggagctgctcacaggcctcctgctccacgacgtgaccatggccgggctgcaggagctgcgattccctgaggagaagccgctgctccggggccaggacgccaccgagctggagagctccgatgccttcctcttggctgcagacacagactggaaggtgggggaaggcaacgctggagccgtgaagctggcagggctaggggaccccaggtggagcccagggcacctcctctcgccggggcatcaggaacatgacatcgagacaccctacggccttctgcatgtagtgatccggggctcccccaaggggaaccgcccagccatcctcacctaccatgatgtgggcctcaaccacaaactatgcttcaacaccttcttcaacttcgaggacatgcaggagatcaccaagcactttgtggtgtgtcacgtggatgcccctg

SEQ ID NO: 158116 - DNA, 3014 bp, Homo sapiens
  Payload ID: 10957
  Gene Symbol: NDRG4
  Gene Name: NDRG family member 4
  Uniprot ID: Q9ULP0
  ENST ID: ENST00000563799
  CDS Start-End: 107-1180
acagagccgaccatctcccactcgagctgcccccgccctctggacccgagtgactcaggcctttgtttgtccttcctggtagaggcgggttccctccctcggcaagatgccggagtgctgggatggggaacatgacatcgagacaccctacggccttctgcatgtagtgatccggggctcccccaaggggaaccgcccagccatcctcacctaccatgatgtgggcctcaaccgtaagtgcagcccagcctcagtcagccctcctctgcctcccatcagccagagcgacaaactatgcttcaacaccttcttcaacttcgaggacatgcaggagatcaccaagcactttgtggtgtgtcacgtggatgcccctggacaacaggtgggggcgtcgcagtttcctcaggggtaccagttcccctccatggagcagctggctgccatgctccccagcgtggtgcagcatttcgggttcaagtatgtgattggcatcggagtgggcgccggagcctatgtgctggccaagtttgcactcatcttccccgacctggtggaggggctggtgctggtgaacatcgaccccaatggcaaaggctggatagactgggctgccaccaagctctccggcctaactagcactttacccgacacggtgctctcccacctcttcagccaggaggagctggtgaacaacacagagttggtgcagagctaccggcagcagattgggaacgtggtgaaccaggccaacctgcagctcttctggaacatgtacaacagccgcagagacctggacattaaccggcctggaacggtgcccaatgccaagacgctccgctgccccgtgatgctggtggttggggataatgcacccgctgaggacggggtggtggagtgcaactccaaactggacccgaccactacgaccttcctgaagatggcagactctggagggctgccccaggtcacacagccagggaagctgactgaagccttcaaatacttcctgcaaggcatgggctacatgccctcagccagcatgacccgcctggcacgctcccgcactgcatccctcaccagtgccagctcggtggatggcagccgcccacaggcctgcacccactcagagagcagcgaggggctgggccaggtcaaccacaccatggaggtgtcctgttgaagcccttgatcccgctgacgacgcccacgtcgaggccccaccgccatccttgcgccggctcatgttccctttagtttatttttgtgagggcaaaggggaggaaatggggttctgtttgaaaaaaatgaggggatcttagatgctgcagcagaacagtctccaggtgttttaaggggctcagtcctcctcatcccatctcactctccgtggtaacttagccaacttgacccctctcatcccactcccggcggcccaggcacagaagggcagggccatagggagggagattcgctacggatccaggccattcctgggtgagcccttgggcaggcatgtttggagatgagagaggcttcgagagggtgggtgctgggccacaggggtgcggggccagctcaggcactggcgtgggagccctgggagaccccttcccccaccctccaccaagcacacctgtttctgtctcatagcacatgtgacaatcatctggacaacagccacaagggggcgctcggaccaggcagccactttcctggtgctctctgggcccagctggtgctgtagggccacgcaggcaggggcgtcaaggggtttctctgcccaaggaagacagaacatggagaaccgtcagggcaggaaccccacagactgtcccttccagcccacactctgccacctcctggccctgtcccaattctgagccaaggcctccccgaggcagaagttgcctggtcctctgtccccacagtgacctgactgggggtgagggagaaggaggagagagcccatgtgtggtgtgtgtgcccctgagaacttcgtggtgactgcctttgggagcccgcaggtggccagaggcaggggtagctgagttcctggagaccccttttttgcccccaggttccccagagggcaacgccatcagtagcagtgtggtgtttcaggcagagctctggccaggctgtgccagtgtgtcccggacgcatcactaaggaagagagagtttatttagtcaactggcccaaggcagcgaggcttctacagtcccacaccccatagccgcctgggctggggcttactgggggctgaaggttctggacatgaacaagggtcaggtagaagagaaaggcttcccctacaccccagcctcctgctgtcccctgaagcccaggactgcgttgtatgctttccatccactcaccttaccccatagcatcttgcggcccagaaaccagagccatttgtctcagaccctaaatcaataatcacaaaccccaaaacgggagagagcagtgaaaacatgcagggctgtggacgggggaagggttgtggcgggtgttctgaggctgagaggacacctatatgcgtatttcctctacacacatcaccccccttctataatcttaagccatgactagcctggtggcgtgttagtttctgcccagttctaccccctcatgtgcttcttctgaatactgaatgtgactgtttgaaagctggtagaattcatccctcttactgtagataacactgcaaatcttggaattttgttttttgctgtttccagatgtatctataaatatctatacattatatgtgtgtgtgtgtgtgtgtgtgtgtgtgtacatcgggtcctcccatgtgtggtgttcttctggaggttgtctctttggtcaaggtgaacttttaatgtttattattttcttctccgcacaaagtaaagagcctaattttgtgtattctggtggctgctgtcatgagatgataaaatgtaaaacaaaactctagtcaacgtagaaagagttaactgtgctgaaaaactaataaagaacctaag

SEQ ID NO: 158117 - DNA, 2130 bp, Homo sapiens
  Payload ID: 10958
  Gene Symbol: NDUFA4
  Gene Name: NDUFA4, mitochondrial complex associated
  Uniprot ID: O00483
  ENST ID: ENST00000339600
  CDS Start-End: 200-445
agatctaagcaggcactattaaagacagtcgcatccgggccctcctgccgcaagctgccctcccagccaagggtccttcaggtaggaggtcctgggtgactttggaagtccgtagtgtctcattgcagataatttttagcttagggcctggtggctaggtcggttctctcctttccagtcggagacctctgccgcaaacatgctccgccagatcatcggtcaggccaagaagcatccgagcttgatccccctctttgtatttattggaactggagctactggagcaacactgtatctcttgcgtctggcattgttcaatccagatgtttgttgggacagaaataacccagagccctggaacaaactgggtcccaatgatcaatacaagttctactcagtgaatgtggattacagcaagctgaagaaggaacgtccagatttctaaatgaaatgtttcactataacgctgctttagaatgaaggtcttccagaagccacatccgcacaattttccacttaaccaggaaatatttctcctctaaatgcatgaaatcatgttggagatctctattgtaatctctattggagattacaatgattaaatcaataaataactgaaacttgatatgtgtcacttttttatgctgaaagtatgctctgaactttagagtataggaaattaactattagaatttaaagaatttcttgaatttctgtagtttgaaaatacgactttaagctgctttagtaaaacacttccattttgtgtatagactgttggtaacttcactagagcatacataacaactggaactggaaattatacaaaagtaaattgggaaggatactccagcatctgacactggcaaaatggaaacctttgagtttctcttactggctgttgaagtgtgtgcagtttttaacaatggtttttacttggcatctctttgttgtgattttcaaggttataagttgctttggtcctaggattgaagttgaaatctgagtttatcagtgctaaccatggtgctagtagtcaagagatcttgagaattttggctgctgagtcttggtgcagggtgcaggttttcttttcttttttcttttttttttttttgagatagtctctgtcacccaggctggagtgcagtggtacaaacatggatcactgcagcctctacctcccgggcttaagtgatcctcctgcctcagcccctaagtagccgggactacaggtatgtgccaccatgcccagttaatttttgtaattttttttagagacagggttttgccatgttgcccaggctggtctcaaactcttgagctcaagcgatccattctcctcagcctcccagggtgctgggattacaggcgtgagccattgcgcttagccatggtgcaggttttcaaaggccaggaagtatattcataattttaagatggggaatatagcaagttttcacataggtgtgtgtaagtcatcacatcatagaaacttgaggaattcagtgacattaattttggattttcatacgtaagtatacaattaaatgtttacagggtagtagaagcacattttaaatgtcaggaactgaactaagtatttgaattacgtggattatctcaaaaattttgaaattgttaaacgagttgaattacttgaattcattctgttagtcaaatggtggatatttacacccatgtagttttgaatttagagtgtgtagagtgttttcagttaccagactccatgcttttacctcctatgtgtcaggtataatttgaacctctaagaacagggtttctcaaccttgccactgttgactatttctgaaagacagtttggtttagcagaccatcccatgcgctttagcttgtttagtagctaacttgggctctgccactacagacaaaaagcactctttccctccaattcccacaggctatgagaagaatggagacattaccaaatgtccattggtgggcaaaattgcttcattcctacctctgttgagaattactctagatcctttggcacaaattacctcaaagtttaaaattgtgtaaacaaacagtgtgtcatgtaattgaaaaacattaagcaactccaaataaatgctacattaagaa

SEQ ID NO: 158118 - DNA, 656 bp, Homo sapiens
  Payload ID: 10959
  Gene Symbol: NDUFC2-KCTD14
  Gene Name: NDUFC2-KCTD14 readthrough
  Uniprot ID: E9PQ53
  ENST ID: ENST00000530054
  CDS Start-End: 122-466
cgtgagtccggcgcgcagaggaggaggagaaagctgaccgcttaggccggggtagtggtcgtcgtggttttccttgtagttcgtggtctgagaccaggcctcaagtggaaacggcgtcaccatgatcgcacggcggaacccagaacccttacggtttctgccggatgaggcccggagcctgcccccgcccaagctgaccgacccgcggctcctctacatcggcttcttgggctactgctccggcctgattgataacctaatccggcggaggccgatcgcgacggctggtttgcatcgccagcttctatatattacggcctttttttttgctggatattatcttgtaaaacgtgaagactacctgtatgctgtgagggaccgtgaaatgtttggatatatgaaattacatccagaggattttcctgaagaagatgtctactgttgtggagctgaacgtcgggggtgagttccacaccaccaccctgggtaccctgaggaagtttccgggctcaaagctggcagagatgttctctagcttagccaaggcctccacggacgcggagggccgcttcttcatcgaccgccccagcacctatttcagacccatcctggactacctgcgcactgggcaagtgcccacacagcacatccctgaa

SEQ ID NO: 158119 - DNA, 566 bp, Homo sapiens
  Payload ID: 10959
  Gene Symbol: NDUFC2-KCTD14
  Gene Name: NDUFC2-KCTD14 readthrough
  ENST ID: ENST00000528251
  CDS Start-End: 101-301
aggaggagaaagctgaccgcttaggccggggtagtggtcgtcgtggttttccttgtagttcgtggtctgagaccaggcctcaagtggaaacggcgtcaccatgatcgcacggcggaacccagaacccttacggtttctgccggatgaggcccggagcctgcccccgcccaagctgaccgacccgcggctcctctacatcggcttcttgggctactgctccggcctgattgataacctaatccggcggaggccgatcgcgacggctgatgtctactgttgtggagctgaacgtcgggggtgagttccacaccaccaccctgggtaccctgaggaagtttccgggctcaaagctggcagagatgttctctagcttagccaaggcctccacggacgcggagggccgcttcttcatcgaccgccccagcacctatttcagacccatcctggactacctgcgcactgggcaagtgcccacacagcacatccctgaagtgtaccgtgaggctcagttctacgaaatcaagcctttggtcaagctgctggaggacatgccacagatctttggt

SEQ ID NO: 158120 - DNA, 530 bp, Homo sapiens
  Payload ID: 10959
  Gene Symbol: NDUFC2-KCTD14
  Gene Name: NDUFC2-KCTD14 readthrough
  ENST ID: ENST00000612612
  CDS Start-End: 30-434
accaggcctcaagtggaaacggcgtcaccatgatcgcacggcggaacccagaacccttacggtttctgccggatgaggcccggagcctgcccccgcccaagctgaccgacccgcggctcctctacatcggcttcttgggctactgctccggcctgattgataacctaatccggcggaggccgatcgcgacggctggtttgcatcgccagcttctatatattacggcctttttttttgctggatattatcttgtaaaacgtgaagactacctgtatgctgtgagggaccgtgaaatgtttggatatatgaaattacatccagaggattttcctgaagaagggggtgacattggcctctgttgcttgtccccaggatccctctctgacacccctgctgtgtttgctgtggggagttctgctgccaccacccattagatgtctactgttgtggagctgaacgtcgggggtgagttccacaccaccaccctgggtaccctgaggaagtttccgggctcaaagctggcagagatg

SEQ ID NO: 158121 - DNA, 386 bp, Homo sapiens
  Payload ID: 10959
  Gene Symbol: NDUFC2-KCTD14
  Gene Name: NDUFC2-KCTD14 readthrough
  ENST ID: ENST00000614236
  CDS Start-End: 30-290
accaggcctcaagtggaaacggcgtcaccatgatcgcacggcggaacccagaacccttacggtttctgccggatgaggcccggagcctgcccccgcccaagctgaccgacccgcggctcctctacatcggcttcttgggctactgctccggcctgattgataacctaatccggcggaggccgatcgcgacggctgggggtgacattggcctctgttgcttgtccccaggatccctctctgacacccctgctgtgtttgctgtggggagttctgctgccaccacccattagatgtctactgttgtggagctgaacgtcgggggtgagttccacaccaccaccctgggtaccctgaggaagtttccgggctcaaagctggcagagatg

SEQ ID NO: 158122 - DNA, 9216 bp, Homo sapiens
  Payload ID: 10960
  Gene Symbol: NEBL
  Gene Name: nebulette
  Uniprot ID: O76041
  ENST ID: ENST00000377122
  CDS Start-End: 398-3442
cttgagtgttagagctgagtagttttcccagaatctctaagtcctttttatgctcttttatgaatgaatagaattagtaaaagataaataaattttttcttttggatttcttaaccagtggaaaaaatgttgactttaaaagttcataaaatcaaattttgcttaagaatatgttatttccacttgtgaggccagcctggtagacctctgggatccttttctgttcactcacacaccactgagataaggagtgaagtgtgggctaaatagggctgaggcttgggcaagggcatttctgccagagcaccagagacgtcagcatctcaagggcactgtggtatggaaaaggacgccacatgagtaaattttaaaaatataaatattttaaagggtaaaaatgagggtccctgtatttgaggatataaaagatgaaactgaagaagaaaagataggggaagaagaaaatgaagaagaccaggtcttctataagcctgttattgaagacttaagcatggaattggccagaaaatgcacggaactcattagcgatatccgttataaagaagagtttaaaaagtccaaggataagtgtacatttgtgactgacagtcctatgctaaaccatgtaaaaaatatcggtgcttttatttctgaggcaaaatacaaaggcaccattaaagctgacctttctaattctctttataagcggatgccagccacaattgacagtgtttttgcaggagaagttacacagctccagagtgaggtggcctacaagcagaaacatgatgctgccaaaggattctcagattatgcccacatgaaggagccccctgaggttaaacatgccatggaggtcaataaacaccagagtaatatttcttataggaaagacgtgcaggacacccacacgtacagtgcagaacttgaccgaccagacatcaagatggcaacccagatctctaagatcataagcaatgcagaatacaagaaaggacaaggaataatgaataaagagcccgctgtaattggaagaccagattttgaacatgccgtggaagcttctaaactttctagtcaaattaaatacaaagaaaaatttgataatgaaatgaaggataagaaacatcattacaatcctcttgaaagtgcttcttttaggcagaatcagcttgctgctacactggcgagcaatgtgaagtacaagaaagacattcaaaatatgcatgatccagtttcagatctcccaaatttgttgtttttagaccatgttttgaaagccagcaaaatgctcagcggccgagaatataaaaagctctttgaggaaaacaaaggaatgtatcattttgatgcagatgctgtggaacatctgcaccataaaggcaatgccgtcctccaaagtcaggtgaaatataaagaagaatatgagaaaaataagggaaagccaatgcttgaatttgttgagacaccatcatatcaagcttcaaaggaggctcaaaagatgcaaagtgaaaaagtttacaaagaggattttgagaaggagattaaaggaaggtcatcactggatttagacaagactccagaatttttacatgtaaagtacatcaccaaccttctgagggagaaagaatataaaaaagatttggaaaatgagataaaagggaaaggaatggaacttaattcagaagttcttgatatccaaagagcaaagcgagcctctgaaatggcaagtgagaaagaatacaagaaagacctggagtcaataattaaagggaaaggaatgcaagctggcactgacacccttgaaatgcagcatgccaagaaggctgcagagatagcgagtgagaaagactataaaagagatctggagactgaaattaaagggaaagggatgcaggtgagcacagacactcttgatgtccagagagctaagaaagcatccgagatggccagccagaaacaatacaagaaggacttagaaaatgaaattaaagggaaaggaatgcaagtgagcatggatatcccagatatccttcgagccaagaggacatctgaaatctatagccagagaaagtataaagatgaagcagagaagatgctttctaactattctaccatagcagatactcctgaaattcagagaattaagacaactcaacaaaacattagtgcggtattttataagaaagaagtgggagctggcactgcagtgaaagatagcccagagatcgaacgagtgaagaaaaatcagcagaatattagttcagtgaaatacaaagaagagattaaacatgcaacagccatttctgatcctccagaactaaagagagttaaagaaaaccagaagaacatcagcaatctccagtataaagagcaaaactacaaggccactccggtaagcatgaccccggagatagagagagtgaggcgaaaccaggagcagctgagtgcggtaaaatataagggagaacttcaacggggaactgcaatttctgatccaccagagctgaagagggcaaaagaaaaccagaaaaacatcagcaatgtttattacagaggtcagctgggaagagctaccactttaagtgtaactcctgaaatggaaagagtgaagaagaatcaagaaaatattagctcggtaaaatatacccaggaccataaacagatgaaaggtagaccaagtctgattttagatacacctgctatgagacatgttaaagaagcacaaaatcatatttcaatggtaaaataccatgaagattttgaaaaaacaaaggggagaggctttactcccgtcgtggacgatcctgtgacagagagagtgaggaagaacacccaggtggtcagcgatgctgcctataaaggggtccaccctcacatcgtggagatggacaggagacctggaatcattgttgacctcaaagtttggcgcacagatcctggctccatcttcgaccttgatcccctggaagacaatattcagtctagaagtctccatatgctctctgaaaaggcgagtcactataggcgacactggtctcgatcccattccagcagtactttcggtacaggtctcggagacgacaggtcagaaatctccgagatttaccctagcttttcatgctgcagtgaggtaacaagaccgtctgatgaaggagcacctgttcttcccggagcctatcagcaaagccattcccaaggctatggctacatgcaccagaccagtgtgtcatccatgagatcaatgcagcattcaccaaatctaaggacctaccgagccatgtacgattacagtgcccaggatgaagacgaggtctcctttagagacggcgactacatcgtcaacgtgcagcctattgacgatggctggatgtacggcacagtgcagagaacagggagaacaggaatgctcccagcgaattacattgagtttgttaattaattatttctccctgccctttgagctttattctaatgtatcccaaacctaatctttttaaaagatagaagatacttttaagacaacttggccattattttacaatgatgtatccttcctttgacaattagacacacaggtaccaggaagaaggaatgacctctgggctgaaaacagcagcattttcagtaattcctacaaacaaaaatctttgtgtctggacacctggtgctgctaattgtgttcatggtttcctttgattggctattgaacccttctgggaaatgtatttttgtagactttaatagagaagttgattgtcccttaaatgtagtgtgtgtttgaaacttcttagctgtcactttggaatcaccccaagccaattctcttaactctgtaatgcagccaataatttcaaacccgttttgcttttgagtcatgaggcaatttccaatattagtgaaaattgcccaatataataagtgtaaacagtggcagaaggacagtctggttaaaattatattgactggtggccttagggatctagaaacttctactaaacagagaaatttccttgttccctaggctgactggtatctatttatttctcatttgtaccaaggcatctcctactctccatttatattctatggacccaagtctatgctcagttccacagaatgtcaggaccaaataacttcacagctactctgcaaagggcaaattataatgtcattgatataatttccctagtagcatttaccctgttgcatgtcatgtagattcaagcttctgtaacataggcagctgcactgcgcgttcctattattgaagcaaaaagggtgactgatacctaaaagccctttcttcctctagtcgccagctcatcagaaaaacatactttgaaaagatgcttgagattttcctgctgcatcgcactctagttttgaaggatttacatcttaggaaataacatgtatactctagtaaataagcgatttaggtgttccattgaacagctttgattaacttaatgccaccattgatttcaaagtgaagaaaatgtaacagaagccagtgaagcaatggaagctggagtgtgactggaaaaatactcagcaaacaaagttaccaattccatacagagatgatctggtatcttcttttggaaaatggtattcaaattctggaatggaaatctagccaccaaaacgggttaatcaaaagacgtccttttccatttttttttgcttttattttctaaatcatttttaagggaatgaaacaggaatgtcatcagagattttttagtacaggcccaagagcctgttctctaagaaagaaattgttgccatgttttgattttcgaataagtgactttgcaggctttatgctagcccttgctggtgggtcttgaaatttcatccagagtctgcagtccaggtcaccaagccagcggcacccgtcggcaaccctgtgtttttctgattgtgccgtttactgtgacctgcaacggggtggcattcacttagggtctgacttcacagctatgacaaaaccgaaaaagcaaaactgcaaaaaagtactaagatgtacgggtcttggggatatctgccttatatgttatattcaaggaaattaacaaaacatcctgtaaaacatcgtttaaggaaacgtttactagtccaaaggccaaagctaatttatttccactttagaaaagttagcacatgcttttgaaaatctgtgatttcattttattaggctaaaagggtaaataggctttattacactgaagctgcatctatatgtcactgacataaagttgaaaaaataaatgcaggcaaataactagagacttcttttaagggggtttggctggttttctctcactgaaatggccagtcgtgattaaagtgataaaaccccatatctgttttggtatattgtacacaaacctacaaaaataaactgaacttgcaatatttttgcaaaaaaatctgtcgttaaaactgaggataaaatacctgctcaattttattttactaagtatatatttacatttcacccaggcaggccattttcttttgtgattataagaaagagtagttgttgattaaattttcagactaaatataggacaggtacaattttggataaatagcacatttataagaaccgcaatgaaaactgacttgaaataatgcttgtaatcaggaaagtaatttcatccaccgatttcaaaaccagattcactgagcataaaagtcaatacatatttgaggaataagtctcctaaaattttaagcttcacgtaataatgtttgcatagcaaaatatttctgcttcaagcctttaggaattaagatctgatcagaatttaactaaagggtagttgttttacaatgaagactaaaactgaacaagatgttgcatgctcttgaggccataatttggtagtgttggcagttgttaataaagcttgtcaggatgttaagcatctcaggagaaatattggaaaattatatgtataaaaccaaagtgctatttttaaaagcatcatttaaaaaaaaatgacatgcctgaacaacttttccactttccacgtgcttccctcccacctttggtttggcaacaggtatctcgtgcatgaagctgacagctaaagaagattttaaaaattgagttaaagatgactgtgtaaatgtccaagcacagagagcatgcacctgactttctaaagtttgatgtgttctcaagcctgacagaagcacaaggaacagtttgatacacttttaaaaggttctgaaaacaaagctgtatagggatcctctctctcttgagcaaagtatagcaacagaatatattgcttttgttgtaagcttttgtagtacatgtttttactaataattcttgttctctagaaagctttctatttctaacctatggcaaaatgaatccttcatgtcttcttgttattgtttacacacttgcagtgtagcccagtttgaaatatttatttggttatcaactgcccatggaggaggctcttgatgatcccaggtctcctcgacctccatacaccacacaggcatttgtaagcacagtttccacaagcaccttgtaggaatatggataagattagaccagcccctctctgtccactgggtttatttcttgaagaagatgcagatctggtttttccaatgtgccacagtctttccttatcctctccatgctgagcttgacaacactctgggaatgaggaacaagactttttctaaaaagatagtggaagttcaagggatgtacctcgttttcaggttcatccatctccagtggaatgttttcaataaaagatgaagaaaatgtgtgtgatctttaataacacatccctatagaaagtggataaaagatataccaaaactgtaatacagatatatacaaatataggtgcctttttgattactcttgtttgtctagtatgctcttggaaagaaaaccaagcaagcaagttgctgcctattctatagtaatattttattacacatgattgatatttttgtggtagggaagtgggatgctcctcagatattaaaggtgttagctgattgtattttatctctaaagatttagaactttagaaaatgccgacttcttccatctatttctgaaaggttctttgtggatttatatagagttgagctatataaacattaactttagatttgggatttaaaatgcctattgtaagatagaataattgtgaggctggattcactacacaagatgaacttcacttcataaattaattataccttagcgatttgcttctgataatctaaaagtggctagattgtggttgttttggttaaggtgatatggaggtgggagagcttttagttaagtaagaagctatgtaaactgacaaggatgctaaaataaaagtctctgaagtattccatgccttttggaccctttcctcgcaactaactgtcaactgttgatcaaaaaagtcaaggcattgtatgttgcttctgtggttattattctgtgatgcttagactacttgaacccataaacttggaagaatctttgagcaaattttctcagttgtctgtatgacttcagtatattcctgggaatgccataggattttttgtgcttgatacatggtatccagtttgcatagtatcacttctttgtaatccagttgctgttaagaatgatgtactttaaaggaaaagagaaaactgcatcacagtcccattctccagtgtccatgcaatgaattgctgagcatttaggaagcagcaccaagtctattacaggcatggtgtgaaacttgatgtttgacctgtgatcaaaattgaaccattgtacagtttggcttctgtttgcttcaaaatatgtagaattgtggttgatgattaatttgcgagactaactttgagagtgtaacagttttgaagaaaacattgaatgttttgcaaatgaaggggcttcacggaatgttacaatgttactaatataatttggcttttgttatgcaaattgttaacaccagctattaaaatatattttagtagaaatgctttaattcatatttttttcctctacactgtgaatctttaagccttggtggactagagcaacatcgtgctgcccaaaggactaacctatgcaaactagttcacattttagtggatgtcgcagttaatgtgtaataagacattatttcccctgcataatgtacaacagcattgaaatgacacattaagcctagcatcacattgtatagtacagtcactcacaaacccttcaaggctaccctaatcattaacattaatatttgtttaaaagcaaatcaccgatttatctattgaaactacttaaatgacggcaaaccaggaatgacagatggctgtgtcagcaatggctttaatgtgttccctgcaagtggtctcctatgatagaactgcgttctcaaatgcactctcttcagggtcttaatattctgtgttttctctctgtatttgtaaaacattataacacattaatttcctatctctacacatttggtttgcttaaataaatgcaggatataaaaaaaatggttcacttcttggctctcaccgtggtttcttggagcatgggttgttagatgcaagcaatgcaccctaataataccccgggtctgagatttaacatgacaactcacatcaaatcgcatcagaggtgtgtgctgccttcagtgcatttacattggtgaatcagtcaagatattttcctcccccaaataaacttagttgtaagtgataacaatattatgcttctccaagctcagtatctttctgattttatatcaaagtaccgcaacaatgcatcattgtagttaatttatttcaagaataaattcctcatatgtcctcaatagtacaattctaattttcttctattcataagatgaaagaaatggtttggagcatagaatagaaagtgcacaaattgagtacataaaatgggaagcaactgatttctcagctaagaaaggctcatttatcacagaacacaattgcttttctccccccactacgcttcccataattgaaaaagtgagtccctatttttcacactcatataaatctatgcgatttggatgctagtcttattgtattattttgtaaaactttctctttggctcataatccttcctaattgtaaattgataaactttgcggatgacatctgctcgtagaataaacacttcttccaaa

SEQ ID NO: 158123 - DNA, 3008 bp, Homo sapiens
  Payload ID: 10960
  Gene Symbol: NEBL
  Gene Name: nebulette
  Uniprot ID: O76041
  ENST ID: ENST00000417816
  CDS Start-End: 355-1167
cctgcgcggcggcggcggcgaggcgggggagcgagtgagcgcgaggggcgggcgcgagtgactgtgtgagtcacccgtacctggagtgcgagcgacgcagagccagcggcgcggagccggagccggagccgagacccagcgcctgcgagcccgagagcgcggccggccccaggcgccaggccccgtcgccctccccgtgcactcacccgtggcccggcgccgactccctacccggcgcccgccgcccgcagccctcccgcctgccaggaggcggtgcggggctcgccgggggatgtcacagcggctcctgggagccagcagccgccgccgccgccgcccccgggaaccgcgatcatgaacccccagtgcgcccgttgcggaaaagtcgtgtatcccaccgagaaagtcaactgcctggataagtattggcataaaggatgtttccattgtgaggtctgcaagatggcactcaacatgaacaactacaaaggctatgaaaagaagccctattgtaatgcacactacccgaagcagtccttcaccacggtggcagatacacctgaaaatcttcgcctgaagcagcaaagtgaattgcagagtcaggtcaagtacaaaagagattttgaagaaagcaaagggaggggcttcagcatcgtcacggacactcctgagctacagagactgaagaggactcaggagcaaatcagtaatgtaaaataccatgaagattttgaaaaaacaaaggggagaggctttactcccgtcgtggacgatcctgtgacagagagagtgaggaagaacacccaggtggtcagcgatgctgcctataaaggggtccaccctcacatcgtggagatggacaggagacctggaatcattgttgcacctgttcttcccggagcctatcagcaaagccattcccaaggctatggctacatgcaccagaccagtgtgtcatccatgagatcaatgcagcattcaccaaatctaaggacctaccgagccatgtacgattacagtgcccaggatgaagacgaggtctcctttagagacggcgactacatcgtcaacgtgcagcctattgacgatggctggatgtacggcacagtgcagagaacagggagaacaggaatgctcccagcgaattacattgagtttgttaattaattatttctccctgccctttgagctttattctaatgtatcccaaacctaatctttttaaaagatagaagatacttttaagacaacttggccattattttacaatgatgtatccttcctttgacaattagacacacaggtaccaggaagaaggaatgacctctgggctgaaaacagcagcattttcagtaattcctacaaacaaaaatctttgtgtctggacacctggtgctgctaattgtgttcatggtttcctttgattggctattgaacccttctgggaaatgtatttttgtagactttaatagagaagttgattgtcccttaaatgtagtgtgtgtttgaaacttcttagctgtcactttggaatcaccccaagccaattctcttaactctgtaatgcagccaataatttcaaacccgttttgcttttgagtcatgaggcaatttccaatattagtgaaaattgcccaatataataagtgtaaacagtggcagaaggacagtctggttaaaattatattgactggtggccttagggatctagaaacttctactaaacagagaaatttccttgttccctaggctgactggtatctatttatttctcatttgtaccaaggcatctcctactctccatttatattctatggacccaagtctatgctcagttccacagaatgtcaggaccaaataacttcacagctactctgcaaagggcaaattataatgtcattgatataatttccctagtagcatttaccctgttgcatgtcatgtagattcaagcttctgtaacataggcagctgcactgcgcgttcctattattgaagcaaaaagggtgactgatacctaaaagccctttcttcctctagtcgccagctcatcagaaaaacatactttgaaaagatgcttgagattttcctgctgcatcgcactctagttttgaaggatttacatcttaggaaataacatgtatactctagtaaataagcgatttaggtgttccattgaacagctttgattaacttaatgccaccattgatttcaaagtgaagaaaatgtaacagaagccagtgaagcaatggaagctggagtgtgactggaaaaatactcagcaaacaaagttaccaattccatacagagatgatctggtatcttcttttggaaaatggtattcaaattctggaatggaaatctagccaccaaaacgggttaatcaaaagacgtccttttccatttttttttgcttttattttctaaatcatttttaagggaatgaaacaggaatgtcatcagagattttttagtacaggcccaagagcctgttctctaagaaagaaattgttgccatgttttgattttcgaataagtgactttgcaggctttatgctagcccttgctggtgggtcttgaaatttcatccagagtctgcagtccaggtcaccaagccagcggcacccgtcggcaaccctgtgtttttctgattgtgccgtttactgtgacctgcaacggggtggcattcacttagggtctgacttcacagctatgacaaaaccgaaaaagcaaaactgcaaaaaagtactaagatgtacgggtcttggggatatctgccttatatgttatattcaaggaaattaacaaaacatcctgtaaaacatcgtttaaggaaacgtttactagtccaaaggccaaagctaatttatttccactttagaaaagttagcacatgcttttgaaaatctgtgatttcattttattaggctaaaagggtaaataggctttattacactgaagctgcatctatatgtcactgacataaagttgaaaaaataaatgcagg

SEQ ID NO: 158124 - DNA, 633 bp, Homo sapiens
  Payload ID: 10960
  Gene Symbol: NEBL
  Gene Name: nebulette
  ENST ID: ENST00000434381
  CDS Start-End: 282-633
gttctgatcctagtgcttcattgaatggctttgtaaatgagacacataatttttcatagccttcattttgtcatctgtgaaagagagggctttaggtgtattgatttcttaaggatccctttggcttgaaattctgattctagaatctcaaatggaaaatttgtgttcacattgcacgtggtgtttggtttttgttttcaaaagtttgtgcattaaatctcaacagcttattttcttgcagcacagtgaagagtccctaagaacatattacgtgatgggaaatgagaaataactgcactgcaagcctgatgaaggtcttctataagcctgttattgaagacttaagcatggaattggccagaaaatgcacggaactcattagcgatatccgttataaagaagagtttaaaaagtccaaggataagtgtacatttgtgactgacagtcctatgctaaaccatgtaaaaaatatcggtgcttttatttctgaggcaaaatacaaaggcaccattaaagctgacctttctaattctctttataagcggatgccagccacaattgacagtgtttttgcaggagaagttacacagctccagagtgaggtggcctacaagcagaaacatgatgctgcca

SEQ ID NO: 158125 - DNA, 703 bp, Homo sapiens
  Payload ID: 10960
  Gene Symbol: NEBL
  Gene Name: nebulette
  ENST ID: ENST00000460652
  CDS Start-End: 1-346
gaaaaatcagcagaatattagttcagtgaaatacaaagaagagattaaacatgcaacagccatttctgatcctccagaactaaagagagttaaagaaaaccagaagaacatcagcaatctccagtataaagagcaaaactacaaggccactccggtaagcatgaccccggagatagagagagtgaggcgaaaccaggagcagctgagtgcggtaaaatataagggagaacttcaacggggaactgcaatttctgatccaccagagctgaagagggcaaaagaaaaccagaaaaacatcagcaatgtgtttattacagaggtcagctgggaagagctaccactttaagtgtaactcctgaaatggaaagagtgaagaagaatcaagaaaatattagctcggtaaaatatacccaggaccataaacagatgaaaggtagaccaagtctgattttagatacacctgctatgagacatgttaaagaagcacaaaatcatatttcaatggtagggtccaaccagatcattcttaaaacatgctaaggaatgggcggatccagtgcacggatggcattacttcactattaatccgataactaacaaagcatggaaatgtggttggcttgtcttttgagggaggggcatttctaatcacactgaaatgcagtggaaacatttagtctaataaaatgatttttctcagtga

SEQ ID NO: 158126 - DNA, 680 bp, Homo sapiens
  Payload ID: 10960
  Gene Symbol: NEBL
  Gene Name: nebulette
  ENST ID: ENST00000481592
  CDS Start-End: 1-192
gtaagcatgaccccggagatagagagagtgaggcgaaaccaggagcagctgagtgcgggcatgaactgcgtgtccaggaaatttgggactgtgttgctgtaccttagctgtgtttgcttattcaagagatcttcattaagtacccaaatgtactgggcattgtcctggtcacccagacacaaagatgggtaaaatataagggagaacttcaacggggaactgcaatttctgatccaccagagctgaagagggcaaaagaaaaccagaaaaacatcagcaatgtgtttattacagaggtcagctgggaagagctaccactttaagtgtaactcctgaaatggaaagagtgaagaagaatcaagaaaatattagctcggtaaaatatacccaggaccataaacagatgaaaggtagaccaagtctgattttagatacacctgctatgagacatgttaaagaagcacaaaatcatatttcaatggtagggtccaaccagatcattcttaaaacatgctaaggaatgggcggatccagtgcacggatggcattacttcactattaatccgataactaacaaagcatggaaatgtggttggcttgtcttttgagggaggggcatttctaatcacactgaaatgcagtggaaacatttagtctaataaaatgatttttctcagtga

SEQ ID NO: 158127 - DNA, 448 bp, Homo sapiens
  Payload ID: 10960
  Gene Symbol: NEBL
  Gene Name: nebulette
  ENST ID: ENST00000473616
  CDS Start-End: 1-285
gatccaccagagctgaagagggcaaaagaaaaccagaaaaacatcagcaatgtttattacagaggtcagctgggaagagctaccactttaagtgtaactcctgaaatggaaagagtgaagaagaatcaagaaaatattagctcggtaaaatatacccaggaccataaacagatgaaaggtagaccaagtctgattttagatacacctgctatgagacatgttaaagaagcacaaaatcatatttcaatggtagggtccaaccagatcattcttaaaacatgctaaggaatgggcggatccagtgcacggatggcattacttcactattaatccgataactaacaaagcatggaaatgtggttggcttgtcttttgagggaggggcatttctaatcacactgaaatgcagtggaaacatttagtctaataaaatgatttttctcagtga
